United States Patent Application Publication US 2018/0126003 A1 - sequence listing, part 96

SEQ ID NO: 174065 - DNA, 4803 bp, Artificial Sequence
  derived and/or modified sequence
agcaaagagtgctgttcttgttctctgggtggattttccaagatcacaactaaactgcttgattttgtcctgggactttttttaaaaaaaaattattgattggcttttaaaatcaagaatctttgggccctgaaatgtaattacacatttgttgatgcgtgcatgatggttagtttgcccctgcagtcaaaagtgtcttcagcagttcctatcacgtcagcctcgccaggctggacttcctttgagtagaatcaggaatgaattaagcagcacagcccgagacgcaccacataaaaggctgggaacaccagccagccgaagaaagcccatttttgtgtctgtcagcttagatgcccttgcccggactgctaaagatgcagctatttacagtggacagaaactgaaggggtgaaagaaaacccaagatgccagaccagtttgaccaggcggttgtgctgaaccagctgcggtactcagggatgctggagactgtgagaatccgcaaagctgggtatgcggtccgaagaccctttcaggacttttacaaaaggtataaagtgctgatgaggaatctggctctgcctgaggacgtccgagggaagtgcacgagcctgctgcagctctatgatgcctccaacagcgagtggcagctggggaagaccaaggtctttcttcgagaatccttggaacagaaactggagaagcggagggaagaggaagtgagccacgcggccatggtgattcgggcccatgtcttgggcttcttagcacgaaaacaatacagaaaggtcctttattgtgtggtgataatacagaagaattacagagcattccttctgaggaggagatttttgcacctgaaaaaggcagccatagttttccagaagcaactcagaggtcagattgctcggagagtttacagacaattgctggcagagaaaagggagcaagaagaaaagaagaaacaggaagaggaagaaaagaagaaacgggaggaagaagaaagagaaagagagagagagcgaagagaagccgagctccgcgcccagcaggaagaagaaacgaggaagcagcaagaactcgaagccttgcagaagagccagaaggaagctgaactgacccgtgaactggagaaacagaaggaaaataagcaggtggaagagatcctccgtctggagaaagaaatcgaggacctgcagcgcatgaaggagcagcaggagctgtcgctgaccgaggcttccctgcagaagctgcaggagcggcgggaccaggagctccgcaggctggaggaggaagcgtgcagggcggcccaggagttcctcgagtccctcaatttcgacgagatcgacgagtgtgtccggaatatcgagcggtccctgtcggtgggaagcgaattttccagcgagctggctgagagcgcatgcgaggagaagcccaacttcaacttcagccagccctacccagaggaggaggtcgatgagggcttcgaagccgacgacgacgccttcaaggactcccccaaccccagcgagcacggccactcagaccagcgaacaagtggcatccggaccagcgatgactcttcagaggaggacccatacatgaacgacacggtggtgcccaccagccccagtgcggacagcacggtgctgctcgccccatcagtgcaggactccgggagcctacacaactcctccagcggcgagtccacctactgcatgccccagaacgctggggacttgccctccccagacggcgactacgactacgaccaggatgactatgaggacggtgccatcacttccggcagcagcgtgaccttctccaactcctacggcagccagtggtcccccgactaccgctgctctgtggggacctacaacagctcgggtgcctaccggttcagctctgagggggcgcagtcctcgtttgaagatagtgaagaggactttgattccaggtttgatacagatgatgagctttcataccggcgtgactctgtgtacagctgtgtcactctgccgtatttccacagctttctgtacatgaaaggtggcctgatgaactcttggaaacgccgctggtgcgtcctcaaggatgaaaccttcttgtggttccgctccaagcaggaggccctcaagcaaggctggctccacaaaaaaggggggggctcctccacgctgtccaggagaaattggaagaagcgctggtttgtcctccgccagtccaagctgatgtactttgaaaacgacagcgaggagaagctcaagggcaccgtagaagtgcgaacggcaaaagagatcatagataacaccaccaaggagaatgggatcgacatcattatggccgataggactttccacctgattgcagagtccccagaagatgccagccagtggttcagcgtgctgagtcaggtccacgcgtccacggaccaggagatccaggagatgcatgatgagcaggcaaacccacagaatgctgtgggcaccttggatgtggggctgattgattctgtgtgtgcctctgacagccctgatagacccaactcgtttgtgatcatcacggccaaccgggtgctgcactgcaacgccgacacgccggaggagatgcaccactggataaccctgctgcagaggtccaaaggggacaccagagtggagggccaggaattcatcgtgagaggatggttgcacaaagaggtgaagaacagtccaaagatgtcttcactgaaactgaagaaacggtggtttgtactcacccacaattccctggattactacaagagttcagagaagaacgcgctcaaactggggaccctggtcctcaacagcctctgctctgtcgtccccccagatgagaagatattcaaagagacaggctactggaacgtcaccgtgtacgggcgcaagcactgttaccggctctacaccaagctgctcaacgaggccacccggtggtccagtgccattcaaaacgtgactgacaccaaggccccgatcgacacccccacccagcagctgattcaagatatcaaggagaactgcctgaactcggatgtggtggaacagatttacaagcggaacccgatccttcgatacacccatcaccccttgcactccccgctcctgccccttccgtatggggacataaatctcaacttgctcaaagacaaaggctataccacccttcaggatgaggccatcaagatattcaattccctgcagcaactggagtccatgtctgacccaattccaataatccagggcatcctacagacagggcatgacctgcgacctctgcgggacgagctgtactgccagcttatcaaacagaccaacaaagtgccccaccccggcagtgtgggcaacctgtacagctggcagatcctgacatgcctgagctgcaccttcctgccgagtcgagggattctcaagtatctcaagttccatctgaaaaggatacgggaacagtttccaggaagcgagatggaaaaatacgctctcttcacttacgaatctcttaagaaaaccaaatgccgagagtttgtgccttcccgagatgaaatagaagctctgatccacaggcaggaaatgacatccacggtctattgccatggcggcggctcctgcaagatcaccatcaactcccacaccaccgctggggaggtggtggagaagctgatccgaggcctggccatggaggacagcaggaacatgtttgctttgtttgaatacaacggccacgtcgacaaagccattgaaagtcgaaccgtcgtagctgatgtcttagccaagtttgaaaagctggctgccacatccgaggttggggacctgccatggaaattctacttcaaactttactgcttcctggacacagacaacgtgccaaaagacagtgtggagtttgcatttatgtttgaacaggcccacgaagcggttatccatggccaccatccagccccggaagaaaacctccaggttcttgctgccctgcgactccagtatctgcagggggattatactctgcacgctgccatcccacctctcgaagaggtttattccctgcagagactcaaggcccgcatcagccagtcaaccaaaaccttcaccccttgtgaacggctggagaagaggcggacgagcttcctagaggggaccctgaggcggagcttccggacaggatccgtggtccggcagaaggtcgaggaggagcagatgctggacatgtggattaaggaagaagtctcctctgctcgagccagtatcattgacaagtggaggaaatttcagggaatgaaccaggaacaggccatggccaagtacatggccttgatcaaggagtggcctggctatggctcgacgctgtttgatgtggagtgcaaggaaggtggcttccctcaggaactctggttgggtgtcagcgcggacgccgtctccgtctacaagcgtggagagggaagaccactggaagtcttccagtatgaacacatcctctcttttggggcacccctggcgaatacgtataagatcgtggtcgatgagagggagctgctctttgaaaccagtgaggtggtggatgtggccaagctcatgaaagcctacatcagcatgatcgtgaagaagcgctacagcacgacacgctccgccagcagccagggcagctccaggtgaaggcgggacagagcccacctgtctttgctacctgaacgcaccaccctctggcctaggctggctccagtgtgccatgcccagccaaaacaaacacagagctgcccaggctttctggaagcttctggtctga

SEQ ID NO: 174066 - DNA, 8038 bp, Artificial Sequence
  derived and/or modified sequence
gccgcggcgcgggactgctcacctccaagcgctcgcgcggggatcgcggctcctgctcactttgcggcccgctgtcctcctgcccgccccgagggcccccggccggagcgcagagggagggggccgcgctcgccagcaccccgccgccttcccccgcctgggggaagaatgtgccaccagctgttctccgcttgcgagcgctgcgcccagtagtgaggaacttggaggaagaagagacaaaggctgccgtcgggacgggcgagttagggacttgggtttgggcgaacaaaaggtgagaaggacaagaagggaccgggcgatggcagcaggggagccccgcgggcgcgcgtcctcgggagtggcgccgtgacacgcatggtttccccggacccgcggcggcgctgacttccgcgagtcggagcggcactcggcgagtccgggactgcgctggaacaatggataacttcttcaccgagggaacacgggtctggctgagagaaaatggccagcattttccaagtactgtaaattcctgtgcagaaggcatcgtcgtcttccggacagactatggtcaggtattcacttacaagcagagcacaattacccaccagaaggtgactgctatgcaccccacgaacgaggagggcgtggatgacatggcgtccttgacagagctccatggcggctccatcatgtataacttattccagcggtataagagaaatcaaatatatacctacatcggctccatcctggcctccgtgaacccctaccagcccatcgccgggctgtacgagcctgccaccatggagcagtacagccggcgccacctgggcgagctgcccccgcacatcttcgccatcgccaacgagtgctaccgctgcctgtggaagcgccacgacaaccagtgcatcctcatcagtggtgaaagtggggcaggtaaaaccgaaagcactaaattgatcctcaagtttctgtcagtcatcagtcaacagtctttggaattgtccttaaaggagaagacatcctgtgttgaacgagctattcttgaaagcagccccatcatggaagctttcggcaatgcgaagaccgtgtacaacaacaactctagtcgctttgggaagtttgttcagctgaacatctgtcagaaaggaaatattcagggcgggagaattgtagattatttattagaaaaaaaccgagtagtaaggcaaaatcccggggaaaggaattatcacatattttatgcactgctggcagggctggaacatgaagaaagagaagaattttatttatctacgccagaaaactaccactacttgaatcagtctggatgtgtagaagacaagacaatcagtgaccaggaatcctttagggaagttattacggcaatggacgtgatgcagttcagcaaggaggaagttcgggaagtgtcgaggctgcttgctggtatactgcatcttgggaacatagaatttatcactgctggtggggcacaggtttccttcaaaacagctttgggcagatctgcggagttacttgggctggacccaacacagctcacagatgctttgacccagagatcaatgttcctcaggggagaagagatcctcacgcctctcaatgttcaacaggcagtagacagcagggactccctggccatggctctgtatgcgtgctgctttgagtgggtaatcaagaagatcaacagcaggatcaaaggcaatgaggacttcaagtctattggcatcctcgacatctttggatttgaaaactttgaggttaatcactttgaacagttcaatataaactatgcaaacgagaaacttcaggagtacttcaacaagcatattttttctttagaacaactagaatatagccgggaaggattagtgtgggaagatattgactggatagacaatggagaatgcctggacttgattgagaagaaacttggcctcctagcccttatcaatgaagaaagccattttcctcaagccacagacagcaccttattggagaagctacacagtcagcatgcgaataaccacttttatgtgaagcccagagttgcagttaacaattttggagtgaagcactatgctggagaggtgcaatatgatgtccgaggtatcttggagaagaacagagatacatttcgagatgaccttctcaatttgctaagagaaagccgatttgactttatctacgatctttttgaacatgtttcaagccgcaacaaccaggataccttgaaatgtggaagcaaacatcggcggcctacagtcagctcacagttcaaggactcactgcattccttaatggcaacgctaagctcctctaatcctttctttgttcgctgtatcaagccaaacatgcagaagatgccagaccagtttgaccaggcggttgtgctgaaccagctgcggtactcagggatgctggagactgtgagaatccgcaaagctgggtatgcggtccgaagaccctttcaggacttttacaaaaggtataaagtgctgatgaggaatctggctctgcctgaggacgtccgagggaagtgcacgagcctgctgcagctctatgatgcctccaacagcgagtggcagctggggaagaccaaggtctttcttcgagaatccttggaacagaaactggagaagcggagggaagaggaagtgagccacgcggccatggtgattcgggcccatgtcttgggcttcttagcacgaaaacaatacagaaaggtcctttattgtgtggtgataatacagaagaattacagagcattccttctgaggaggagatttttgcacctgaaaaaggcagccatagttttccagaagcaactcagaggtcagattgctcggagagtttacagacaattgctggcagagaaaagggagcaagaagaaaagaagaaacaggaagaggaagaaaagaagaaacgggaggaagaagaaagagaaagagagagagagcgaagagaagccgagctccgcgcccagcaggaagaagaaacgaggaagcagcaagaactcgaagccttgcagaagagccagaaggaagctgaactgacccgtgaactggagaaacagaaggaaaataagcaggtggaagagatcctccgtctggagaaagaaatcgaggacctgcagcgcatgaaggagcagcaggagctgtcgctgaccgaggcttccctgcagaagctgcaggagcggcgggaccaggagctccgcaggctggaggaggaagcgtgcagggcggcccaggagttcctcgagtccctcaatttcgacgagatcgacgagtgtgtccggaatatcgagcggtccctgtcggtgggaagcgaattttccagcgagctggctgagagcgcatgcgaggagaagcccaacttcaacttcagccagccctacccagaggaggaggtcgatgagggcttcgaagccgacgacgacgccttcaaggactcccccaaccccagcgagcacggccactcagaccagcgaacaagtggcatccggaccagcgatgactcttcagaggaggacccatacatgaacgacacggtggtgcccaccagccccagtgcggacagcacggtgctgctcgccccatcagtgcaggactccgggagcctacacaactcctccagcggcgagtccacctactgcatgccccagaacgctggggacttgccctccccagacggcgactacgactacgaccaggatgactatgaggacggtgccatcacttccggcagcagcgtgaccttctccaactcctacggcagccagtggtcccccgactaccgctgctctgtggggacctacaacagctcgggtgcctaccggttcagctctgagggggcgcagtcctcgtttgaagatagtgaagaggactttgattccaggtttgatacagatgatgagctttcataccggcgtgactctgtgtacagctgtgtcactctgccgtatttccacagctttctgtacatgaaaggtggcctgatgaactcttggaaacgccgctggtgcgtcctcaaggatgaaaccttcttgtggttccgctccaagcaggaggccctcaagcaaggctggctccacaaaaaaggggggggctcctccacgctgtccaggagaaattggaagaagcgctggtttgtcctccgccagtccaagctgatgtactttgaaaacgacagcgaggagaagctcaagggcaccgtagaagtgcgaacggcaaaagagatcatagataacaccaccaaggagaatgggatcgacatcattatggccgataggactttccacctgattgcagagtccccagaagatgccagccagtggttcagcgtgctgagtcaggtccacgcgtccacggaccaggagatccaggagatgcatgatgagcaggcaaacccacagaatgctgtgggcaccttggatgtggggctgattgattctgtgtgtgcctctgacagccctgatagacccaactcgtttgtgatcatcacggccaaccgggtgctgcactgcaacgccgacacgccggaggagatgcaccactggataaccctgctgcagaggtccaaaggggacaccagagtggagggccaggaattcatcgtgagaggatggttgcacaaagaggtgaagaacagtccaaagatgtcttcactgaaactgaagaaacggtggtttgtactcacccacaattccctggattactacaagagttcagagaagaacgcgctcaaactggggaccctggtcctcaacagcctctgctctgtcgtccccccagatgagaagatattcaaagagacaggctactggaacgtcaccgtgtacgggcgcaagcactgttaccggctctacaccaagctgctcaacgaggccacccggtggtccagtgccattcaaaacgtgactgacaccaaggccccgatcgacacccccacccagcagctgattcaagatatcaaggagaactgcctgaactcggatgtggtggaacagatttacaagcggaacccgatccttcgatacacccatcaccccttgcactccccgctcctgccccttccgtatggggacataaatctcaacttgctcaaagacaaaggctataccacccttcaggatgaggccatcaagatattcaattccctgcagcaactggagtccatgtctgacccaattccaataatccagggcatcctacagacagggcatgacctgcgacctctgcgggacgagctgtactgccagcttatcaaacagaccaacaaagtgccccaccccggcagtgtgggcaacctgtacagctggcagatcctgacatgcctgagctgcaccttcctgccgagtcgagggattctcaagtatctcaagttccatctgaaaaggatacgggaacagtttccaggaagcgagatggaaaaatacgctctcttcacttacgaatctcttaagaaaaccaaatgccgagagtttgtgccttcccgagatgaaatagaagctctgatccacaggcaggaaatgacatccacggtctattgccatggcggcggctcctgcaagatcaccatcaactcccacaccaccgctggggaggtggtggagaagctgatccgaggcctggccatggaggacagcaggaacatgtttgctttgtttgaatacaacggccacgtcgacaaagccattgaaagtcgaaccgtcgtagctgatgtcttagccaagtttgaaaagctggctgccacatccgaggttggggacctgccatggaaattctacttcaaactttactgcttcctggacacagacaacgtgccaaaagacagtgtggagtttgcatttatgtttgaacaggcccacgaagcggttatccatggccaccatccagccccggaagaaaacctccaggttcttgctgccctgcgactccagtatctgcagggggattatactctgcacgctgccatcccacctctcgaagaggtttattccctgcagagactcaaggcccgcatcagccagtcaaccaaaaccttcaccccttgtgaacggctggagaagaggcggacgagcttcctagaggggaccctgaggcggagcttccggacaggatccgtggtccggcagaaggtcgaggaggagcagatgctggacatgtggattaaggaagaagtctcctctgctcgagccagtatcattgacaagtggaggaaatttcagggaatgaaccaggaacaggccatggccaagtacatggccttgatcaaggagtggcctggctatggctcgacgctgtttgatgtggagtgcaaggaaggtggcttccctcaggaactctggttgggtgtcagcgcggacgccgtctccgtctacaagcgtggagagggaagaccactggaagtcttccagtatgaacacatcctctcttttggggcacccctggcgaatacgtataagatcgtggtcgatgagagggagctgctctttgaaaccagtgaggtggtggatgtggccaagctcatgaaagcctacatcagcatgatcgtgaagaagcgctacagcacgacacgctccgccagcagccagggcagctccaggtgaaggcgggacagagcccacctgtctttgctacctgaacgcaccaccctctggcctaggctggctccagtgtgccatgcccagccaaaacaaacacagagctgcccaggctttctggaagcttctggtctgagggaggtgtctccgaggatccttttgcctgccgccttcattgatcctgtattaagctgtcaactttaacagtctgcacagtttccaaagctttactactcttagaggacacatgccttaaaaaaggaggggaggaaccacgctgccaccaaagcagccggaagtgccttaacttgtggaaccaacactaatcgaccgtaactgtgctactgaagggaactgcctttcccccttctgggggagacttaacagagcgtggaaggggggcattctctgtcaatgatgcactaacctcccaacctgatttccccgaatctgagggaaggtgagggagtgggaagggggatggagagctcgaggggacagtgtgtttgagctggagtgctgcgggcagcctttctcatggaatgacatgaatcaacttttttctttgtttcatcttttaagtgtacgtgcttgcctgttcgtgcatgtgttcataaactcaacactttaatcatggtttcatgagcattaaaaagcaaagggaaaaaggatgtgtaatggtgtacacagtctgtatattttaataatgcagagctatagtctcaattgttactttataaggtggttttattaacaaacccaaatcctggattttcctgtctttgctgtattttgaaaaacacgtgttgactccattgttttacatgtagcaaagtctgccatctgtgtctgctgtattataaacagataagcagcctacaagataactgtatttataaaccactcttcaacagctggctccagtgctggttttagaacaagaatgaagtcattttggagtctttcatgtctaaaagatttaagttaaaaacaaagtgttacttggaaggttagcttctatcattctggatagattacagatataataaccatgttgactatgggggagagacgctgcattccagaaacgtcttaacacttgagtgaatcttcaaaggaccctgacattaaatgctgaggctttaatacacacatattttatcccaagtttataatggtggtctgaacaaggcacctgtaaataaatcagcatttatgaccagaagaaaaataatctggtcttggactttttatttttatatggaaaagttttaaggacttgggccaactaagtctacccacacgaaaaaagaaatttgccttgtccctttgtgtacaaccatgcaaaactgtttgttggctcacagaagttctgacaataaaagatactagctaacacgctgtgtgtttcc

SEQ ID NO: 174067 - DNA, 4839 bp, Artificial Sequence
  derived and/or modified sequence
ttctttctaatgccaggcaatcaaggctgcacttgctacccttctgcaggaagcttcccagccagcacagtttctctctgccctgcctcttaatccccacccctgctcccaggcctgggacactgctaaccacccctccttcctgacacctctctgaccacccctcctcctcttgactggttcctctggaggtaggcatggcctcgggttctgcccccagtttctcactcgctgggctccaaaagaaacactggcttctctccttcagctccaggctagatgccagaccagtttgaccaggcggttgtgctgaaccagctgcggtactcagggatgctggagactgtgagaatccgcaaagctgggtatgcggtccgaagaccctttcaggacttttacaaaaggtataaagtgctgatgaggaatctggctctgcctgaggacgtccgagggaagtgcacgagcctgctgcagctctatgatgcctccaacagcgagtggcagctggggaagaccaaggtctttcttcgagaatccttggaacagaaactggagaagcggagggaagaggaagtgagccacgcggccatggtgattcgggcccatgtcttgggcttcttagcacgaaaacaatacagaaaggtcctttattgtgtggtgataatacagaagaattacagagcattccttctgaggaggagatttttgcacctgaaaaaggcagccatagttttccagaagcaactcagaggtcagattgctcggagagtttacagacaattgctggcagagaaaagggagcaagaagaaaagaagaaacaggaagaggaagaaaagaagaaacgggaggaagaagaaagagaaagagagagagagcgaagagaagccgagctccgcgcccagcaggaagaagaaacgaggaagcagcaagaactcgaagccttgcagaagagccagaaggaagctgaactgacccgtgaactggagaaacagaaggaaaataagcaggtggaagagatcctccgtctggagaaagaaatcgaggacctgcagcgcatgaaggagcagcaggagctgtcgctgaccgaggcttccctgcagaagctgcaggagcggcgggaccaggagctccgcaggctggaggaggaagcgtgcagggcggcccaggagttcctcgagtccctcaatttcgacgagatcgacgagtgtgtccggaatatcgagcggtccctgtcggtgggaagcgaattttccagcgagctggctgagagcgcatgcgaggagaagcccaacttcaacttcagccagccctacccagaggaggaggtcgatgagggcttcgaagccgacgacgacgccttcaaggactcccccaaccccagcgagcacggccactcagaccagcgaacaagtggcatccggaccagcgatgactcttcagaggaggacccatacatgaacgacacggtggtgcccaccagccccagtgcggacagcacggtgctgctcgccccatcagtgcaggactccgggagcctacacaactcctccagcggcgagtccacctactgcatgccccagaacgctggggacttgccctccccagacggcgactacgactacgaccaggatgactatgaggacggtgccatcacttccggcagcagcgtgaccttctccaactcctacggcagccagtggtcccccgactaccgctgctctgtggggacctacaacagctcgggtgcctaccggttcagctctgagggggcgcagtcctcgtttgaagatagtgaagaggactttgattccaggtttgatacagatgatgagctttcataccggcgtgactctgtgtacagctgtgtcactctgccgtatttccacagctttctgtacatgaaaggtggcctgatgaactcttggaaacgccgctggtgcgtcctcaaggatgaaaccttcttgtggttccgctccaagcaggaggccctcaagcaaggctggctccacaaaaaaggggggggctcctccacgctgtccaggagaaattggaagaagcgctggtttgtcctccgccagtccaagctgatgtactttgaaaacgacagcgaggagaagctcaagggcaccgtagaagtgcgaacggcaaaagagatcatagataacaccaccaaggagaatgggatcgacatcattatggccgataggactttccacctgattgcagagtccccagaagatgccagccagtggttcagcgtgctgagtcaggtccacgcgtccacggaccaggagatccaggagatgcatgatgagcaggcaaacccacagaatgctgtgggcaccttggatgtggggctgattgattctgtgtgtgcctctgacagccctgatagacccaactcgtttgtgatcatcacggccaaccgggtgctgcactgcaacgccgacacgccggaggagatgcaccactggataaccctgctgcagaggtccaaaggggacaccagagtggagggccaggaattcatcgtgagaggatggttgcacaaagaggtgaagaacagtccaaagatgtcttcactgaaactgaagaaacggtggtttgtactcacccacaattccctggattactacaagagttcagagaagaacgcgctcaaactggggaccctggtcctcaacagcctctgctctgtcgtccccccagatgagaagatattcaaagagacaggctactggaacgtcaccgtgtacgggcgcaagcactgttaccggctctacaccaagctgctcaacgaggccacccggtggtccagtgccattcaaaacgtgactgacaccaaggccccgatcgacacccccacccagcagctgattcaagatatcaaggagaactgcctgaactcggatgtggtggaacagatttacaagcggaacccgatccttcgatacacccatcaccccttgcactccccgctcctgccccttccgtatggggacataaatctcaacttgctcaaagacaaaggctataccacccttcaggatgaggccatcaagatattcaattccctgcagcaactggagtccatgtctgacccaattccaataatccagggcatcctacagacagggcatgacctgcgacctctgcgggacgagctgtactgccagcttatcaaacagaccaacaaagtgccccaccccggcagtgtgggcaacctgtacagctggcagatcctgacatgcctgagctgcaccttcctgccgagtcgagggattctcaagtatctcaagttccatctgaaaaggatacgggaacagtttccaggaagcgagatggaaaaatacgctctcttcacttacgaatctcttaagaaaaccaaatgccgagagtttgtgccttcccgagatgaaatagaagctctgatccacaggcaggaaatgacatccacggtctattgccatggcggcggctcctgcaagatcaccatcaactcccacaccaccgctggggaggtggtggagaagctgatccgaggcctggccatggaggacagcaggaacatgtttgctttgtttgaatacaacggccacgtcgacaaagccattgaaagtcgaaccgtcgtagctgatgtcttagccaagtttgaaaagctggctgccacatccgaggttggggacctgccatggaaattctacttcaaactttactgcttcctggacacagacaacgtgccaaaagacagtgtggagtttgcatttatgtttgaacaggcccacgaagcggttatccatggccaccatccagccccggaagaaaacctccaggttcttgctgccctgcgactccagtatctgcagggggattatactctgcacgctgccatcccacctctcgaagaggtttattccctgcagagactcaaggcccgcatcagccagtcaaccaaaaccttcaccccttgtgaacggctggagaagaggcggacgagcttcctagaggggaccctgaggcggagcttccggacaggatccgtggtccggcagaaggtcgaggaggagcagatgctggacatgtggattaaggaagaagtctcctctgctcgagccagtatcattgacaagtggaggaaatttcagggaatgaaccaggaacaggccatggccaagtacatggccttgatcaaggagtggcctggctatggctcgacgctgtttgatgtggagtgcaaggaaggtggcttccctcaggaactctggttgggtgtcagcgcggacgccgtctccgtctacaagcgtggagagggaagaccactggaagtcttccagtatgaacacatcctctcttttggggcacccctggcgaatacgtataagatcgtggtcgatgagagggagctgctctttgaaaccagtgaggtggtggatgtggccaagctcatgaaagcctacatcagcatgatcgtgaagaagcgctacagcacgacacgctccgccagcagccagggcagctccaggtgaaggcgggacagagcccacctgtctttgctacctgaacgcaccaccctctggcctaggctggctccagtgtgccatgcccagccaaaacaaacacagagctgcccaggctttctggaagcttctggtctgagggaggtgtctccgaggatccttttgcctgccgccttcattgatcctgtattaagctgtcaactttaacagtctgcacagtttccaaagctttactactcttagaggacacatgccttaaaaaaggaggggaggaaccacgctgccaccaaagcagccggaagtgccttaacttgtggaacc

SEQ ID NO: 174068 - DNA, 4248 bp, Artificial Sequence
  derived and/or modified sequence
atgcccgaccagttcgaccaggccgtggtgctgaaccagctgcggtacagcggcatgttggaaaccgtacgaatccgcaaggcaggttacgcggtacgaagaccatttcaggacttttacaagcggtacaaagtcctcatgaggaacctcgctctgccagaagacgttcgtgggaagtgtaccagcctgctccagctgtacgacgccagtaactccgagtggcaacttggtaagaccaaagtgtttcttagagaatcgttagaacagaagctggaaaagagaagagaggaggaagtgtcacatgccgccatggtcatacgcgcccacgtcttgggctttctggcgaggaaacaataccgtaaagtgctgtattgcgtcgttattattcaaaagaactatcgagcatttctgctaaggaggaggttcctgcacctgaaaaaagctgctatcgtgttccagaaacaactgcgcggccagatagcacgcagagtgtacagacagcttctggccgaaaagagggaacaggaagaaaaaaaaaaacaagaagaggaggagaaaaaaaagagagaagaggaggaacgggagagagagcgggagcgcagagaggccgagctccgcgctcaacaggaagaggagacccgaaagcagcaggaattggaggctctgcagaagtcccaaaaggaggcagaactgacccgggaactcgagaagcagaaggaaaataagcaggtggaagagattctgagacttgagaaagagatcgaagatcttcaacgcatgaaggagcagcaggagctatccttgactgaggcctcccttcagaagctgcaggaacgccgtgaccaggagctcaggcgactggaagaggaagcctgtagggctgcccaggagttcctagagtccctgaactttgatgaaatcgacgagtgcgttagaaatattgagagatcattgtcagttggaagcgaattctcaagtgaactagctgaaagtgcctgcgaggagaagcctaacttcaacttctcgcaaccctatcctgaggaggaagttgacgagggcttcgaagccgacgatgacgccttcaaggacagccccaacccgagcgagcatggacactctgatcagagaacgtcgggaatccggacaagcgacgattcctctgaagaggacccctacatgaatgatacagttgtccctacgagccccagcgctgactctacagtcctgttggctcctagcgttcaggactccggatctttacacaatagttccagcggcgaaagtacgtactgtatgccgcaaaacgctggagacctgcccagcccagatggtgactacgattacgaccaggacgactacgaggacggtgccataacctccggatcaagtgttacatttagcaactcctacggttcacagtggtctcctgattaccggtgttcggtcggtacctacaacagttcaggagcctaccgtttttctagtgagggcgcccagtccagtttcgaggattcagaggaggactttgattctcgctttgatacagacgatgagttatcctaccggagggattcagtttattcatgcgttaccctcccttatttccatagtttcctgtatatgaaaggcggccttatgaattcttggaagcggcgatggtgtgtgctgaaggacgagacgttcctgtggtttcggtctaagcaagaagccctgaagcagggttggctgcacaagaaaggcggaggatcttctacgctctctaggcggaattggaagaagagatggttcgttctccgacagtctaagctcatgtatttcgagaatgactctgaagagaagctgaaagggactgttgaggtgagaacggccaaagagatcatcgacaataccactaaggagaacggcattgacatcattatggccgacaggaccttccacctgattgccgaaagtcctgaggacgcaagtcaatggttctctgtgctatcacaggttcacgccagcacagatcaagagatccaggagatgcatgacgagcaggccaacccccagaacgcggtgggaaccctggatgtcgggctgattgattccgtgtgtgctagtgacagcccagatagaccaaactccttcgtaatcatcacagcaaatagagttctgcactgcaacgccgatacccctgaggagatgcatcactggatcacccttctccaaaggagcaaaggggacacgcgtgtcgaggggcaagaattcatagtgaggggatggctccataaggaggtaaagaactctcccaaaatgtcttctctgaagctgaagaagagatggttcgttttaacccacaactccctggattactacaagagctcagagaaaaatgctctcaaactggggacactggttctaaattctctctgcagcgtggttcctcccgacgaaaaaattttcaaggaaacaggctactggaacgtgaccgtgtacggaagaaagcactgctataggctgtataccaagcttctgaacgaggcaacccgctggagctccgccatccaaaatgtgacagataccaaagctcctatcgatactcccactcagcaactgatccaggatattaaggaaaactgcctcaacagcgacgtcgtcgagcaaatatacaagaggaatccaattcttagatatactcaccatcccctacattcaccactccttccattaccttacggcgacatcaacctcaatctgctgaaggacaagggctatactacactccaagacgaagctattaaaatcttcaattcactccagcaactggaatccatgtccgacccaatcccgatcattcagggcatcctgcagaccggtcacgatcttcgcccccttagggatgagctgtattgccaactgattaaacagactaacaaagtcccccacccagggagcgttggcaacctgtattcatggcaaatcctgacctgtctgagttgcacatttctgccttcacgaggcattttgaagtatcttaaattccacctgaaacgcattcgtgaacagttccccgggagcgagatggagaagtatgccctattcacatacgaaagcctcaaaaaaacgaagtgccgagagtttgtgccttccagagacgagattgaagccttaatccataggcaagaaatgacttcaacagtgtattgccacgggggaggaagctgcaaaataaccataaattctcacactacggctggcgaagtggtggagaagctgattcggggcctcgcaatggaggactcaaggaacatgttcgcactttttgaatacaacgggcacgtggataaagcgatcgagtcccgaacagttgtggccgatgtgctagccaaattcgagaagttagcggccaccagcgaggttggagacctcccttggaaattttatttcaagctctattgcttcctggacacggataatgtgccaaaggatagcgtggagttcgcttttatgtttgagcaggctcatgaggccgtgattcacggccaccatcctgcccccgaagagaacctccaagtgctggccgcactgcgcctccagtatttacagggtgactataccttgcacgctgccatcccacccttggaagaagtttattcccttcagaggctaaaggctcgcattagccagtcaacaaagaccttcaccccctgcgagcgactggagaaaaggaggacctcatttctggagggtactctccgcagatcattccgcaccggctcagtagtccgtcagaaggttgaggaagaacaaatgctcgacatgtggataaaagaggaggtatcttcagccagggctagcatcatcgataagtggcgaaaattccagggcatgaaccaggaacaggccatggcaaagtatatggccctgataaaggagtggccggggtatgggagtaccttgtttgacgtcgagtgcaaagagggagggttccctcaggaattgtggctaggcgtttccgcggatgctgtttctgtgtataagagaggagaggggcgcccgctcgaagtttttcaatatgaacacatcctaagctttggagcccctttggccaatacttataaaattgtggttgacgagcgggagctgttgttcgagacctccgaagtggtagatgtagcaaagctgatgaaagcctatattagcatgatcgtaaagaaaaggtatagcactactcgcagcgcttccagccagggttcgagcaggtag

SEQ ID NO: 174069 - DNA, 4248 bp, Artificial Sequence
  derived and/or modified sequence
atgcccgaccagttcgaccaggccgtggtgctgaaccagctgcggtattcggggatgctcgaaacagtacggatcaggaaggcagggtacgccgtgcgtcgaccttttcaagatttttacaagcgctacaaggtcctcatgagaaacctcgccttgcctgaagatgttcggggtaagtgtacttcattactgcaactttacgatgcaagcaacagtgagtggcaacttggcaagaccaaagtctttcttagggaaagcctcgaacagaaactagagaagcggcgcgaggaggaagtcagtcatgcggccatggtaatccgggctcacgtgcttggcttcctggctcgcaaacagtatcgtaaggttctgtattgtgtggtcattatccagaaaaattatagagcttttttacttcggaggcggttcctgcacctgaaaaaggcagcgattgtttttcagaaacaattgcgggggcagatcgcacggcgtgtgtatcgccagcttctggccgagaaacgcgaacaagaagaaaagaagaagcaggaagaagaggagaagaaaaaacgggaggaagaggagcgcgaacgggaacgggagcggagagaggctgagctgcgcgcacaacaagaggaagaaactagaaaacagcaggaactcgaagccctccagaaatcccagaaggaagcagaactgacaagagagttagagaaacaaaaggaaaacaagcaggtggaagagattctgagacttgaaaaagagatcgaggacctgcaaagaatgaaggagcagcaggagttaagcctgaccgaagcatccctgcagaagttacaggagaggcgggaccaagagctcagaaggctggaggaggaggcgtgccgcgccgcccaggaattcttggagagccttaacttcgatgagatagatgagtgcgtgagaaacattgagagaagtctgagtgtgggttccgagttctcttcagaacttgctgaatctgcttgtgaggagaaacctaatttcaatttctcccagccataccccgaggaagaggttgatgaagggttcgaagctgacgacgacgctttcaaggattccccaaatccctcagaacacggtcatagcgaccagcgcacaagcggcattagaactagcgatgacagtagcgaggaggacccatatatgaatgatacagttgtcccgacttctccttctgctgactctacagtgctgctagcaccatcagttcaggatagtggtagcttgcataattcaagttccggcgagtcaacgtattgtatgccacagaatgctggtgacttgccctccccagacggcgattatgattacgaccaagacgattacgaagacggagctattaccagtggatcttctgttacattctccaactcctatggcagtcaatggtcccccgactatcgatgtagcgtcgggacatataacagttctggagcgtatcggtttagctccgaaggcgctcagtcgtcttttgaagactcagaggaggatttcgactccaggtttgacactgacgacgaactgtcttatcggcgcgattccgtttacagttgtgtgactctgccttactttcactcattcctgtacatgaaagggggactcatgaatagctggaagcgtaggtggtgtgtcctcaaggatgagacatttctatggtttcgaagcaaacaggaagctctaaagcagggctggctgcataagaaaggaggcgggtcctcaacgttgagccgaaggaattggaagaaacggtggtttgtgctgaggcagagcaaacttatgtactttgagaatgatagcgaggagaaacttaagggaacggtggaagtgaggacggccaaagagattattgacaatactaccaaggagaatggcatcgacattatcatggctgaccggacattccatctgatagctgagtctcccgaggacgcaagtcaatggttctccgttctctctcaagttcatgcatcaacagatcaggagattcaggaaatgcacgatgagcaagctaacccccagaatgcagtagggactttggacgtgggactgattgactctgtctgtgcttccgacagccctgaccggccaaatagttttgttattataactgctaaccgtgtcttgcattgcaacgcagacacacctgaggagatgcatcattggatcacccttcttcaaaggagtaagggcgacactcgtgtggagggccaagagtttatcgttaggggttggctgcataaggaggtcaagaactcgcctaagatgtcctccttgaaactgaagaaacgctggtttgtgctcacacacaattctttggactattataagtcttctgaaaagaacgcccttaaactcggcacactggtactgaacagcctatgttcggtcgttccccccgacgagaaaatttttaaagagacgggatactggaacgttactgtgtacggaaggaagcattgttatagactctacactaaattactcaacgaagcgaccaggtggagttcggccatacagaacgtcacagacaccaaggctcccattgacacccctacccaacagctgatacaggacattaaggagaactgccttaactcggacgttgtcgagcagatatacaaaagaaacccaattcttcggtatacccatcaccccttgcactccccgttgctcccactgccgtacggcgatatcaatcttaatctgctcaaagacaagggttacacgactctgcaagatgaagctataaaaatcttcaattctcttcaacagctcgaatcaatgtccgatcccattcccatcatccaaggcatcttacagaccggccacgatttgcgccccctgagggatgaactatactgccagttaattaaacagacaaataaggtgccccaccccgggagcgttgggaacctgtacagctggcagatcctaacttgccttagttgcacttttctgcctagccgtggtattctgaaatacctgaagtttcatcttaagaggataagagagcagtttcccggcagcgaaatggagaagtacgccctgtttacatatgaatctctcaaaaagaccaaatgcagagagttcgtgccaagcagagatgaaatcgaggccctcattcaccgccaggagatgaccagtactgtgtattgccacgggggcgggagttgcaagattactattaattcacataccaccgcaggagaggtcgtagagaaattgattcgcgggctggctatggaagattccaggaacatgtttgccttgtttgagtacaacggtcatgtggataaagctatcgaaagccggacagtcgtcgccgatgtgctggctaaattcgagaaactggccgctacaagtgaagttggggaccttccatggaagttctattttaaactttattgttttctagacacagacaacgtcccaaaggattctgttgaattcgcctttatgttcgagcaggcgcatgaggctgtgatacacggacaccacccagcaccggaggagaatctgcaggtgcttgcggcactgcggttacagtacctacagggggattatacactccatgctgccattcctcctctcgaggaggtctactctttgcaacgcctcaaagcgaggataagccagagtacgaaaactttcactccatgtgagcgcctggaaaagaggcggacctccttcttagaggggactctgcgtaggagcttccggacgggcagcgttgtaagacagaaagtagaggaggaacagatgctggatatgtggataaaggaggaggtgtcgagcgcgagagcctcgattatagataaatggcgaaagtttcagggtatgaaccaagagcaggccatggccaaatacatggccctcattaaagagtggcctggctacgggagcactctgttcgacgtggaatgcaaggagggcgggtttccacaggaattgtggttgggtgtgtctgccgacgcggtctcagtgtacaagcggggagaggggagaccactggaggtgtttcagtatgaacatattctctctttcggcgctcctctagccaacacatataagattgtggtggacgagcgcgaactgcttttcgaaaccagtgaggtcgtggacgtggcaaaactcatgaaagcgtacatctccatgattgtgaagaaaaggtactccaccactagatctgcaagctcccaggggtccagccggtag

SEQ ID NO: 174070 - DNA, 4194 bp, Artificial Sequence
  derived and/or modified sequence
atgctggagaccgtgcggatccggaaggccggctacgccgtgcggagaccctttcaggatttctacaagcgctataaagttctcatgcgcaatctggctttgccggaagatgtccgagggaagtgcacctctctgctgcagttgtatgatgcctctaattccgaatggcagctgggcaaaaccaaagtattcttaagggagagcctggagcaaaagttagagaaaaggcgcgaagaggaggtttctcatgctgctatggtgatccgggcgcacgtcctgggattccttgccagaaaacaatatcgtaaagttctctactgtgtggtgattatccagaagaactaccgggcatttttgctccgacgccggtttcttcatcttaagaaggcggcaatcgttttccagaaacagctaaggggtcaaatcgctaggagagtgtaccgtcagctgttggcagaaaagcgagaacaggaagagaaaaaaaagcaagaggaagaggagaagaagaaaagggaagaagaggagagggagcgcgagagggaacgcagagaggctgagctgagagcccaacaggaggaagaaacgcggaagcagcaggaactggaagccctccagaagtcacagaaagaagccgagctcacgcgcgagctggaaaaacagaaggaaaacaagcaggtggaagagatcctgcggttggaaaaggaaatcgaggatttgcagcggatgaaggagcaacaggaactgtcactgacggaagcgtctcttcaaaagctccaggagcgccgggatcaggagttgaggcgcctggaagaagaggcctgtagagccgcacaggaattcctagaaagtcttaactttgacgaaatcgacgagtgcgttagaaacattgagcgatccttgagcgtgggctcagaattttctagcgagctagcagaatccgcatgtgaggagaagccaaactttaacttctcccagccatacccagaagaggaggtggacgagggtttcgaggcggacgacgatgccttcaaagattctcccaacccatccgaacacggccactcggatcaacgcaccagcggcatccgaacctctgatgatagctcagaagaggatccttatatgaatgataccgtggttccaaccagccccagtgcagactcaacagtcctgttggccccctccgttcaggacagtggtagcctgcacaactctagcagcggcgagtccacctactgcatgccgcaaaatgctggcgacctgccctctcccgatggggactatgattatgaccaggatgactacgaggacggagcgattacaagtggatcttccgtgaccttctcgaatagctatggctctcagtggtctcctgattaccgttgttccgtgggtacatataattcatctggcgcttataggttttcaagcgagggtgcacagtcaagctttgaagattcggaggaggactttgactctcgctttgacaccgacgatgagctatcctacaggcgggactctgtgtactcatgtgttactcttccatatttccactctttcctgtacatgaaaggcgggctgatgaactcctggaagagacggtggtgtgttctcaaggatgaaacttttctgtggttcagatctaaacaagaagccctgaaacagggatggcttcataaaaagggcggtggatctagcacgctgtcgagaagaaattggaaaaagagatggttcgtcttaagacaaagcaaattaatgtattttgagaatgattctgaggagaaactgaaagggaccgtcgaggtgcgcacggccaaggagattatcgataacactactaaagagaacgggattgatataataatggcagacagaacgtttcatctgatcgcagaaagtccggaagacgcatctcagtggttcagcgttctttcccaggtccatgcgtccactgaccaggaaatccaggagatgcatgacgaacaggccaacccgcagaatgcagtcggcaccctggacgtgggcctgatcgatagcgtctgcgcctctgacagcccagatcgacccaacagcttcgttattattactgccaatagggtactccattgtaatgccgatactcctgaggaaatgcaccattggatcacattgctacaaagaagtaagggagacactagagtagaaggacaggagttcattgtgagggggtggctgcataaggaggtgaagaacagccccaagatgtcaagcttaaaactgaagaaacgctggtttgtgttgacccacaatagtctggactactataagtccagcgaaaaaaatgctctgaagctgggcacactggtgctgaattctctgtgtagtgtggtccctcctgatgaaaagatctttaaagagaccgggtactggaatgtgactgtatacggcaggaagcactgttacaggctgtacacaaagctgctgaacgaggccactagatggtctagcgcgatccagaatgtgaccgatacaaaagcccccattgacacccccacgcagcaactcatccaggacatcaaggagaactgcttaaactcagacgtcgtagagcaaatttacaagagaaaccccattctgagatatacgcaccatcctctgcactccccgctgctgcctttaccctatggcgatattaacctcaatttgctgaaggataaaggatatacaacgttacaggatgaggccatcaaaattttcaattcacttcaacaactagaaagcatgagtgaccccatccccatcatccaagggattttacagaccggccatgatctccgaccactgagggacgagctgtattgccagttgataaaacagaccaacaaagtgccccacccgggttcagttggcaatctgtacagttggcagattttgacgtgtctcagttgcacatttctcccaagccgaggcatcttgaagtacttgaaattccatctcaaacgaatccgcgagcagttccccgggtctgaaatggagaagtacgctctgtttacttatgaaagcttgaagaaaactaaatgcagagaattcgttccctccagggatgaaattgaggcgctcatacatcgccaggagatgaccagcaccgtatactgtcacggagggggcagctgcaagattacaatcaattctcacacgacggccggagaggtggtggaaaagttaatcaggggcctggccatggaggacagcaggaatatgttcgctctgttcgagtataatgggcacgtggataaggcaattgagtcaagaactgttgtggccgatgtgttggcaaaattcgaaaagctggccgcaacaagtgaagtcggggatcttccatggaagttttactttaagctatattgtttcttggacaccgacaacgtgccaaaagacagtgtggagttcgcattcatgtttgaacaggcccatgaggcagtgatccacgggcatcatccggctcccgaagagaatctgcaggtgttggcagccttgagattacaatatctgcagggggattataccctgcatgcggccatcccccctctggaggaagtgtacagcctccaacggttgaaagccagaatctcgcaaagcactaagacgtttacaccttgcgagagactggagaagagaaggacctcattcctggagggcacacttcggagaagcttcagaactggatctgtggtgcgtcagaaagtagaggaggagcagatgctggacatgtggattaaagaagaggtgagtagcgctcgcgccagtatcatagataagtggcgcaagttccagggaatgaaccaggagcaggcgatggctaaatatatggccctcataaaagagtggcccggctatgggtccaccttatttgatgtggagtgcaaggaaggtggatttccacaggagttgtggctgggggtgagtgccgacgctgtgagcgtgtacaagcgcggcgagggtaggcctttagaagtgttccagtatgagcatatactgagtttcggtgctcccctagctaatacttacaagatagtggtcgatgagcgggaactcctgttcgagacatcagaggtagtcgacgtggcaaaactcatgaaagcttacatttccatgatagttaagaagcggtatagcactactcgatccgcctccagccagggatcgtcccgatag

SEQ ID NO: 174071 - DNA, 6177 bp, Artificial Sequence
  derived and/or modified sequence
atggacaacttcttcaccgagggcacccgggtgtggctgcgggagaacggacagcactttccctctaccgtgaattcttgcgccgaggggattgtggtgttccgaacagactatggccaggtctttacttataagcaaagcaccatcacgcaccagaaagtcaccgccatgcacccgacaaacgaggagggagtcgacgacatggcctcactgacagaactccacggaggctccataatgtacaacctgtttcagcgctataaaagaaaccagatctatacctacataggttccatactggcttccgttaatccttaccaacccatcgcgggtttatatgaaccagccaccatggaacaatattcccgcaggcatctgggcgagctgccaccccacatctttgctattgccaacgagtgctatcgctgtctctggaagcgccacgacaatcaatgtattctcatcagcggcgagtcaggcgccggcaagacggaaagcacaaagctgatcctgaagttcctgtctgtgatctcacagcagtctttagagttatcccttaaggagaaaacatcatgtgttgaacgcgctatattggaatcatcgccaatcatggaggcattcggcaacgcaaaaactgtctacaacaacaactcctcacgctttggaaagttcgtccaacttaacatctgtcagaaggggaatatccaaggcggaaggatcgtcgactatctgctggagaaaaatcgcgtggtgcgtcagaaccccggcgagagaaactaccatattttttacgcactgctcgcaggtttagagcacgaggagcgtgaggagttctatctttctactccggaaaattatcactatttgaatcagagtggctgcgtcgaggacaaaactatctccgaccaggagtctttcagagaagtgatcaccgccatggatgttatgcagtttagcaaggaagaagtgagagaagtctcccggctgctcgccggcatattgcacctggggaacatagagtttattaccgcaggaggtgctcaggtgtcattcaagactgccttgggaagatctgccgagctgctgggccttgatccaactcaattaaccgacgccctgacgcagcgctccatgtttctgcggggagaagagatcctcactccacttaacgtgcagcaggcagtagacagtagggattctctggcaatggccctgtatgcgtgctgttttgagtgggtaattaagaagatcaattccagaatcaagggcaacgaggattttaaaagcataggaattctcgacatattcggtttcgagaacttcgaggttaatcacttcgaacagttcaacatcaattatgctaacgagaaattgcaggaatacttcaacaaacatattttttctttggagcagctggagtattcgcgtgaagggttagtctgggaagacattgattggatagataacggcgagtgtttggacttgattgaaaagaagctgggcctcctagcactgattaatgaagagtcacattttcctcaggccaccgactctacactcctggaaaagctccactcccagcacgccaacaaccacttttacgtcaaaccacgggtcgctgtcaacaactttggagttaagcactacgcaggtgaagtgcagtatgacgtgaggggtatccttgagaagaacagagataccttccgggacgatctgctgaatctgttgagagagtctaggttcgattttatatatgacctgtttgagcacgtgagctctcgaaataatcaggacacacttaagtgcggaagcaagcatcggcggcccactgtctcgagtcaatttaaagactctctgcatagcttgatggcaactctgagttcttctaacccgttcttcgtgagatgcatcaagcctaatatgcagaagatgccagatcagtttgatcaggcagtcgtcctcaaccaattgaggtacagtggaatgctggagaccgttaggatcagaaaagcagggtacgctgtccgacgcccatttcaagacttttacaaacggtataaagtactaatgcggaatcttgccctccccgaagatgtcagggggaaatgtacttctctattgcagctgtatgatgcctccaactcagagtggcagctcggaaaaaccaaggtttttctgagagaatcactcgagcagaaactggaaaagcgtagggaggaagaggtctcccatgccgcaatggtcatccgagcccatgtcctaggctttctggcccgtaagcagtacaggaaagtcctatactgcgttgttatcatacagaagaattaccgagcgtttctactgagacggcgcttcctccacctcaagaaggctgcaatagtgtttcagaaacagctcagaggccagatcgcacggagagtatacagacaactgctagccgagaagagggaacaggaggagaaaaagaaacaggaggaggaagagaagaaaaaacgtgaggaagaagagcgcgaacgcgaacgggaacgcagagaagccgaactccgcgcccagcaggaagaagagaccaggaaacagcaagaactggaagctctccaaaaaagccaaaaagaggccgagctcaccagggagctcgagaagcagaaagaaaataagcaggtggaggaaattctcaggctggaaaaagagatcgaggatttgcaacggatgaaagaacagcaggagctatccctgactgaggcctctctgcaaaagctgcaggaacgtcgtgaccaggaattgcggagactggaggaagaagcctgtagggcagcccaggaatttctggagtctctcaacttcgatgaaattgacgagtgcgtgaggaatatcgagagaagcctgagcgtcggcagtgaattcagttctgagctggccgagtctgcgtgcgaggagaagcccaatttcaatttctctcagccgtatcccgaggaggaggtagacgagggatttgaggctgacgacgacgcgtttaaagactctccaaacccatccgaacacgggcactccgatcagaggacatccggtattcgcacatctgatgattcctccgaggaagatccttatatgaatgacacggtggttccaactagtccatctgccgactcaaccgtactgctagctccatcagtgcaggattctggaagccttcataacagctcctcaggcgagtcaacctactgcatgcctcagaacgctggagacctgccaagccctgacggggactatgattatgaccaagatgactacgaagacggggctatcacttctggttcttcggtgaccttctcaaacagttatggttcacagtggagtcctgactatcgatgcagcgtcggtacttacaatagcagtggggcctacagattcagctcagaaggcgcacaatcttcctttgaggacagtgaagaggatttcgactcacggttcgacactgatgacgaactttcctaccggagagactccgtttactcttgcgtgaccctgccatattttcacagctttctgtacatgaagggtgggctgatgaattcttggaaacgcagatggtgtgtcttaaaggacgagactttcctgtggttccgatcaaagcaggaagcactgaaacagggttggctgcacaaaaaaggcggggggtcatcaaccttatcgagacggaactggaaaaagaggtggtttgttctgcgtcagtctaagctgatgtactttgaaaacgactccgaggagaaactaaaggggacagtggaggttcggacagcaaaggaaattatagataacacgactaaggagaacgggatcgacatcatcatggctgaccgcacgtttcacctgattgccgagtcgccagaggacgcttctcagtggttttcagtgctaagccaggttcacgcaagtaccgatcaggagatccaggaaatgcacgacgaacaggctaacccacagaatgccgtaggaacccttgacgtgggcctgatagactctgtgtgtgcgtctgacagtccagataggcctaattcatttgtgatcatcaccgcaaatagggtactgcattgtaacgctgataccccagaagagatgcaccactggatcacgctactccagcgttccaagggagatacccgtgtggagggacaggagtttatcgtgcgcggatggcttcacaaggaggtgaaaaattccccgaagatgtcttctttgaaactcaagaagaggtggtttgtgttgacccacaactccctggactactacaagagttccgaaaagaacgccttaaagctgggcacacttgtgcttaactcactgtgctccgttgtaccccccgatgagaaaatattcaaggagaccggttactggaacgtgacagtgtacggacgcaagcactgctacaggttgtacacaaaactactgaatgaggcgacacgatggtcatccgcgatccagaacgtaacagacacaaaagcgccaatcgatacgcccacccagcagcttattcaggacatcaaggagaattgcctgaattccgatgtggttgagcagatatacaagagaaatccaattctcagatacactcaccatccactgcactctcctctgctgccattaccttatggtgatatcaacctcaacttactcaaagacaagggttatacaaccctgcaggacgaggcaataaaaatctttaactctctccaacaattagaatccatgagtgatccaattcctatcattcaggggattctgcagaccggccatgacctgagaccgctgcgcgacgagctttattgtcagctgatcaagcaaacaaataaagttcctcatccaggctctgtcggtaacctgtacagctggcagatcctcacgtgtctgagttgcacatttctgccatcgaggggtattttaaagtatttgaagttccacctgaaacggataagggaacaatttccaggatcagaaatggaaaagtacgccctctttacctacgagagtctgaaaaagacaaaatgtcgggagtttgtcccctcccgtgacgagattgaggccctaatccacaggcaggagatgaccagtactgtgtactgccatggaggtgggtcctgcaagattactataaactctcatactacggcaggggaagtagtggaaaagctgattcggggacttgcaatggaggattcaaggaatatgtttgctttgttcgaatataatggacatgtagataaggctattgagtcaagaaccgtagttgctgatgtcttggccaagttcgagaaactcgctgccacttccgaagtcggcgatctgccctggaaattttatttcaagctgtactgcttcctggataccgacaacgtccccaaggacagcgtggaattcgccttcatgttcgagcaagcacacgaggcagtcatccatgggcatcaccctgcacctgaggagaacctgcaagtgcttgcagcactaagactgcagtacctccaaggggactacacactccatgccgctatccctcccctggaggaggtttatagcctacagcgcttgaaggctaggatatctcaatccactaaaacattcaccccatgcgagcgactagaaaaaaggaggacttcttttctggagggcaccctcagaaggtcctttagaacaggatctgtcgtgcgtcaaaaagtggaagaagagcaaatgctcgacatgtggattaaagaggaggtgtcatccgcaagagcttcgatcatagataagtggcgtaagtttcagggtatgaaccaggagcaagccatggccaagtacatggctctgattaaggagtggccggggtatggctctacgcttttcgacgtcgaatgcaaggagggcgggttcccccaggaactgtggttaggcgtgtcggctgacgccgtgtcagtgtacaaaaggggcgagggtaggcccttggaagtctttcaatacgagcatattttgagttttggagccccactggctaacacgtacaagattgtggtggacgaacgcgagctgcttttcgagacatccgaggtcgttgatgtcgccaagctcatgaaagcttacatatccatgatagtaaaaaagcggtattccactacccggagcgcctcttcccagggcagttctaggtag

SEQ ID NO: 174072 - DNA, 4194 bp, Artificial Sequence
  derived and/or modified sequence
atgctggagaccgtgcggatccggaaggccggctacgccgtgcggcgcccgttccaagacttctacaaacgttacaaagtgcttatgcggaatttggctctccctgaggacgtcaggggaaaatgtacctctctgctccaactgtacgacgcatccaattccgagtggcagctcggcaagacgaaagtgtttctgagggagtcactagagcagaagctggagaagagacgagaggaggaagtgtctcacgccgcgatggtgatccgggcccacgtactcggttttttagctcgcaaacagtaccgtaaggttctatactgcgtcgtcattatccagaaaaactatcgcgcctttctcctgcggaggcgtttcctgcatttgaagaaggccgcaatcgtatttcagaagcagctgcgtggtcaaatcgcaagacgagtgtataggcagctcctggccgaaaagagggagcaagaagagaaaaagaaacaggaggaggaggagaagaagaaaagagaggaagaagagagggaacgtgaacgagagagacgtgaggcggagttaagggctcagcaagaggaagagacacgaaagcaacaagaactggaggccctccagaagtcccagaaagaggcagaattgaccagagaattggagaaacagaaggagaataagcaggtggaggagattcttcgtctcgaaaaggagattgaggacctccagcgtatgaaagagcagcaggagttgagtcttaccgaggccagcctgcagaagctccaggaacgccgggaccaggagttgaggcgcttagaggaggaggcctgccgcgcggcccaagagttcctggagtctctaaactttgatgaaattgacgagtgcgttcgaaacattgagaggtccttgtcggttggctctgagtttagctccgaactcgccgaaagcgcttgtgaggagaaaccaaacttcaatttcagtcaaccttacccagaggaggaagtggacgagggatttgaagcagatgatgatgctttcaaggattctcccaacccgagtgagcatggacacagcgaccagagaacgtctggtattcgcacaagcgacgactcttcggaggaggacccatatatgaacgatactgtggtacccacctccccatccgctgactctacagtcctgctggctccaagtgtgcaggattccggatcactgcacaacagttctagcggcgaatctacgtattgcatgccccagaacgcaggagacctccctagtcctgatggggattacgattatgatcaggacgattacgaggatggcgccatcacatccggctcttccgttaccttctccaatagttacggctcccagtggtcgcctgattataggtgttctgttggcacgtacaacagcagcggcgcctatagattctccagcgagggggctcagagcagcttcgaggattccgaggaggatttcgactccaggttcgacaccgatgatgagctgtcttaccggcgcgattcagtgtatagctgtgtaacactgccttacttccactcctttttatacatgaagggagggctcatgaactcctggaaacgcagatggtgtgtccttaaggacgagacgttcctctggtttcggtctaagcaggaggctctaaaacagggatggctgcacaagaaaggcggcggcagcagcaccctcagccgtaggaactggaaaaagaggtggtttgtcctcaggcagtccaaactgatgtatttcgaaaacgattccgaagaaaagctgaagggaacagtcgaggttcggaccgcaaaggaaattatcgacaacactactaaggagaacggcatcgacattatcatggctgatcggacctttcacctgatcgctgaatcccccgaagatgcttcccagtggttttctgtgctgtctcaggtgcatgctagcaccgatcaggagatccaggaaatgcatgacgaacaagccaaccctcagaatgctgtgggcaccttggatgtgggcttaatagattccgtctgtgcttccgatagtcccgatcggccaaatagtttcgtgattatcactgctaaccgcgttttgcattgcaacgcagatacgccagaggagatgcaccattggattaccctgctgcagcggagcaagggcgacacccgagttgaggggcaagaattcattgtccgcggctggctgcataaagaagtgaagaacagcccaaagatgagctctctgaagctgaagaaaaggtggttcgtgcttactcacaatagcctggactactacaagagctcggaaaagaacgcgctgaagctgggtacattagtattaaacagtctttgttcggtcgtcccgccagacgaaaaaatcttcaaagagacaggctattggaacgtcaccgtttacggaagaaaacattgctacaggctgtacacaaaactcctgaacgaagccacacggtggtctagcgccatccagaacgtgaccgacacgaaggcaccaatcgacacccctacccagcaactcattcaggatattaaagagaattgcttaaactcagatgttgtcgaacagatctacaagcgtaacccaattctgaggtacacacatcaccccttgcactccccattgctgcccctcccttacggcgacatcaacctgaacctcctgaaggataaaggctatacaactctccaagacgaagctatcaagattttcaattccctgcagcagcttgaaagtatgtcagatccaattcccataattcagggcatcctgcagaccggccacgatctgcgccctctgagggatgagctctactgtcagctgattaaacaaacgaataaggtcccacatcctggcagcgttggaaatctgtattcttggcagatactgacctgcctgagttgtaccttcctgccctctaggggtatcctgaaatatttaaagttccaccttaaacgcatcagggagcagttccctgggagcgagatggaaaaatacgcccttttcacatacgagagtctgaaaaaaaccaagtgccgggagtttgtcccatctcgggatgaaattgaagccctcatccatagacaagagatgacctctacggtatattgccacgggggcggctcatgtaaaatcaccataaacagtcataccaccgccggcgaagtggtggagaagctaatccgcggcttggcaatggaagactctcgcaatatgtttgccctttttgagtataatggccacgttgataaagccattgaaagtcgcaccgtggtggctgatgtgcttgcaaagttcgaaaaattggcagctacgtccgaagtaggggacctgccctggaaattctatttcaagctgtactgtttcctggatacagacaatgtccccaaagactcggtcgagttcgcattcatgtttgaacaggctcatgaggcagtgattcatggacatcacccggcaccggaggaaaacctacaagtgctcgcagctctgaggctccagtatttacaaggtgactacactcttcacgccgcgatcccacccttggaagaggtctacagcttgcagcgcctgaaggctcgtatttcccagtcgacaaagacttttacaccctgtgagcggcttgaaaagaggcgcacctcattcctcgaaggaacgcttcgaagaagcttccgaaccgggtctgtggtcaggcaaaaagtcgaagaagagcagatgttagacatgtggattaaggaggaggttagctccgcacgagccagtatcatcgacaagtggcggaaatttcagggaatgaaccaggagcaagccatggcaaaatacatggcactcatcaaagaatggccaggttatggcagcaccctgttcgatgtggaatgcaaggagggcggcttccctcaggaactctggctgggtgtctccgccgacgctgtgtctgtgtataaaaggggggagggacggccattggaggtattccagtacgagcacattctcagctttggcgctcccttagccaatacctacaagatcgtggtcgacgagcgcgagttactttttgagactagtgaagttgttgatgtggctaagttaatgaaggcttacattagtatgattgtcaagaaacgctatagtacaacgcggagcgcctcttcacagggcagcagtcgctag

SEQ ID NO: 174073 - DNA, 4248 bp, Artificial Sequence
  derived and/or modified sequence
atgccagatcagttcgatcaggcagtggttctgaatcagctcagatactctggtatgctggaaacagtgagaattcgcaaagcaggctatgcagtgcggagaccttttcaggatttttataagagatataaggtcctcatgaggaacttggccctgcctgaggatgtgaggggcaaatgtactagtcttttgcagctgtatgacgcatccaactcagagtggcaactcgggaaaactaaagtcttcttgcgcgagagcctcgagcagaaacttgagaaaagacgagaagaagaagtcagtcacgcggctatggtgatccgagcccacgtgctcggattcctggccaggaagcagtaccggaaggtgctctactgcgttgtgataattcagaagaattaccgcgcatttcttctcagaaggcggttccttcatctcaagaaagccgcaattgtgttccagaagcagctccgcggtcagatagcaaggcgcgtgtaccggcaactgctggccgagaagagggagcaagaggagaagaagaaacaggaggaagaggagaagaagaaacgcgaggaagaggaaagagagcgggaacgggagcggcgagaggccgaactgagagcgcagcaggaggaagaaacccgtaagcagcaggaattagaagctctgcaaaaatcccagaaggaggctgaattaaccagagagctggagaagcagaaagagaacaaacaggtggaagagattttaagattggagaaagagatagaggacctccagcggatgaaggagcaacaggaattgagcctgacggaggcatcattacagaaattgcaggaaagacgcgaccaggaactgaggcggctcgaagaggaggcatgccgggctgcccaggagtttctcgagtctctaaacttcgacgagattgacgagtgtgtgaggaacattgagcgttctttgtctgtgggaagtgaattcagctccgaattggcagagtccgcctgtgaggagaagcccaatttcaacttctcccagccgtaccctgaggaggaagtggatgaaggcttcgaggcggatgatgacgcgtttaaagacagccctaatccaagcgagcatggacatagtgaccagcgaacaagcggcataagaacctccgatgattcatctgaagaagacccatatatgaatgacacagtggtgcctactagcccgagcgcggactccaccgtacttctggctccctctgtccaggactctggtagcctgcacaattcatccagcggcgaaagcacatactgcatgccacagaacgccggagacttgccgtctccagatggggactatgattacgaccaagatgattatgaagacggtgcgatcacaagtgggagtagcgtgaccttctcgaattcttacgggtctcagtggtcccccgactacaggtgcagcgtgggaacatataactcctctggtgcgtatcgcttcagcagcgaaggcgctcagtcttcattcgaggactcagaagaggatttcgattcccggttcgataccgatgatgaattatcgtatagaagagacagtgtgtatagttgtgtcactctgccttacttccactcatttctgtacatgaagggaggactgatgaactcatggaaacggcgttggtgtgtgctcaaggatgaaaccttcctctggttccgtagtaagcaggaggccctcaagcaaggatggctgcacaaaaaaggcggaggatctagcacgctgagtcgaagaaattggaagaagagatggtttgtacttagacagtcaaaactgatgtattttgagaatgacagcgaggagaagctgaaggggaccgtggaggttcgcactgccaaggaaattattgacaataccaccaaagaaaatgggatcgatattattatggctgacaggacctttcacctcatcgcagagagccccgaagacgcgtcccagtggttctctgtgttgtcacaggtgcatgctagcaccgaccaggaaattcaggagatgcatgatgagcaggctaatccccagaacgctgtcggcacgcttgatgtgggactgattgattcagtgtgcgcatcagacagtcccgacaggcccaatagttttgtcatcataaccgctaacagagtactgcattgcaatgctgacactccagaggagatgcaccattggataacccttctgcagcggtcaaagggagatacacgcgtagaagggcaggaattcatcgtaaggggttggttgcataaggaggtgaaaaattcgcctaagatgtcttcactcaagctgaagaagcgttggttcgtgctgactcataactcgctggactactataaatcctcggaaaagaacgcgcttaaattgggcaccctagtcctgaacagcctgtgctcagtcgtaccacccgatgaaaaaatcttcaaggaaacggggtattggaatgtgactgtttacggaagaaagcattgctatcgcctgtataccaagttgctgaatgaggcaactcgttggtcctccgccatccagaacgtcacggataccaaagccccaatcgacacacccacacagcagctcattcaagacattaaagaaaattgcttgaattcagacgtggtggagcagatctacaaacgcaatcctattcttcgatatacacaccaccctcttcacagcccactgttgccactgccctacggggacattaacctgaatctgctgaaggacaaaggatacactacgctgcaggacgaagccatcaagatatttaattccctccagcagctagagagtatgagtgatcctatccctattatccagggcatcctccagactggacacgacctgcgccctctgcgagacgagctgtactgccagttgataaagcagacgaacaaggtaccccaccccggatctgttggtaatctctattcctggcagattctcacatgcctctcttgcacatttctccctagtcgcggaattcttaagtacctcaaattccatctgaagcgtattcgcgaacagttccctggatctgagatggagaaatatgcactcttcacctacgaaagtctgaaaaaaaccaagtgtagggagtttgtgccatctagggacgagatcgaggctctgatccacagacaagaaatgacttcaacggtgtactgtcacggtggaggttcctgtaaaattaccataaattcacatacaaccgctggtgaagtggttgaaaaactaattcgtgggctggctatggaggacagccggaacatgttcgcgctgttcgagtacaatgggcatgtagataaggcaattgaatcccgcaccgtcgtggctgatgtactggccaaattcgagaagcttgcagcaacctcagaagtcggagatctcccctggaagttctattttaaactgtattgctttcttgatacagacaacgttcccaaggattccgtcgaattcgcttttatgtttgagcaggcacatgaagccgttattcacggacaccatcccgctccagaagagaacctgcaagtcctggcagcgttgcgcctgcagtatctgcagggggactatactctccatgcagctattccaccattggaggaggtgtacagtcttcagaggcttaaggccagaatctcccaatctaccaagaccttcacaccttgtgagcgactcgagaaacgaagaactagtttcttggaaggcaccttacggaggtcgttcagaactggatctgtcgtgaggcaaaaggtggaagaagagcagatgttagacatgtggatcaaagaggaagtgtcgagtgcacgggcatcaatcatagataaatggaggaagtttcagggaatgaatcaggagcaggccatggcaaagtacatggcactgatcaaggagtggccagggtatggttctaccctcttcgacgttgagtgcaaggaaggcggttttccacaagagctctggctgggagtctctgccgacgcggtcagtgtgtataaacgcggtgagggcagaccactcgaggtcttccagtatgagcatatattgtccttcggggcaccattggctaatacgtataagatcgttgtggacgaaagagaattactgtttgagacgtcagaagtggtggatgtcgctaaactcatgaaggcctatatctctatgattgtaaagaaaagatacagcacaacccgctccgcctctagtcagggatcttcaagatag

SEQ ID NO: 174074 - DNA, 4248 bp, Artificial Sequence
  derived and/or modified sequence
atgcccgaccagttcgaccaggctgtcgtgctgaaccagctgcgatattccggcatgctggagaccgtgcggattcgcaaggccggttatgctgtgcgcaggcctttccaggacttctacaagaggtataaggtcctaatgaggaacctggccctgccagaagacgtgaggggcaagtgcacaagcctcctgcagttgtatgatgcttccaatagcgagtggcagctgggtaagactaaggtgttcttgcgcgagagtctggagcagaaactggaaaagcgccgagaggaggaggtgtcccatgcagccatggtgatcagagctcatgtgctgggcttcctcgccaggaaacagtacagaaaggtgctgtattgcgtcgtgataatccaaaagaactaccgggcttttcttctccgtcgcaggttcctgcacctcaagaaagccgcaatcgttttccagaaacaactgcgaggccagattgcacgtcgagtctatcgccaacttctggctgagaagagggagcaggaagagaagaagaagcaagaggaggaggagaagaagaagagagaagaggaagagcgcgagagagagagagaaagaagggaggccgagcttcgagcgcagcaggaagaggagactagaaagcagcaggaattggaggctctccagaaaagtcagaaggaggctgagctcaccagggagttggaaaaacagaaggaaaacaaacaggtggaagagatccttagacttgagaaggaaattgaagaccttcagcgtatgaaggagcagcaggagctgagccttaccgaagccagcttgcaaaagcttcaagaaaggagagatcaggaactccgacgattggaggaagaggcctgccgcgcagcccaggagttcctggaatccctgaacttcgacgagattgacgaatgcgtccgaaacattgagaggtcactaagcgtcggaagcgaattttcttctgagctagctgagtccgcatgtgaagaaaaaccaaacttcaacttcagccagccttacccggaggaggaagtcgacgaaggctttgaagcagacgacgacgctttcaaggatagcccgaatcctagcgagcatggccactccgatcaacggactagcggcatcaggaccagcgatgacagcagtgaggaagacccatatatgaatgacaccgtggtccctacctctcccagtgctgatagtactgtgctcctcgccccttctgtgcaggactctggctctctccacaattccagtagcggagagtccacttactgtatgcctcaaaatgcaggagacctgccctcccccgatggtgattatgactatgatcaggatgattacgaagacggggctattacctctggcagtagcgttactttcagcaactcttatggcagccagtggtccccagattaccgctgcagcgtcgggacttataatagcagtggagcctataggtttagctcagaaggcgctcaatccagtttcgaggatagcgaggaggactttgacagcaggtttgatactgacgacgagttgtcatacaggagagacagcgtgtactcatgtgtcaccctgccctatttccactcttttctctacatgaagggaggcctcatgaatagttggaaaaggcgatggtgtgtgctgaaggatgagacctttctgtggttccgatccaagcaggaggcgctgaaacaggggtggcttcacaaaaaggggggaggcagtagcactctctcaagaagaaactggaagaagaggtggttcgtactaagacagtcaaagctgatgtacttcgaaaacgattccgaggagaagctgaagggtaccgtggaagtcaggactgctaaggaaattatcgacaatacaaccaaagaaaatggcatcgatattattatggcggaccggactttccacttgattgctgagtcccccgaggacgcctcacagtggttttccgtgcttagccaggtacacgcttccactgaccaggagatccaggaaatgcacgacgaacaagccaatccgcagaatgcagtcgggacacttgatgtaggtctgattgactcagtttgcgcctcagattcaccagacaggcccaattcatttgttattattactgctaaccgcgtgctacattgcaacgcagacacacctgaggaaatgcaccattggatcaccttactgcagagaagtaagggggacacccgagtcgagggccaggagttcatagtgagagggtggctccataaagaagtgaaaaattctcctaaaatgtcatctctcaagttgaagaaacggtggttcgtgttaacccataacagcctggattactataaaagtagcgagaagaacgcccttaaattgggcacattggtgctgaactccctgtgctccgttgtgccccctgacgaaaaaatctttaaggagactgggtactggaatgttacggtgtacggacgcaagcactgctaccgtctgtacaccaagctcctgaatgaggccactcggtggagcagtgcgatacagaatgtgaccgacacaaaggctcctatagacacccccacacaacagctgattcaggacattaaagagaactgtctcaattccgacgtggttgagcaaatctataagagaaatcctatactgagatacactcaccaccctctgcatagccctttactgccgttgccctatggggatataaacctcaatctgctgaaggataagggatacacaactctgcaagacgaggcgattaaaatcttcaactcactgcagcagctggaatctatgtccgatcctattcccatcattcaggggattctccagacggggcacgatctgaggcctctcagggacgagttgtattgtcagctcattaagcagactaataaggttccgcacccgggatctgtgggtaacctttacagttggcagattctgacctgcttatcttgcacattcctgccgagcaggggcattctcaagtatctcaaatttcacttgaagcggattcgagaacagttccccggatccgagatggaaaaatacgcgttgttcacttacgaatctctgaagaaaacgaaatgtagagaatttgtgccgtctagggatgaaatcgaagccctgattcatcgccaagaaatgacatccactgtctattgccacgggggtgggtcatgtaagatcaccataaactcgcatacaacagcaggcgaggtcgtggaaaaattgatacgcggactggcaatggaagatagccgaaacatgttcgccctgttcgaatataatggtcatgtggacaaagcgattgaatctcgcacagtggtggcagacgtgctggcaaagtttgagaagctggctgccactagtgaggttggcgacctcccctggaaattctacttcaagctttattgttttcttgacaccgacaacgtccctaaggatagtgtcgagttcgccttcatgttcgaacaggctcatgaggctgtgatccatgggcaccaccctgccccagaggaaaatctgcaggtgctcgctgccctccgactccagtatctacaaggtgactatactctccatgctgctatccctccactggaggaggtttattccctgcagaggctgaaggccagaatctcacagtctaccaagactttcacaccatgcgaacgtctggagaaacgccgaacctcctttttggagggaactctgcgtcggtcattcagaaccggatcagtagtccgccaaaaggtcgaagaggaacagatgcttgatatgtggataaaagaagaggtgtcttctgcccgtgcaagtattattgacaagtggcggaagtttcaggggatgaatcaagaacaggccatggccaaatatatggccctgatcaaggaatggcccggttatggaagcacactcttcgatgtggagtgtaaggaaggcggatttccccaggagctctggctgggcgtgtcagctgatgcagttagcgtgtataagaggggggaggggcgaccactcgaagtgttccagtacgaacacatactgtcttttggggcaccgctcgccaatacctataaaattgtggtggatgaaagggaacttctctttgaaacctccgaggtagtggacgttgcaaagctaatgaaggcttacatttctatgatcgtgaagaagcggtattctaccacccgaagtgccagttctcaaggaagcagccggtag

SEQ ID NO: 174075 - DNA, 4194 bp, Artificial Sequence
  derived and/or modified sequence
atgctggaaacggtgaggatccgcaaggccggatatgccgtgaggaggccattccaggatttttataaacgctacaaggtccttatgcgtaaccttgccctgcccgaggatgtgcggggtaaatgcacttcccttctccagctgtatgacgcatctaactctgagtggcaactgggcaagaccaaggtatttttacgagagtcccttgaacaaaagctggagaagcgccgagaggaagaagtttctcatgccgcaatggtgattagagcgcacgttttgggttttcttgctcgaaagcagtacagaaaggtgctttattgcgtggtcatcatccagaagaattaccgcgcttttctcctgagaaggcgattcctgcatctaaaaaaggctgctatcgttttccaaaaacagcttcgcggtcagattgcgcgaagggtgtataggcagctactcgctgagaaaagggagcaggaggaaaaaaagaagcaggaagaagaagagaagaaaaagagagaagaagaagagcgtgagcgggagagagagcgcagagaagcagaactgcgcgctcagcaggaggaggagacccgcaagcagcaggaacttgaggctctgcagaagtcccagaaggaggcggagctgactcgcgaattggaaaagcagaaagagaacaagcaagtggaggagatcttgcggcttgaaaaggagattgaggacttgcagcgtatgaaagagcagcaggagctgagcctgactgaagccagcttgcagaagctgcaggagcgacgcgatcaggagttgcgcagattggaggaggaggcttgcagggccgcacaggagttcctcgagtcattgaatttcgatgaaattgacgaatgcgtgcggaacatcgaacgctccttatctgtcggctcagagttctcatccgaactggccgagagcgcttgtgaagaaaagcctaatttcaattttagccagccttaccccgaggaggaggtggatgagggctttgaggccgacgatgacgcctttaaggactctcccaatccaagtgagcatggccactctgaccagcgcaccagtgggatccggacaagtgacgatagctccgaggaagacccctatatgaacgatacggttgtgccaaccagtcccagcgctgactccaccgtgctgctggccccttccgtacaagattcgggctcgctccacaatagctctagtggggaatccacctactgcatgccgcaaaatgctggcgacttgccatctccagatggcgactatgactacgatcaggacgattacgaggatggagccatcacatcaggttctagtgtgacattcagtaattcctatggatcacaatggtctccagactacagatgttctgttggaacctataacagtagcggtgcctatcgcttctcctctgagggggcacagagctcgtttgaagattcggaggaggattttgatagtaggttcgacacggacgacgaactgagctatcggcgagatagtgtgtacagctgcgtgaccctgccatacttccactcttttctctacatgaaagggggacttatgaattcgtggaagcggagatggtgcgtgctcaaagatgagacctttctgtggttcagatcgaagcaagaagccctgaagcagggatggctccacaaaaagggcggtgggagctcaacactgagccggagaaattggaagaagcggtggttcgtgctaaggcagtccaagcttatgtatttcgaaaatgattccgaggaaaagcttaaggggactgttgaggtgcggaccgccaaagaaataatcgataataccactaaggaaaacggtatcgatatcatcatggccgacaggacatttcatcttatcgcagagtctcctgaagacgcatcacagtggttcagcgtgctaagtcaagttcatgcctccactgaccaagagatacaggagatgcacgacgagcaagctaacccacagaacgctgtgggtacactcgacgtgggtttgattgactctgtttgtgcatccgactccccggataggcctaattctttcgtgattattaccgcgaaccgagtgctgcattgcaatgcagatacacccgaggagatgcaccattggatcaccctcctccaaagaagcaagggagatactcgcgtggaagggcaggagtttatcgttagaggctggctgcataaggaagtgaaaaatagtcccaaaatgagcagtctcaagctgaaaaagaggtggttcgtactcacgcataacagcctggactattacaagtcctccgaaaagaacgcactgaaactaggtacattggttctaaacagtttatgctctgtcgtgccccctgacgagaaaattttcaaagagaccggctactggaacgtaactgtgtacggccgtaagcattgttatcggttatatactaaattgctcaacgaagcaactaggtggagctcagctattcagaatgtcaccgacacgaaggcacccatcgatactcccacccagcaactaatccaggatatcaaagagaactgcctgaatagcgatgtcgttgaacagatttataagaggaatccaatcctccgatatactcatcacccactacacagtccattgctgccactaccatacggggacatcaacttaaatctcttaaaagacaaggggtacacaacgctgcaagacgaggccatcaaaattttcaatagtcttcaacagttagaatcaatgtccgaccctattcctatcatccagggcatcctgcagactggccatgatctaaggcctctccgggatgaactatactgtcagctaattaagcagactaacaaagtgcctcacccaggctcagttgggaatctgtactcctggcagattctcacttgtctgagttgcacattcttgccaagtagaggcatcctgaagtacctcaagtttcatttaaagagaattcgagagcagttcccgggatcggagatggagaagtatgcgttgttcacatacgaatcacttaaaaagaccaagtgcagagagtttgttccgtcgcgggatgaaatcgaggccctcatccataggcaagagatgacttccaccgtttattgtcatgggggaggctcctgtaagataacaatcaattcacatactacagccggagaagtcgtcgagaaattgatcagggggctcgccatggaggatagtcggaacatgttcgccctgttcgagtataacggacatgtcgacaaggccatagaatcacgtaccgtcgtggcggatgtacttgccaaatttgaaaagctcgcagctaccagcgaggttggtgatttaccctggaagttttattttaaattgtattgttttctagatacagataacgtacccaaggactcagtcgagttcgcctttatgttcgaacaggcccatgaggctgtgattcatggccaccacccagcaccggaagaaaacttacaggttctggcggctctgaggctgcaatatctgcagggggattacactctgcatgcagctatccctcctctcgaagaagtttacagcctgcagcgtctcaaggcccgaatcagccagtccacgaaaaccttcaccccctgtgagagacttgagaagcggagaacttccttcctggaggggaccctgaggagatcttttcgcaccggctcggtcgtccggcagaaggtggaagaggagcagatgctagacatgtggatcaaagaggaggtcagctccgcaagggcgagcatcatagataaatggcgcaaattccaaggcatgaatcaggaacaggccatggccaagtacatggcacttataaaagaatggcccggatacggatccacgttgttcgacgtggaatgcaaagagggcggtttccctcaagaactatggttgggcgtttccgcagacgcagtgagtgtgtacaaacgaggagaagggagacctctcgaggtattccagtatgaacacatcctgagctttggagcccctctcgctaacacctataagatagtggtggacgagcgagagcttctcttcgagactagtgaggtcgtggatgttgctaagcttatgaaagcttacatcagcatgatagtcaagaagaggtattcaactacccggtccgcaagttcacaggggagttccaggtag

SEQ ID NO: 174076 - DNA, 6176 bp, Artificial Sequence
  derived and/or modified sequence
atggataacttttttacagaaggcacacgggtctggctccgagaaaacggacaacacttcccatccacggtgaacagctgtgcggaaggaatcgttgtcttcagaacagattacggacaagttttcacgtacaaacagtctaccatcacacatcagaaagtgaccgccatgcatcccacaaatgaagagggcgtggatgatatggcatctctgacggagctgcatggagggtcaatcatgtacaacctgttccagagatacaaacggaaccagatctatacatacatcggctcaatcctggccagcgtcaatccctaccaacccatcgctgggctctatgagcccgctacaatggagcagtactccaggcggcacctaggggaattgcctccgcatatctttgctatcgcaaatgaatgctatcggtgtttgtggaagcggcacgataaccagtgcatactgatatcaggcgagtctggcgcaggcaagacagaatccacgaaattaatcctcaaattcctgtccgtgatttctcagcagagcctggaactcagcttgaaagagaagaccagctgcgtggagcgtgccattctcgagagcagtcccatcatggaggcttttggcaatgctaagacagtttataataacaatagcagccgttttggaaaatttgtgcagcttaatatctgccagaagggcaacatccaggggggtcggattgttgactatctactggagaagaaccgcgtggtgagacagaacccgggagagcggaactaccacatcttttacgccctcctggctggcctagagcatgaggagagagaggaattctatttatccacccctgaaaactaccactaccttaaccagtccggatgcgtcgaggataaaactatcagtgaccaggagtcattccgtgaagttattactgcaatggatgtgatgcaattttccaaagaggaagtacgcgaggtcagccgtctgctagcaggcattttgcaccttggaaacatcgaattcatcactgccggaggggctcaggtcagcttcaaaaccgcgctgggcaggtccgcagagttgctggggcttgaccctacccagctgactgacgccctaactcagagatcaatgtttcttagaggagaggagattttgacaccattgaatgtgcagcaagccgtggatagccgcgactctctggccatggccctctacgcctgctgcttcgagtgggtcattaagaagattaattctcgcatcaaggggaacgaggactttaagtcaattggcattctcgacatctttgggttcgagaattttgaggtcaatcacttcgagcagtttaacattaattacgcaaacgagaaactgcaagagtacttcaacaaacacatcttttcccttgagcaactagagtacagtcgcgaaggcctggtttgggaagatatcgattggatcgacaacggcgagtgtctcgatcttattgagaaaaagctgggcctcctggccctgatcaacgaggaaagtcacttcccccaggccaccgactcgacacttcttgagaaactgcactcacaacacgcaaacaaccacttttacgtgaagccacgggtcgctgtgaataattttggcgtaaaacactacgcaggtgaagtacagtatgatgtgagggggatcctggaaaagaacagggacacctttagggacgacttgctgaacctgctcagagagtctaggtttgatttcatctacgacctgttcgaacacgtgtccagtagaaataatcaggacaccttgaaatgcgggtcaaagcatcggcgtccaacggtgagcagccaatttaaagactcattgcactctctcatggccacactttcctcatccaatccctttttcgtcagatgtatcaagccgaatatgcagaaaatgcctgaccagttcgatcaagctgttgttttgaaccagctaagatactccggaatgctcgagactgtgcgtattaggaaggccggttacgccgtccggagacccttccaggacttttataaacgatacaaggtgctgatgaggaatcttgctctccccgaggacgtccgaggaaaatgcacaagcctcttgcaattgtatgatgcctctaattccgaatggcagctcggtaagaccaaggttttcctccgggaaagtctcgagcagaaactagagaagcgcagggaggaagaagtgagtcacgctgctatggtgattagagctcacgttctcggattcctggcacgaaaacagtacagaaaggtgctatactgtgtggtaattatccagaagaattatcgggcttttctgctgcggagaaggttccttcacctgaaaaaggctgcgattgtcttccagaaacagcttcgaggtcagattgcaagaagagtctaccggcaactgctggccgaaaaaagagagcaagaagagaaaaaaaagcaggaggaggaagaaaagaaaaaacgggaggaggaagagcgagaaagggaacgggagaggagagaggctgaactccgggctcagcaagaggaagaaacgcgaaaacaacaagaactggaggctctccagaagtctcagaaggaggctgagcttaccagggagttggagaagcagaaagagaacaaacaggtggaggaaatcttaagactggaaaaggagatcgaggacctccagagaatgaaggagcagcaggagctgtctttaaccgaagctagtctgcaaaaactgcaggagagacgcgatcaggagcttaggcggcttgaggaggaagcatgtagggctgcgcaagaatttttggaatctctgaattttgacgagatcgatgaatgtgtgcggaatatcgaaaggtccctctcagtcgggtccgaattttcttcagaactagccgagagtgcttgcgaagaaaaaccgaatttcaatttttcccagccctacccagaggaggaggtggacgagggttttgaggcggacgacgacgcgttcaaagattctccaaatccttctgaacacggccattccgaccagcggacaagcgggatccgaacatcagacgactcctctgaggaggatccatacatgaacgatacagttgtccctactagcccatcagctgactctacggtcctcttggcgcctagcgtgcaggactctggctccctgcacaattcgagctccggcgaatctacctactgtatgccacaaaatgcaggcgatctgccctcccccgacggtgactacgactacgatcaggacgactatgaggatggcgctattacttctgggtcttcagtaactttctccaacagctacgggtcacagtggtcccccgactacagatgtagcgtgggcacatataacagcagcggagcgtaccgattttcctccgagggcgcacagtcttcgttcgaagattctgaagaggatttcgactctcgcttcgatactgacgacgagctctcttatcgacgtgatagtgtctatagctgcgtgacccttccatatttccactctttcctttatatgaaagggggacttatgaactcatggaagcgccgatggtgcgtactgaaggacgaaacatttctttggtttaggtcaaaacaggaggctctgaagcagggatggctccataagaaaggaggcggttcctccaccctctctaggagaaactggaaaaagaggtggttcgttttgaggcagtcaaagctgatgtacttcgaaaacgacagcgaagagaaactcaaaggcaccgtcgaggtacgcactgcaaaggaaatcatcgataatacgacaaaagagaacggcatcgatatcattatggccgatcgaactttccacctgatcgccgaaagtccagaggacgcatcacaatggttctcagtactgagtcaagtccacgcctccaccgatcaggaaatccaggagatgcacgatgaacaagccaatccgcaaaacgctgttggaaccttggatgtcggcctaattgactccgtgtgtgcctctgacagccctgatagacccaattcatttgtgatcatcacggcgaatcgagtgcttcactgcaacgctgacactcctgaggagatgcatcactggattacactgctccagaggtccaaaggtgatacgcgggtagaggggcaagaattcattgtgagaggctggttgcacaaggaagtaaagaactccccaaagatgtcaagcttaaaactaaaaaagcgctggttcgtgcttacacataattctctggattactataagtcatcggagaaaaacgccttaaagctcggcacactggtattgaacagcctttgcagtgtggtgcccccagacgagaagattttcaaggagactgggtactggaatgtcacagtgtacgggaggaagcactgctaccggctatacaccaaactgctgaacgaggccacacgatggtcatccgctatccagaacgtcaccgacaccaaggctccaatcgatacccccacccagcagttgatccaggacatcaaggaaaattgcctgaactcagatgtggtcgagcagatttacaagcggaatcctatactgagatacactcaccaccctcttcattctcctcttctgcccctgccatatggggatattaacctgaacctgctcaaagacaaaggctacaccacgttgcaagacgaggcaattaagatcttcaattcgctgcagcagctcgaatctatgagtgacccaataccaatcattcagggcatcttacaaaccgggcacgatcttcggcctctccgggacgagctttactgtcaactcatcaaacagaccaataaggtaccacacccagggagcgtcggtaacctgtattcgtggcagatcttgacgtgcctgagttgtacgttcttgcctagccgcggtattctgaagtatctgaaattccatctgaagagaatccgggaacagttcccaggcagcgagatggagaagtatgccctctttacctatgagtccttaaagaaaaccaaatgtcgggagtttgtgccttcccgggatgaaatcgaggctctcattcataggcaggaaatgaccagtactgtgtattgccacggtgggggatcttgtaaaattactatcaacagccataccactgcgggagaggtggtcgagaaactcatacgaggactggccatggaggacagtagaaatatgttcgcgttgtttgagtacaacgggcacgtcgataaagccattgaaagcaggaccgtcgtagcagatgtgctggcaaaattcgagaaattagctgccacttccgaagtgggtgacctaccatggaaattttatttcaagctgtactgttttcttgacactgataacgttcccaaagacagcgtcgaattcgccttcatgttcgagcaggcccatgaggcagttattcatggtcaccatcctgctcctgaagagaatctgcaggtgttagctgcactcagattgcagtatttgcagggtgactacaccttgcacgccgctatccctcccctcgaagaagtttactctctgcaaagactgaaagctaggattagccagagcaccaaaacgttcaccccctgcgaacgccttgagaagcgacgcacctcctttctggagggaacactccgtcgaagctttaggaccggctccgttgtgaggcagaaggtggaggaagagcaaatgctggatatgtggatcaaagaagaagtttcctcagccagagcttctatcatcgataaatggcgcaaatttcagggcatgaatcaggaacaagccatggccaaatatatggccctaattaaagaatggccgggttacggctccactctattcgatgtcgaatgcaaggaaggaggtttcccgcaggaactgtggcttggagtgtccgccgatgccgtgagcgtttacaaacggggtgagggaaggcccctagaggtgtttcaatacgaacacatcctgtcttttggagccccactggccaacacatacaagattgtggtggacgagagagagcttctgtttgaaacttcggaagttgtggatgtcgcaaagctaatgaaggcatatatctcaatgatcgtgaagaagcgatacagtactacccgctccgcatcatctcaggggagctcacggta

SEQ ID NO: 174077 - DNA, 4194 bp, Artificial Sequence
  derived and/or modified sequence
atgctcgagacagtgaggatcaggaaagccggatacgctgttaggaggccgtttcaggacttctataagaggtacaaagtgctgatgcgcaacctggccctccccgaggacgtcaggggaaagtgcactagccttcttcaactgtacgatgcctctaatagcgagtggcagctcggcaagaccaaggtgtttctgcgcgaatcccttgagcagaagttggagaaaaggagagaagaggaggttagtcacgctgccatggtgataagggctcatgtgcttggttttttggccaggaaacaataccgcaaggtgctatattgcgttgtcataatccagaagaattatcgggctttcctgctccggagacggtttctgcacctgaagaaggctgctattgtgttccagaaacaacttcggggacagattgcccgtagagtctaccgccagcttctcgccgaaaagcgggaacaagaagaaaagaaaaaacaggaggaggaagaaaagaagaaaagggaggaggaagaaagggaaagggaacgtgagcgcagggaggcagaactgagggctcagcaagaagaagagactcgcaaacagcaagagttggaggctctccaaaagagtcagaaggaggctgaactaacccgggaattggaaaagcagaaagagaacaagcaggtggaagagatactgcgtctggaaaaggaaattgaagacttgcaacgaatgaaagagcagcaggagcttagtctgacagaggccagcctacagaaacttcaggagcgcagagatcaggagcttaggcgcctcgaagaggaagcctgtcgagcagctcaggagttcctcgagtcactgaatttcgatgagatcgacgaatgtgttcgaaacatcgaacgaagtctctccgtaggctccgaattttcatcggagcttgccgaatccgcatgtgaagagaaacctaatttcaatttctcacagccttatccagaggaagaggtcgacgaaggcttcgaagcagacgatgacgcctttaaggactcccccaacccctcggaacatggccactccgaccaacgcacatctggcatcagaacctctgatgatagttccgaagaagacccgtacatgaacgacaccgtcgtacccaccagcccttctgcagattccaccgtgctgttggctccgtcagtgcaggacagtgggtccctccacaacagctcatccggcgaaagcacctactgcatgccgcagaatgcgggagacttgcccagccccgacggtgactacgattacgatcaggacgactatgaagatggggctataactagcggcagttctgtaacattctccaactcctacggaagtcagtggtcccctgactaccgttgtagcgtggggacgtacaacagctcaggcgcttatcggttcagctcggagggggctcagtcttcttttgaggatagtgaggaagactttgacagtaggttcgatactgatgatgagctgagttaccgcagagatagtgtttactcttgtgtaactttgccttacttccattctttcctgtatatgaaggggggactaatgaattcgtggaaacgcaggtggtgcgttctcaaggacgagacattcctctggttcagaagtaagcaggaggccctgaagcagggctggcttcacaagaagggtggcggttcatcgacgttgtctcggagaaattggaaaaaacgttggttcgtcctgcgccagtctaaacttatgtacttcgaaaacgattcagaggagaagctcaagggaaccgtggaggtgaggacagcgaaggagatcatagacaataccacaaaggagaatggaatcgacattatcatggctgacaggaccttccacttaattgctgagtcacctgaggacgcatcccaatggttttctgtcctctcccaggtgcatgctagcacagaccaagaaatccaggagatgcacgacgaacaagcgaaccctcagaatgccgtaggcacactcgatgtgggactcatagattcggtctgcgcctcagatagtcccgatcgccctaacagctttgtcatcattaccgcaaacagggtgctgcattgtaacgcggatacccctgaagaaatgcatcactggattacactcctgcagcgtagcaagggggacacaagggtggagggtcaggagtttattgtaaggggttggttacacaaagaggtaaaaaatagtcccaaaatgtcttctctcaaactgaaaaagcggtggttcgtactgactcacaatagcctggattactacaaatctagcgaaaagaacgccctcaaattgggaacgctcgtcctgaattccctgtgcagcgtggtccctccagatgaaaaaatctttaaggagacggggtattggaatgtcaccgtctacggaagaaagcactgctacaggttatacacaaagttgctgaatgaagctacgaggtggtcttccgccatccagaatgtgacggatactaaagcccctattgatacaccaactcaacagctcatccaggatataaaagagaattgccttaactctgacgtggtcgagcaaatctacaagagaaaccctatcctgcgttatacacatcatccactgcactctcctctgcttccactgccatacggcgacatcaacctgaacctccttaaggacaaaggctacactaccttgcaggacgaggctattaagatattcaatagcctgcagcagcttgagagtatgagtgaccctattccaattatccagggcattctccagacagggcacgacctccgcccattgcgggatgagttgtattgtcaactgattaagcagactaacaaggtccctcacccgggtagcgtggggaacctgtatagctggcagatcctgacatgtttgagttgtacatttttgccatctagaggaatacttaagtacctgaagtttcatttaaaaaggattagagagcagttccccggttctgagatggagaagtatgccctattcacatatgaaagtcttaagaaaaccaaatgcagagaatttgtcccaagcagggatgagatagaagctctgattcaccgtcaggaaatgacctcaactgtttattgtcacggtggaggcagttgtaagattactatcaatagccacacaactgcgggagaggtcgtggaaaaactgattcggggtttggcaatggaggacagccggaacatgttcgccctattcgaatataatgggcacgtcgataaggccatcgagtcccggacggtagtagcggatgtcctggccaaatttgaaaaattggcggctactagtgaagtcggagatctcccttggaaattctactttaaattgtactgctttctggacaccgataatgtgcctaaagattccgtggaattcgcatttatgtttgagcaagcccatgaggctgtaatccacggtcaccatcccgctccagaagaaaatctgcaagttctggctgccctgcgactgcagtatcttcagggagactacaccctgcatgctgccattcctccactggaagaagtttattccctgcagaggctgaaagctcggattagccaatctacaaaaacattcacaccttgtgagaggcttgagaaaagacgcactagcttcctggagggaacgctccggaggagcttccgtactgggtccgtggtccgacagaaggtcgaggaggagcaaatgctggacatgtggatcaaggaagaagtgtcttccgcaagggcaagtataatagacaaatggagaaaatttcagggaatgaatcaggagcaggctatggctaaatatatggccctcatcaaggaatggcctgggtatggatccacattgtttgatgtcgagtgtaaggagggaggatttccccaggaactgtggctcggggtaagcgccgacgccgtaagcgtgtacaagcgtggtgagggccgacctttggaggtcttccaatacgaacatattctcagtttcggtgctcctctggctaacacctataaaatagtcgttgatgagcgggaactgttattcgaaacaagtgaagttgttgacgtggctaagctaatgaaggcgtatatttccatgattgtgaagaaacgttactctaccacacgaagcgctagtagtcagggcagctctaggtag

SEQ ID NO: 174078 - DNA, 4248 bp, Artificial Sequence
  derived and/or modified sequence
atgcccgaccagttcgaccaggccgtggtgctgaaccagctgagatacagcggcatgctggagaccgtgagaatcagaaaggccggctacgccgtgagaagacccttccaggacttctacaagagatacaaggtgctgatgagaaacctggccctgcccgaggacgtgagaggcaagtgcaccagcctgctgcagctgtacgacgccagcaacagcgagtggcagctgggcaagaccaaggtgttcctgagagagagcctggagcagaagctggagaagagaagagaggaggaggtgagccacgccgccatggtgatcagagcccacgtgctgggcttcctggccagaaagcagtacagaaaggtgctgtactgcgtggtgatcatccagaagaactacagagccttcctgctgagaagaagattcctgcacctgaagaaggccgccatcgtgttccagaagcagctgagaggccagatcgccagaagagtgtacagacagctgctggccgagaagagagagcaggaggagaagaagaagcaggaggaggaggagaagaagaagagagaggaggaggagagagagagagagagagagagaagagaggccgagctgagagcccagcaggaggaggagaccagaaagcagcaggagctggaggccctgcagaagagccagaaggaggccgagctgaccagagagctggagaagcagaaggagaacaagcaggtggaggagatcctgagactggagaaggagatcgaggacctgcagagaatgaaggagcagcaggagctgagcctgaccgaggccagcctgcagaagctgcaggagagaagagaccaggagctgagaagactggaggaggaggcctgcagagccgcccaggagttcctggagagcctgaacttcgacgagatcgacgagtgcgtgagaaacatcgagagaagcctgagcgtgggcagcgagttcagcagcgagctggccgagagcgcctgcgaggagaagcccaacttcaacttcagccagccctaccccgaggaggaggtggacgagggcttcgaggccgacgacgacgccttcaaggacagccccaaccccagcgagcacggccacagcgaccagagaaccagcggcatcagaaccagcgacgacagcagcgaggaggacccctacatgaacgacaccgtggtgcccaccagccccagcgccgacagcaccgtgctgctggcccccagcgtgcaggacagcggcagcctgcacaacagcagcagcggcgagagcacctactgcatgccccagaacgccggcgacctgcccagccccgacggcgactacgactacgaccaggacgactacgaggacggcgccatcaccagcggcagcagcgtgaccttcagcaacagctacggcagccagtggagccccgactacagatgcagcgtgggcacctacaacagcagcggcgcctacagattcagcagcgagggcgcccagagcagcttcgaggacagcgaggaggacttcgacagcagattcgacaccgacgacgagctgagctacagaagagacagcgtgtacagctgcgtgaccctgccctacttccacagcttcctgtacatgaagggcggcctgatgaacagctggaagagaagatggtgcgtgctgaaggacgagaccttcctgtggttcagaagcaagcaggaggccctgaagcagggctggctgcacaagaagggcggcggcagcagcaccctgagcagaagaaactggaagaagagatggttcgtgctgagacagagcaagctgatgtacttcgagaacgacagcgaggagaagctgaagggcaccgtggaggtgagaaccgccaaggagatcatcgacaacaccaccaaggagaacggcatcgacatcatcatggccgacagaaccttccacctgatcgccgagagccccgaggacgccagccagtggttcagcgtgctgagccaggtgcacgccagcaccgaccaggagatccaggagatgcacgacgagcaggccaacccccagaacgccgtgggcaccctggacgtgggcctgatcgacagcgtgtgcgccagcgacagccccgacagacccaacagcttcgtgatcatcaccgccaacagagtgctgcactgcaacgccgacacccccgaggagatgcaccactggatcaccctgctgcagagaagcaagggcgacaccagagtggagggccaggagttcatcgtgagaggctggctgcacaaggaggtgaagaacagccccaagatgagcagcctgaagctgaagaagagatggttcgtgctgacccacaacagcctggactactacaagagcagcgagaagaacgccctgaagctgggcaccctggtgctgaacagcctgtgcagcgtggtgccccccgacgagaagatcttcaaggagaccggctactggaacgtgaccgtgtacggcagaaagcactgctacagactgtacaccaagctgctgaacgaggccaccagatggagcagcgccatccagaacgtgaccgacaccaaggcccccatcgacacccccacccagcagctgatccaggacatcaaggagaactgcctgaacagcgacgtggtggagcagatctacaagagaaaccccatcctgagatacacccaccaccccctgcacagccccctgctgcccctgccctacggcgacatcaacctgaacctgctgaaggacaagggctacaccaccctgcaggacgaggccatcaagatcttcaacagcctgcagcagctggagagcatgagcgaccccatccccatcatccagggcatcctgcagaccggccacgacctgagacccctgagagacgagctgtactgccagctgatcaagcagaccaacaaggtgccccaccccggcagcgtgggcaacctgtacagctggcagatcctgacctgcctgagctgcaccttcctgcccagcagaggcatcctgaagtacctgaagttccacctgaagagaatcagagagcagttccccggcagcgagatggagaagtacgccctgttcacctacgagagcctgaagaagaccaagtgcagagagttcgtgcccagcagagacgagatcgaggccctgatccacagacaggagatgaccagcaccgtgtactgccacggcggcggcagctgcaagatcaccatcaacagccacaccaccgccggcgaggtggtggagaagctgatcagaggcctggccatggaggacagcagaaacatgttcgccctgttcgagtacaacggccacgtggacaaggccatcgagagcagaaccgtggtggccgacgtgctggccaagttcgagaagctggccgccaccagcgaggtgggcgacctgccctggaagttctacttcaagctgtactgcttcctggacaccgacaacgtgcccaaggacagcgtggagttcgccttcatgttcgagcaggcccacgaggccgtgatccacggccaccaccccgcccccgaggagaacctgcaggtgctggccgccctgagactgcagtacctgcagggcgactacaccctgcacgccgccatcccccccctggaggaggtgtacagcctgcagagactgaaggccagaatcagccagagcaccaagaccttcaccccctgcgagagactggagaagagaagaaccagcttcctggagggcaccctgagaagaagcttcagaaccggcagcgtggtgagacagaaggtggaggaggagcagatgctggacatgtggatcaaggaggaggtgagcagcgccagagccagcatcatcgacaagtggagaaagttccagggcatgaaccaggagcaggccatggccaagtacatggccctgatcaaggagtggcccggctacggcagcaccctgttcgacgtggagtgcaaggagggcggcttcccccaggagctgtggctgggcgtgagcgccgacgccgtgagcgtgtacaagagaggcgagggcagacccctggaggtgttccagtacgagcacatcctgagcttcggcgcccccctggccaacacctacaagatcgtggtggacgagagagagctgctgttcgagaccagcgaggtggtggacgtggccaagctgatgaaggcctacatcagcatgatcgtgaagaagagatacagcaccaccagaagcgccagcagccagggcagcagcagatag

SEQ ID NO: 174079 - DNA, 4194 bp, Artificial Sequence
  derived and/or modified sequence
atgctggagaccgtgagaatcagaaaggccggctacgccgtgagaagacccttccaggacttctacaagagatacaaggtgctgatgagaaacctggccctgcccgaggacgtgagaggcaagtgcaccagcctgctgcagctgtacgacgccagcaacagcgagtggcagctgggcaagaccaaggtgttcctgagagagagcctggagcagaagctggagaagagaagagaggaggaggtgagccacgccgccatggtgatcagagcccacgtgctgggcttcctggccagaaagcagtacagaaaggtgctgtactgcgtggtgatcatccagaagaactacagagccttcctgctgagaagaagattcctgcacctgaagaaggccgccatcgtgttccagaagcagctgagaggccagatcgccagaagagtgtacagacagctgctggccgagaagagagagcaggaggagaagaagaagcaggaggaggaggagaagaagaagagagaggaggaggagagagagagagagagagagagaagagaggccgagctgagagcccagcaggaggaggagaccagaaagcagcaggagctggaggccctgcagaagagccagaaggaggccgagctgaccagagagctggagaagcagaaggagaacaagcaggtggaggagatcctgagactggagaaggagatcgaggacctgcagagaatgaaggagcagcaggagctgagcctgaccgaggccagcctgcagaagctgcaggagagaagagaccaggagctgagaagactggaggaggaggcctgcagagccgcccaggagttcctggagagcctgaacttcgacgagatcgacgagtgcgtgagaaacatcgagagaagcctgagcgtgggcagcgagttcagcagcgagctggccgagagcgcctgcgaggagaagcccaacttcaacttcagccagccctaccccgaggaggaggtggacgagggcttcgaggccgacgacgacgccttcaaggacagccccaaccccagcgagcacggccacagcgaccagagaaccagcggcatcagaaccagcgacgacagcagcgaggaggacccctacatgaacgacaccgtggtgcccaccagccccagcgccgacagcaccgtgctgctggcccccagcgtgcaggacagcggcagcctgcacaacagcagcagcggcgagagcacctactgcatgccccagaacgccggcgacctgcccagccccgacggcgactacgactacgaccaggacgactacgaggacggcgccatcaccagcggcagcagcgtgaccttcagcaacagctacggcagccagtggagccccgactacagatgcagcgtgggcacctacaacagcagcggcgcctacagattcagcagcgagggcgcccagagcagcttcgaggacagcgaggaggacttcgacagcagattcgacaccgacgacgagctgagctacagaagagacagcgtgtacagctgcgtgaccctgccctacttccacagcttcctgtacatgaagggcggcctgatgaacagctggaagagaagatggtgcgtgctgaaggacgagaccttcctgtggttcagaagcaagcaggaggccctgaagcagggctggctgcacaagaagggcggcggcagcagcaccctgagcagaagaaactggaagaagagatggttcgtgctgagacagagcaagctgatgtacttcgagaacgacagcgaggagaagctgaagggcaccgtggaggtgagaaccgccaaggagatcatcgacaacaccaccaaggagaacggcatcgacatcatcatggccgacagaaccttccacctgatcgccgagagccccgaggacgccagccagtggttcagcgtgctgagccaggtgcacgccagcaccgaccaggagatccaggagatgcacgacgagcaggccaacccccagaacgccgtgggcaccctggacgtgggcctgatcgacagcgtgtgcgccagcgacagccccgacagacccaacagcttcgtgatcatcaccgccaacagagtgctgcactgcaacgccgacacccccgaggagatgcaccactggatcaccctgctgcagagaagcaagggcgacaccagagtggagggccaggagttcatcgtgagaggctggctgcacaaggaggtgaagaacagccccaagatgagcagcctgaagctgaagaagagatggttcgtgctgacccacaacagcctggactactacaagagcagcgagaagaacgccctgaagctgggcaccctggtgctgaacagcctgtgcagcgtggtgccccccgacgagaagatcttcaaggagaccggctactggaacgtgaccgtgtacggcagaaagcactgctacagactgtacaccaagctgctgaacgaggccaccagatggagcagcgccatccagaacgtgaccgacaccaaggcccccatcgacacccccacccagcagctgatccaggacatcaaggagaactgcctgaacagcgacgtggtggagcagatctacaagagaaaccccatcctgagatacacccaccaccccctgcacagccccctgctgcccctgccctacggcgacatcaacctgaacctgctgaaggacaagggctacaccaccctgcaggacgaggccatcaagatcttcaacagcctgcagcagctggagagcatgagcgaccccatccccatcatccagggcatcctgcagaccggccacgacctgagacccctgagagacgagctgtactgccagctgatcaagcagaccaacaaggtgccccaccccggcagcgtgggcaacctgtacagctggcagatcctgacctgcctgagctgcaccttcctgcccagcagaggcatcctgaagtacctgaagttccacctgaagagaatcagagagcagttccccggcagcgagatggagaagtacgccctgttcacctacgagagcctgaagaagaccaagtgcagagagttcgtgcccagcagagacgagatcgaggccctgatccacagacaggagatgaccagcaccgtgtactgccacggcggcggcagctgcaagatcaccatcaacagccacaccaccgccggcgaggtggtggagaagctgatcagaggcctggccatggaggacagcagaaacatgttcgccctgttcgagtacaacggccacgtggacaaggccatcgagagcagaaccgtggtggccgacgtgctggccaagttcgagaagctggccgccaccagcgaggtgggcgacctgccctggaagttctacttcaagctgtactgcttcctggacaccgacaacgtgcccaaggacagcgtggagttcgccttcatgttcgagcaggcccacgaggccgtgatccacggccaccaccccgcccccgaggagaacctgcaggtgctggccgccctgagactgcagtacctgcagggcgactacaccctgcacgccgccatcccccccctggaggaggtgtacagcctgcagagactgaaggccagaatcagccagagcaccaagaccttcaccccctgcgagagactggagaagagaagaaccagcttcctggagggcaccctgagaagaagcttcagaaccggcagcgtggtgagacagaaggtggaggaggagcagatgctggacatgtggatcaaggaggaggtgagcagcgccagagccagcatcatcgacaagtggagaaagttccagggcatgaaccaggagcaggccatggccaagtacatggccctgatcaaggagtggcccggctacggcagcaccctgttcgacgtggagtgcaaggagggcggcttcccccaggagctgtggctgggcgtgagcgccgacgccgtgagcgtgtacaagagaggcgagggcagacccctggaggtgttccagtacgagcacatcctgagcttcggcgcccccctggccaacacctacaagatcgtggtggacgagagagagctgctgttcgagaccagcgaggtggtggacgtggccaagctgatgaaggcctacatcagcatgatcgtgaagaagagatacagcaccaccagaagcgccagcagccagggcagcagcagatag

SEQ ID NO: 174080 - DNA, 6177 bp, Artificial Sequence
  derived and/or modified sequence
atggacaacttcttcaccgagggcaccagagtgtggctgagagagaacggccagcacttccccagcaccgtgaacagctgcgccgagggcatcgtggtgttcagaaccgactacggccaggtgttcacctacaagcagagcaccatcacccaccagaaggtgaccgccatgcaccccaccaacgaggagggcgtggacgacatggccagcctgaccgagctgcacggcggcagcatcatgtacaacctgttccagagatacaagagaaaccagatctacacctacatcggcagcatcctggccagcgtgaacccctaccagcccatcgccggcctgtacgagcccgccaccatggagcagtacagcagaagacacctgggcgagctgcccccccacatcttcgccatcgccaacgagtgctacagatgcctgtggaagagacacgacaaccagtgcatcctgatcagcggcgagagcggcgccggcaagaccgagagcaccaagctgatcctgaagttcctgagcgtgatcagccagcagagcctggagctgagcctgaaggagaagaccagctgcgtggagagagccatcctggagagcagccccatcatggaggccttcggcaacgccaagaccgtgtacaacaacaacagcagcagattcggcaagttcgtgcagctgaacatctgccagaagggcaacatccagggcggcagaatcgtggactacctgctggagaagaacagagtggtgagacagaaccccggcgagagaaactaccacatcttctacgccctgctggccggcctggagcacgaggagagagaggagttctacctgagcacccccgagaactaccactacctgaaccagagcggctgcgtggaggacaagaccatcagcgaccaggagagcttcagagaggtgatcaccgccatggacgtgatgcagttcagcaaggaggaggtgagagaggtgagcagactgctggccggcatcctgcacctgggcaacatcgagttcatcaccgccggcggcgcccaggtgagcttcaagaccgccctgggcagaagcgccgagctgctgggcctggaccccacccagctgaccgacgccctgacccagagaagcatgttcctgagaggcgaggagatcctgacccccctgaacgtgcagcaggccgtggacagcagagacagcctggccatggccctgtacgcctgctgcttcgagtgggtgatcaagaagatcaacagcagaatcaagggcaacgaggacttcaagagcatcggcatcctggacatcttcggcttcgagaacttcgaggtgaaccacttcgagcagttcaacatcaactacgccaacgagaagctgcaggagtacttcaacaagcacatcttcagcctggagcagctggagtacagcagagagggcctggtgtgggaggacatcgactggatcgacaacggcgagtgcctggacctgatcgagaagaagctgggcctgctggccctgatcaacgaggagagccacttcccccaggccaccgacagcaccctgctggagaagctgcacagccagcacgccaacaaccacttctacgtgaagcccagagtggccgtgaacaacttcggcgtgaagcactacgccggcgaggtgcagtacgacgtgagaggcatcctggagaagaacagagacaccttcagagacgacctgctgaacctgctgagagagagcagattcgacttcatctacgacctgttcgagcacgtgagcagcagaaacaaccaggacaccctgaagtgcggcagcaagcacagaagacccaccgtgagcagccagttcaaggacagcctgcacagcctgatggccaccctgagcagcagcaaccccttcttcgtgagatgcatcaagcccaacatgcagaagatgcccgaccagttcgaccaggccgtggtgctgaaccagctgagatacagcggcatgctggagaccgtgagaatcagaaaggccggctacgccgtgagaagacccttccaggacttctacaagagatacaaggtgctgatgagaaacctggccctgcccgaggacgtgagaggcaagtgcaccagcctgctgcagctgtacgacgccagcaacagcgagtggcagctgggcaagaccaaggtgttcctgagagagagcctggagcagaagctggagaagagaagagaggaggaggtgagccacgccgccatggtgatcagagcccacgtgctgggcttcctggccagaaagcagtacagaaaggtgctgtactgcgtggtgatcatccagaagaactacagagccttcctgctgagaagaagattcctgcacctgaagaaggccgccatcgtgttccagaagcagctgagaggccagatcgccagaagagtgtacagacagctgctggccgagaagagagagcaggaggagaagaagaagcaggaggaggaggagaagaagaagagagaggaggaggagagagagagagagagagagagaagagaggccgagctgagagcccagcaggaggaggagaccagaaagcagcaggagctggaggccctgcagaagagccagaaggaggccgagctgaccagagagctggagaagcagaaggagaacaagcaggtggaggagatcctgagactggagaaggagatcgaggacctgcagagaatgaaggagcagcaggagctgagcctgaccgaggccagcctgcagaagctgcaggagagaagagaccaggagctgagaagactggaggaggaggcctgcagagccgcccaggagttcctggagagcctgaacttcgacgagatcgacgagtgcgtgagaaacatcgagagaagcctgagcgtgggcagcgagttcagcagcgagctggccgagagcgcctgcgaggagaagcccaacttcaacttcagccagccctaccccgaggaggaggtggacgagggcttcgaggccgacgacgacgccttcaaggacagccccaaccccagcgagcacggccacagcgaccagagaaccagcggcatcagaaccagcgacgacagcagcgaggaggacccctacatgaacgacaccgtggtgcccaccagccccagcgccgacagcaccgtgctgctggcccccagcgtgcaggacagcggcagcctgcacaacagcagcagcggcgagagcacctactgcatgccccagaacgccggcgacctgcccagccccgacggcgactacgactacgaccaggacgactacgaggacggcgccatcaccagcggcagcagcgtgaccttcagcaacagctacggcagccagtggagccccgactacagatgcagcgtgggcacctacaacagcagcggcgcctacagattcagcagcgagggcgcccagagcagcttcgaggacagcgaggaggacttcgacagcagattcgacaccgacgacgagctgagctacagaagagacagcgtgtacagctgcgtgaccctgccctacttccacagcttcctgtacatgaagggcggcctgatgaacagctggaagagaagatggtgcgtgctgaaggacgagaccttcctgtggttcagaagcaagcaggaggccctgaagcagggctggctgcacaagaagggcggcggcagcagcaccctgagcagaagaaactggaagaagagatggttcgtgctgagacagagcaagctgatgtacttcgagaacgacagcgaggagaagctgaagggcaccgtggaggtgagaaccgccaaggagatcatcgacaacaccaccaaggagaacggcatcgacatcatcatggccgacagaaccttccacctgatcgccgagagccccgaggacgccagccagtggttcagcgtgctgagccaggtgcacgccagcaccgaccaggagatccaggagatgcacgacgagcaggccaacccccagaacgccgtgggcaccctggacgtgggcctgatcgacagcgtgtgcgccagcgacagccccgacagacccaacagcttcgtgatcatcaccgccaacagagtgctgcactgcaacgccgacacccccgaggagatgcaccactggatcaccctgctgcagagaagcaagggcgacaccagagtggagggccaggagttcatcgtgagaggctggctgcacaaggaggtgaagaacagccccaagatgagcagcctgaagctgaagaagagatggttcgtgctgacccacaacagcctggactactacaagagcagcgagaagaacgccctgaagctgggcaccctggtgctgaacagcctgtgcagcgtggtgccccccgacgagaagatcttcaaggagaccggctactggaacgtgaccgtgtacggcagaaagcactgctacagactgtacaccaagctgctgaacgaggccaccagatggagcagcgccatccagaacgtgaccgacaccaaggcccccatcgacacccccacccagcagctgatccaggacatcaaggagaactgcctgaacagcgacgtggtggagcagatctacaagagaaaccccatcctgagatacacccaccaccccctgcacagccccctgctgcccctgccctacggcgacatcaacctgaacctgctgaaggacaagggctacaccaccctgcaggacgaggccatcaagatcttcaacagcctgcagcagctggagagcatgagcgaccccatccccatcatccagggcatcctgcagaccggccacgacctgagacccctgagagacgagctgtactgccagctgatcaagcagaccaacaaggtgccccaccccggcagcgtgggcaacctgtacagctggcagatcctgacctgcctgagctgcaccttcctgcccagcagaggcatcctgaagtacctgaagttccacctgaagagaatcagagagcagttccccggcagcgagatggagaagtacgccctgttcacctacgagagcctgaagaagaccaagtgcagagagttcgtgcccagcagagacgagatcgaggccctgatccacagacaggagatgaccagcaccgtgtactgccacggcggcggcagctgcaagatcaccatcaacagccacaccaccgccggcgaggtggtggagaagctgatcagaggcctggccatggaggacagcagaaacatgttcgccctgttcgagtacaacggccacgtggacaaggccatcgagagcagaaccgtggtggccgacgtgctggccaagttcgagaagctggccgccaccagcgaggtgggcgacctgccctggaagttctacttcaagctgtactgcttcctggacaccgacaacgtgcccaaggacagcgtggagttcgccttcatgttcgagcaggcccacgaggccgtgatccacggccaccaccccgcccccgaggagaacctgcaggtgctggccgccctgagactgcagtacctgcagggcgactacaccctgcacgccgccatcccccccctggaggaggtgtacagcctgcagagactgaaggccagaatcagccagagcaccaagaccttcaccccctgcgagagactggagaagagaagaaccagcttcctggagggcaccctgagaagaagcttcagaaccggcagcgtggtgagacagaaggtggaggaggagcagatgctggacatgtggatcaaggaggaggtgagcagcgccagagccagcatcatcgacaagtggagaaagttccagggcatgaaccaggagcaggccatggccaagtacatggccctgatcaaggagtggcccggctacggcagcaccctgttcgacgtggagtgcaaggagggcggcttcccccaggagctgtggctgggcgtgagcgccgacgccgtgagcgtgtacaagagaggcgagggcagacccctggaggtgttccagtacgagcacatcctgagcttcggcgcccccctggccaacacctacaagatcgtggtggacgagagagagctgctgttcgagaccagcgaggtggtggacgtggccaagctgatgaaggcctacatcagcatgatcgtgaagaagagatacagcaccaccagaagcgccagcagccagggcagcagcagatag

SEQ ID NO: 174081 - protein, 1103 aa, Artificial Sequence
  derived and/or modified sequence
GTKAGSPVNGQKQGHAQATPKIPLNLHLHHDPFRSLQEPRHQPPTMGSKERFHWQSHNVKQSGVDDMVLLPQITEDAIAANLRKRFMDDYIFTYIGSVLISVNPFKQMPYFTDREIDLYQGAAQYENPPHIYALTDNMYRNMLIDCENQCVIISGESGAGKTVAAKYIMGYISKVSGGGEKVQHVKDIILQSNPLLEAFGNAKTVRNNNSSRFGKYFEIQFSRGGEPDGGKISNFLLEKSRVVMQNENERNFHIYYQLLEGASQEQRQNLGLMTPDYYYYLNQSDTYQVDGTDDRSDFGETLSAMQVIGIPPSIQQLVLQLVAGILHLGNISFCEDGNYARVESVDLLAFPAYLLGIDSGRLQEKLTSRKMDSRWGGRSESINVTLNVEQAAYTRDALAKGLYARLFDFLVEAINRAMQKPQEEYSIGVLDIYGFEIFQKNGFEQFCINFVNEKLQQIFIELTLKAEQEEYVQEGIRWTPIQYFNNKVVCDLIENKLSPPGIMSVLDDVCATMHATGGGADQTLLQKLQAAVGTHEHFNSWSAGFVIHHYAGKVSYDVSGFCERNRDVLFSDLIELMQTSEQAFLRMLFPEKLDGDKKGRPSTAGSKIKKQANDLVATLMRCTPHYIRCIKPNETKRPRDWEENRVKHQVEYLGLKENIRVRRAGFAYRRQFAKFLQRYAILTPETWPRWRGDERQGVQHLLRAVNMEPDQYQMGSTKVFVKNPESLFLLEEVRERKFDGFARTIQKAWRRHVAVRKYEEMREEASNILLNKKERRRNSINRNFVGDYLGLEERPELRQFLGKRERVDFADSVTKYDRRFKPIKRDLILTPKCVYVIGREKVKKGPEKGQVCEVLKKKVDIQALRGVSLSTRQDDFFILQEDAADSFLESVFKTEFVSLLCKRFEEATRRPLPLTFSDTLQFRVKKEGWGGGGTRSVTFSRGFGDLAVLKVGGRTLTVSVGDGLPKSSKPTRKGMAKGKPRRSSQAPTRAAPAPPRGMDRNGVPPSARGGPLPGDHVWRGHPQASPGLRPHPWEPADDPGHVRPQSTTQNSSTCLTRAWPACRGSAAWGNGQCLVWADPSPSLGHMVPGAGPYTSTWAKMWTS

SEQ ID NO: 174082 - protein, 1098 aa, Artificial Sequence
  derived and/or modified sequence
MGSKERFHWQSHNVKQSGVDDMVLLPQITEDAIAANLRKRFMDDYIFTYIGSVLISVNPFKQMPYFTDREIDLYQGAAQYENPPHIYALTDNMYRNMLIDCENQCVIISGESGAGKTVAAKYIMGYISKVSGGGEKVQHVKDIILQSNPLLEAFGNAKTVRNNNSSRFGKYFEIQFSRGGEPDGGKISNFLLEKSRVVMQNENERNFHIYYQLLEGASQEQRQNLGLMTPDYYYYLNQSDTYQVDGTDDRSDFGETLSAMQVIGIPPSIQQLVLQLVAGILHLGNISFCEDGNYARVESVDLLAFPAYLLGIDSGRLQEKLTSRKMDSRWGGRSESINVTLNVEQAAYTRDALAKGLYARLFDFLVEAINRAMQKPQEEYSIGVLDIYGFEIFQKNGFEQFCINFVNEKLQQIFIELTLKAEQEEYVQEGIRWTPIQYFNNKVVCDLIENKLSPPGIMSVLDDVCATMHATGGGADQTLLQKLQAAVGTHEHFNSWSAGFVIHHYAGKVSYDVSGFCERNRDVLFSDLIELMQTSEQAFLRMLFPEKLDGDKKGRPSTAGSKIKKQANDLVATLMRCTPHYIRCIKPNETKRPRDWEENRVKHQVEYLGLKENIRVRRAGFAYRRQFAKFLQRYAILTPETWPRWRGDERQGVQHLLRAVNMEPDQYQMGSTKVFVKNPESLFLLEEVRERKFDGFARTIQKAWRRHVAVRKYEEMREEASNILLNKKERRRNSINRNFVGDYLGLEERPELRQFLGKRERVDFADSVTKYDRRFKPIKRDLILTPKCVYVIGREKVKKGPEKGQVCEVLKKKVDIQALRGVSLSTRQDDFFILQEDAADSFLESVFKTEFVSLLCKRFEEATRRPLPLTFSDTLQFRVKKEGWGGGGTRSVTFSRGFGDLAVLKVGGRTLTVSVGDGLPKSSKPTRKGMAKGKPRRSSQAPTRAAPAPPRGMDRNGVPPSARGGPLPLEIMSGGGTHRPPRGPPSTSLGASRRPRARPPSEHNTEFLNVPDQGMAGMQRKRSVGQRPVPGVGRPKPQPRTHGPRCRALYQYVGQDVDELSFNVNEVIEILMEDPSGWWKGRLHGQEGLFPGNYVEKI

SEQ ID NO: 174083 - DNA, 3312 bp, Artificial Sequence
  derived and/or modified sequence
ggcacaaaagccgggtctcccgtcaatggccagaagcagggccacgctcaggccacccccaaaatccccctaaacctgcatctccaccacgaccccttccgtagtctacaggaacccagacatcagcctccgaccatgggatccaaggagagatttcattggcagagccacaatgtgaagcagtctggggtggatgacatggtgcttctcccccagattaccgaagacgccattgcggccaaccttaggaagcgctttatggacgactatatttttacttatatcgggtcagtcctgatcagcgtgaatcccttcaagcaaatgccatacttcactgatcgagaaatagacctgtaccagggggccgcccaatacgagaatccgccccatatttatgcactgacagataacatgtacagaaacatgctgatagattgtgagaaccagtgcgtaatcataagtggcgagtcaggcgctggaaagacagtcgcagccaagtacatcatggggtacatcagcaaggtaagtggtggcggtgagaaagttcaacatgtgaaggatatcatcctgcagtctaatccattgctcgaagcgttcgggaacgcaaaaactgtcaggaataacaacagctcccgcttcggcaaatacttcgaaatccagtttagcagaggaggagaacctgacggagggaaaatttcaaacttcctattggaaaagtcaagagtggtgatgcaaaacgagaatgagcggaactttcacatttactatcaactgctggaaggggcatcgcaagaacagcgccaaaacctgggacttatgacgcccgactactattattatctcaaccagagcgacacatatcaggttgacggcaccgacgacagatccgacttcggggagacgctgtccgctatgcaggtgataggaatccccccaagcatccagcagctggtactgcaacttgtggctggtatactacatttaggcaacatttcattctgtgaggacggcaattatgctcgggtcgaatccgtagacctgctcgccttcccagcctaccttttgggcattgactctggacgattacaggagaaacttactagcaggaagatggactccagatggggcgggaggtcagagtcaataaacgtgaccctgaatgtcgagcaggcggcctatacgagagatgcactggctaaagggctgtatgcccgccttttcgatttcctggtcgaagcgatcaatagagccatgcagaaaccacaggaagaatattccataggtgtcctagatatatacgggtttgagatctttcagaaaaatggatttgagcaattttgtatcaacttcgtcaatgaaaagcttcagcagatcttcatcgagctgacacttaaggccgaacaagaggagtacgttcaggaaggaataaggtggaccccgatccagtatttcaataacaaggtagtttgtgatctgattgagaataaactgagtcccccaggcatcatgtccgttttggatgatgtgtgtgccaccatgcacgctacaggcggaggggcagatcagaccttgttgcaaaaactgcaggcagcagtgggcacccatgaacactttaattcatggagtgcaggattcgtcatccaccactacgctggtaaggtgtcctacgatgtttctggcttctgtgagagaaacagagacgtgctcttcagcgacttgatagagctgatgcaaacaagtgaacaggcattcctccggatgctgttccctgaaaagctcgacggggataagaaaggaaggccgtccacggcgggctccaagattaaaaaacaggctaacgacctcgtggccaccttgatgcggtgtacacctcattacattcggtgcattaaaccaaatgaaactaagagacccagggactgggaggagaacagggtcaagcatcaggtagagtacctgggtttgaaagagaatatccgcgtgaggagagcaggcttcgcttatcggcggcagtttgccaagttcctgcagaggtacgcgatactgaccccggagacatggcctaggtggagaggcgatgagaggcagggcgtccaacacctgctgagggctgtgaatatggagccagatcaatatcagatggggagtacaaaggtgttcgtgaaaaaccctgagtctctgtttctactcgaagaggtccgcgagcggaaattcgatgggttcgccagaacaatccagaaggcctggcggaggcatgtagcggtgcggaagtatgaggagatgagggaagaggcttcgaacatccttctgaacaaaaaggaaaggcgccgaaactcaatcaataggaactttgtaggagattacctgggattggaagagcgccccgaactccgacaatttctggggaaacgagaaagagtcgattttgcagacagtgtcacgaaatacgaccgtagattcaagccgatcaagagggatctaattctcacacctaagtgtgtttacgtgatcggccgcgagaaggttaaaaaggggccagaaaagggtcaggtgtgcgaagtactgaagaagaaagtcgacatccaggctttgcgtggcgtgtcactcagtacacggcaggacgactttttcatactgcaggaagatgcagccgacagcttcctggagtctgttttcaagaccgaatttgtgtccctgctatgcaaacgattcgaagaggccacccgaaggcccctgccactgacattcagcgacacactccagttccgagttaaaaaggaagggtgggggggcggcggaactcggtctgtgactttttcaaggggcttcggtgacttagccgtcctcaaagtgggaggaagaaccctgacagttagcgtcggcgacgggctgcctaagagcagtaaacctacccggaaaggaatggcgaaggggaagcccagacgctcaagccaggctccgacgagagccgctccagcgcctccgcgcgggatggaccggaacggtgtgcccccgtctgctaggggtggtcctctaccaggcgaccacgtgtggcgtggccatccacaggctagccctggattaaggcctcatccctgggagccagctgacgacccaggtcacgtgaggccacagagtacaacccaaaattcctctacctgtctgacacgtgcttggcccgcctgcaggggatcagcagcatggggaaacggtcaatgtcttgtgtgggccgatcccagtccctctttaggccacatggtccccggggccggcccttacacaagcacctgggcaaaaatgtggacgagctag

SEQ ID NO: 174084 - DNA, 3297 bp, Artificial Sequence
  derived and/or modified sequence
atgggcagcaaggaacgtttccactggcaaagccataacgttaaacaaagcggcgtggatgacatggtactcttaccacaaatcactgaggatgctattgccgcaaatttgagaaagagattcatggacgattacatttttacctatatcggcagcgtgcttatttccgtcaatccgttcaagcaaatgccatattttacagatagggaaattgatctctaccagggggccgcccaatacgaaaacccaccacacatctacgcattaaccgataacatgtaccgcaacatgctcatagattgtgagaatcaatgtgtcattatctccggcgagtcaggggctgggaaaacagttgccgcaaagtatatcatgggatatattagtaaggtgtcaggaggcggggaaaaagtccagcacgtgaaggatataattctacagtctaatcctctattagaagcctttgggaacgccaaaacagtgagaaacaataactcaagcaggttcggaaaatatttcgaaatccaatttagccgaggaggcgagcctgatggtggcaagataagtaattttctcctcgaaaagtcgcgcgtggtgatgcagaacgagaacgagaggaactttcatatctattaccagctcctggagggagcgagccaggagcaacggcagaacctaggtctcatgactcctgattattactattacctgaaccagagtgatacctaccaggtggatgggactgacgatcggagcgatttcggagagactctttccgctatgcaggttattgggatcccgccatctatccaacagttggtgctgcagctggttgccggaattttacatttgggcaatataagcttctgtgaggatgggaattacgcaagagtggagtctgtcgacctcctagccttcccagcatatttactgggcatcgactccggaaggttgcaagagaaacttacctcgcgcaagatggatagcaggtggggcgggcgttcggagagcattaacgttacccttaacgtagagcaggccgcttacacacgggacgctctcgctaaagggttgtatgcccgactcttcgatttcctagtggaggctatcaatcgagcaatgcagaaaccccaggaggagtattccattggagttttggacatctacggtttcgagatttttcagaagaacggattcgaacaattttgtatcaattttgtcaatgaaaaactccagcagattttcatcgagctcacacttaaagccgaacaggaggaatatgtgcaagagggaatcagatggacaccaatccagtattttaataataaagtagtttgtgacttgatcgaaaataaattatctcctcctggcataatgtcagtactggacgatgtgtgtgcaacaatgcatgccaccgggggcggagccgatcagaccctccttcaaaaactgcaggccgcggtgggcacacatgagcatttcaatagctggtctgccggctttgtgatccaccattacgctggtaaagtgtcgtatgatgtgagcggcttctgcgagagaaatcgcgatgtattgttctctgacctcatagaacttatgcagactagcgagcaggcgtttctgcggatgctctttccagagaagctagacggggataaaaaggggcgcccttctactgcgggcagtaaaattaagaaacaggccaatgacttggtcgcgacactgatgagatgcacaccccattacattagatgcattaagccaaatgaaaccaagaggccacgtgattgggaggagaacagagtgaagcaccaggtggagtacctgggcctaaaggaaaatatccgtgttcggcgggctggtttcgcctacaggcgacagttcgctaaatttctgcagaggtatgcaattctcacgcccgagacgtggccaagatggcggggcgacgaacgccagggtgtccaacacctgctcagggccgtgaacatggagcctgaccagtaccagatggggagcactaaggtcttcgtgaaaaacccagaaagccttttcctgctcgaggaagtgcgagagcgaaaattcgatgggttcgccaggactatccagaaggcatggcgccggcacgtggcggtgaggaaatacgaggaaatgagggaggaggcatctaacattttactgaacaagaaagagcggaggcgaaattcaatcaacagaaacttcgtgggggattacctgggcttggaggaacgcccagaactacgtcagtttttgggaaaacgcgagagagtagactttgcagacagcgtaaccaaatatgatcggcggtttaaaccaatcaagagggatctcatcctaacgccgaagtgtgtttacgtgataggtcgggagaaagttaaaaaggggcccgagaaggggcaggtgtgtgaggtgttaaagaagaaggtggacatccaggcgctgcgcggggtgagtctcagtacacgtcaggacgactttttcattttacaggaggatgccgcagactctttcctggagtccgtgttcaagaccgagttcgtatctttactctgtaagcgatttgaggaggccactcggagaccattaccactcacattctccgacacactgcaattcagagtgaagaaagagggatgggggggaggaggtacacggtctgtaacattcagcagaggcttcggcgatcttgccgttctaaaggtgggcggtaggactctgacagttagcgttggagacggtttaccgaagagttccaaacccactagaaagggcatggccaagggcaagccccggcgcagctcacaagctcctacccgcgcagcccctgcacccccaaggggcatggaccgcaacggcgtgccacctagcgctcgtggggggccgctcccgctagagatcatgtctggcggtggcacgcaccggcccccgaggggccctcccagcacctcccttggcgcatctcggcgcccccgcgctcggcccccgagcgagcacaatacggagtttcttaatgtcccagaccaggggatggccggaatgcaacgtaagaggagcgtgggacagcggccggtcccaggagtgggccggccaaagccacaaccccgaacacacggaccacgatgtcgagctctgtatcagtacgtcggacaggacgtggatgaacttagcttcaatgtcaatgaggttatagagattctgatggaagatccttccggatggtggaaaggccgactgcacggccaggaggggcttttccccggaaattacgttgaaaaaatctag

SEQ ID NO: 174085 - DNA, 3312 bp, Artificial Sequence
  derived and/or modified sequence
ggcaccaaggccggcagccctgtgaatggccagaagcagggccacgcccaggccacccccaagatccccctgaacctgcacctgcaccacgaccccttccgcagcctgcaggagcccaggcaccagccccccaccatgggcagcaaggagcgcttccactggcagagccacaacgtgaagcagagcggcgtggatgacatggtgctgctgccccagatcacagaagatgccatcgccgccaacctgaggaagcgcttcatggatgactacatcttcacctacatcggctctgtgctgatctctgtgaaccccttcaagcagatgccctacttcacagaccgggagattgacctgtaccagggcgccgcccagtatgagaaccccccccacatctatgccctgacagacaacatgtacagaaacatgctgattgactgtgagaaccagtgtgtgatcatcagcggggagagcggggccggcaagacagtggccgccaagtacatcatgggctacatcagcaaggtgtctgggggcggggagaaggtgcagcacgtgaaggacatcatcctgcagagcaaccccctgctggaggcctttggaaatgccaagacagtgaggaacaacaacagcagcagatttgggaagtactttgagatccagttcagccggggcggggagccagatggcggcaagatcagcaacttcctgctggagaagagccgggtggtgatgcagaatgaaaatgaaagaaacttccacatctactaccagctgctggagggcgccagccaggagcagaggcagaacctgggcctgatgaccccagactactactactacctgaaccagagcgacacctaccaggtggatggaacagatgacagaagtgactttggagagaccctgagcgccatgcaggtgattggcatccccccatccatccagcagctggtgctgcagctggtggccggcatcctgcacctgggcaacatctccttctgtgaagatggcaactatgcccgggtggagagcgtggacctgctggccttccctgcctacctgctgggcattgattctggccgcctgcaggagaagctgaccagcaggaagatggacagccgctggggcggccgctctgagagcatcaacgtgaccctgaatgtggagcaggccgcctacaccagagatgccctggccaagggcctgtatgcccggctgtttgacttcctggtggaggccatcaacagagccatgcagaagccccaggaggagtacagcattggagtgctggacatctacggctttgagatcttccagaagaatggatttgagcagttctgcatcaactttgtgaatgagaagctgcagcagatcttcatcgagctgaccctgaaggccgagcaggaggagtatgtgcaggagggcatccgctggacccccatccagtacttcaacaacaaggtggtgtgtgacctgattgagaacaagctgagccccccaggcatcatgtctgtgctggatgatgtgtgtgccaccatgcacgccaccggcggcggcgctgaccagaccctgctgcagaagctgcaggccgctgtgggcacccatgagcacttcaacagctggagcgctggctttgtgatccaccactacgccggcaaggtgtcctatgatgtgtctggcttctgtgagaggaacagagatgtgctcttcagtgacctgattgagctgatgcagaccagcgagcaggccttcctgaggatgctgtttcctgagaagctggatggagacaagaagggccggcccagcacagctggcagcaagatcaagaagcaggccaatgacctggtggccaccctgatgcgctgcaccccccactacatccgctgcatcaagcccaatgagaccaagaggccccgggactgggaggagaacagagtgaagcaccaggtggagtacctgggcctgaaggagaacatccgggtgcggcgggccggctttgcctaccgccggcagtttgccaagttcctgcagagatatgccatcctgaccccagagacctggccccgctggagaggagatgagcggcagggcgtgcagcacctgctgcgggctgtgaacatggagccagaccagtaccagatgggcagcaccaaggtgtttgtgaagaaccctgagagcctcttcctgctggaggaggtgcgggagaggaagtttgatggctttgcccggaccatccagaaggcctggaggagacatgtggccgtgaggaaatatgaggagatgagggaggaggccagcaacatcctgctgaacaagaaggagaggagaagaaattccatcaacagaaactttgtgggggactacctgggcctggaggagaggcctgagctgcggcagttcctgggcaagcgggagcgggtggactttgctgacagcgtgaccaagtatgaccggcgcttcaagcccatcaagagggacctgatcctgacccccaagtgtgtgtatgtgattggccgggagaaggtgaagaagggccctgagaagggccaggtgtgtgaggtgctgaagaagaaggtggacatccaggccctgcggggcgtgtccctgagcacccggcaggatgacttcttcatcctgcaggaggatgctgctgacagcttcctggagagcgtcttcaagacagaatttgtgtccctgctgtgcaagagatttgaggaggccacccggcggcccctgcccctgaccttcagtgacaccctgcagttccgggtgaagaaggagggctggggcggcggcggcaccaggtctgtgaccttcagccggggctttggagacctggccgtgctgaaggtgggcggccgcaccctgactgtgtctgtgggagatggcctgcccaagagcagcaagcccaccaggaagggcatggccaagggcaagcccaggaggagcagccaggcccccacccgggccgccccagccccaccccggggcatggacagaaatggagtgccccccagcgcccggggcggccccctgcccggggaccacgtgtggaggggccacccccaggccagccctggcctgcggccccacccctgggagccagcagatgatcctggccacgtgcggccccagagcaccacccagaacagcagcacctgcctgacccgggcctggccagcctgccggggcagcgctgcctggggcaatggccagtgcctggtgtgggccgaccccagccccagcctgggccacatggtgcctggggccggcccctacaccagcacctgggccaagatgtggaccagctag

SEQ ID NO: 174086 - DNA, 3297 bp, Artificial Sequence
  derived and/or modified sequence
atgggcagcaaggagcgcttccactggcagagccacaacgtgaagcagagcggcgtggatgacatggtgctgctgccccagatcacagaagatgccatcgccgccaacctgaggaagcgcttcatggatgactacatcttcacctacatcggctctgtgctgatctctgtgaaccccttcaagcagatgccctacttcacagaccgggagattgacctgtaccagggcgccgcccagtatgaaaatccaccccacatctatgccctgacagacaacatgtacagaaacatgctgattgactgtgagaaccagtgtgtgatcatctctggagagagcggggccggcaagacagtggccgccaagtacatcatgggctacatcagcaaggtgtctgggggcggggagaaggtgcagcacgtgaaggacatcatcctgcagagcaaccccctgctggaggcctttggaaatgccaagacagtgaggaacaacaacagcagcagatttgggaagtactttgagatccagttcagcagaggaggagagccagatggcggcaagatcagcaacttcctgctggagaagagccgggtggtgatgcagaatgaaaatgaaagaaacttccacatctactaccagctgctggagggcgccagccaggagcagaggcagaacctgggcctgatgaccccagactactactactacctgaaccagagcgacacctaccaggtggatggaacagatgacagaagtgactttggagagaccctgagcgccatgcaggtgattggcatcccccccagcatccagcagctggtgctgcagctggtggccggcatcctgcacctgggcaacatctccttctgtgaagatggcaactatgcccgggtggagagcgtggacctgctggccttccctgcctacctgctgggcatcgacagcggccgcctgcaggagaagctgaccagcaggaagatggacagccgctggggcggccgctctgagagcatcaacgtgaccctgaatgtggagcaggccgcctacaccagagatgccctggccaagggcctgtatgcccggctgtttgacttcctggtggaggccatcaacagagccatgcagaagccccaggaggagtacagcattggagtgctggacatctacggctttgagatcttccagaagaatggatttgagcagttctgcatcaactttgtgaatgagaagctgcagcagatcttcatcgagctgaccctgaaggccgagcaggaggagtatgtgcaggagggcatccgctggacccccatccagtacttcaacaacaaggtggtgtgtgacctgattgagaacaagctgagccccccaggcatcatgtctgtgctggatgatgtgtgtgccaccatgcacgccactggaggcggcgctgaccagaccctgctgcagaagctgcaggccgctgtgggcacccatgagcacttcaacagctggagcgctggcttcgtcatccaccactacgccggcaaggtgtcctatgatgtgtctggcttctgtgaaagaaacagagatgtgctcttcagtgacctgattgagctgatgcagaccagcgagcaggccttcctgaggatgctgtttcctgagaagctggatggagacaagaagggccggcccagcacagctggcagcaagatcaagaagcaggccaatgacctggtggccaccctgatgcgctgcaccccccactacatccgctgcatcaagcccaatgagaccaagaggccccgggactgggaggagaacagagtgaagcaccaggtggagtacctgggcctgaaggagaacatccgggtgagaagagctggctttgcctaccgccggcagtttgccaagttcctgcagagatatgccatcctgaccccagagacctggccccgctggagaggagatgagcggcagggcgtgcagcacctgctgcgggctgtgaacatggagccagaccagtaccagatgggcagcaccaaggtgtttgtgaagaaccctgagagcctcttcctgctggaggaggtgcgggagaggaagtttgatggctttgcccggaccatccagaaggcctggaggagacatgtggccgtgaggaaatatgaggagatgagggaggaggccagcaacatcctgctgaacaagaaggagaggagaagaaacagcatcaacagaaactttgtgggggactacctgggcctggaggagaggcctgagctgcggcagttcctgggcaagcgggagcgggtggactttgctgacagcgtgaccaagtatgaccggcgcttcaagcccatcaagagggacctgatcctgacccccaagtgtgtgtatgtgattggccgggagaaggtgaagaagggccctgagaagggccaggtgtgtgaggtgctgaagaagaaggtggacatccaggccctgcggggcgtgtccctgagcacccggcaggatgacttcttcatcctgcaggaggatgctgctgacagcttcctggagagcgtcttcaagacagaatttgtgtccctgctgtgcaagagatttgaggaggccacccggcggcccctgcccctgaccttcagtgacaccctgcagttccgggtgaagaaggagggctggggcggcggcggcaccaggtctgtgaccttcagccggggctttggagacctggccgtgctgaaggtgggcggccgcaccctgactgtgtctgtgggagatggcctgcccaagagcagcaagcccaccaggaagggcatggccaagggcaagccccggcgcagcagccaggcccccaccagggctgccccagccccaccccggggcatggacagaaatggagtgcccccatctgcccggggcggccccctgcccctggagatcatgtctgggggcggcacccaccggcccccccggggcccccccagcaccagcctgggcgccagcagaagaccccgggcccggcccccatctgagcacaacacagagttcctgaatgtgcctgaccagggcatggccggcatgcagaggaagaggtctgtgggccagaggcctgtgcctggggtgggccggcccaagccccagcccaggacccacggcccccgctgccgggccctgtaccagtatgtgggccaggatgtggatgagctgtccttcaacgtgaatgaagtcatcgagatcctgatggaggaccccagcggctggtggaagggccgcctgcacggccaggagggcctcttccctggcaactacgtggagaagatctag

SEQ ID NO: 174087 - DNA, 4284 bp, Artificial Sequence
  derived and/or modified sequence
atcaagttctgacccctcccttcaggctcagagccccaaacagccagctccccgcccccctccacacccagcttccctcccccatggcctcggcccctcccgccaaaggaagtgagaaggggctgttgtaagaggaactaaagccgggagtccggtgaacgggcagaagcagggccatgcccaagccacccccaagatccccctgaacctgcacctccatcacgacccattcaggagcctccaggagcccagacaccagccccccaccatgggcagcaaggagcgcttccactggcagagccacaacgtgaagcagagcggcgtggatgacatggtgcttcttccccagatcaccgaagacgccattgccgccaacctccggaagcgcttcatggacgactacatcttcacctacatcggctctgtgctcatctctgtaaaccccttcaagcagatgccctacttcaccgaccgtgagatcgacctctatcagggcgcggcccagtatgagaatcccccgcacatctacgccctcacggacaacatgtaccggaacatgcttatcgactgtgagaaccagtgtgtcatcattagtggagagagtggagctgggaagacagtggcagccaaatatatcatgggctacatctccaaggtgtctggcggaggcgagaaggtccagcacgtcaaagatatcatcctgcagtccaacccgctgctcgaggccttcggcaacgccaagactgtgcgcaacaacaattccagccgctttggcaagtactttgagatccagttcagccgaggtggggagccagatgggggcaagatctccaacttcttgctggagaagtcccgcgtggtcatgcaaaatgaaaatgagaggaacttccacatctactaccagctgctggaaggggcctcccaggagcaaaggcagaacctgggcctcatgacaccggactactattactacctcaaccaatcggacacctaccaggtggacggcacggacgacagaagcgactttggtgagactctgagtgctatgcaggttattgggatcccgcccagcatccagcagctggtcctgcagctcgtggcggggatcttgcacctggggaacatcagtttctgtgaagacgggaattacgcccgagtggagagtgtggacctcctggcctttcccgcctacctgctgggcattgacagcgggcgactgcaggagaagctgaccagccgcaagatggacagccgctggggcgggcgcagcgagtccatcaatgtgaccctcaacgtggagcaggcagcctacacccgtgatgccctggccaaggggctctatgcccgcctcttcgacttcctcgtggaggccatcaaccgtgctatgcagaaaccccaggaagagtacagcatcggtgtgctggacatttacggcttcgagatcttccagaaaaatggcttcgagcagttttgcatcaacttcgtcaatgagaagctgcagcaaatctttatcgaacttaccctgaaggccgagcaggaggagtatgtgcaggaaggcatccgctggactccaatccagtacttcaacaacaaggtcgtctgtgacctcatcgaaaacaagctgagccccccaggcatcatgagcgtcttggacgacgtgtgcgccaccatgcacgccacgggcgggggagcagaccagacactgctgcagaagctgcaggcggctgtggggacccacgagcatttcaacagctggagcgccggcttcgtcatccaccactacgctggcaaggtctcctacgacgtcagcggcttctgcgagaggaaccgagacgttctcttctccgacctcatagagctgatgcagaccagtgagcaggccttcctccggatgctcttccccgagaagctggatggagacaagaaggggcgccccagcaccgccggctccaagatcaagaaacaagccaacgacctggtggccacactgatgaggtgcacaccccactacatccgctgcatcaaacccaacgagaccaagaggccccgagactgggaggagaacagagtcaagcaccaggtggaatacctgggcctgaaggagaacatcagggtgcgcagagccggcttcgcctaccgccgccagttcgccaaattcctgcagaggtatgccattctgacccccgagacgtggccgcggtggcgtggggacgaacgccagggcgtccagcacctgcttcgggcggtcaacatggagcccgaccagtaccagatggggagcaccaaggtctttgtcaagaacccagagtcgcttttcctcctggaggaggtgcgagagcgaaagttcgatggctttgcccgaaccatccagaaggcctggcggcgccacgtggctgtccggaagtacgaggagatgcgggaggaagcttccaacatcctgctgaacaagaaggagcggaggcgcaacagcatcaatcggaacttcgtcggggactacctggggctggaggagcggcccgagctgcgtcagttcctgggcaagagggagcgggtggacttcgccgattcggtcaccaagtacgaccgccgcttcaagcccatcaagcgggacttgatcctgacgcccaagtgtgtgtatgtgattgggcgagagaaagtgaagaagggacctgagaagggccaggtgtgtgaagtcttgaagaagaaagtggacatccaggctctgcggggagtctccctcagcacgcgacaggacgacttcttcatcctccaagaggatgccgccgacagcttcctggagagcgtcttcaagaccgagtttgtcagccttctgtgcaagcgcttcgaggaggcgacgcggaggcccctgcccctcaccttcagcgacacactacagtttcgggtgaagaaggagggctggggcggtggcggcacccgcagcgtcaccttctcccgcggcttcggcgacttggcagtgctcaaggttggcggtcggaccctcacggtcagcgtgggcgatgggctgcccaagagctccaagcctacgcggaagggaatggccaagggaaaacctcggaggtcgtcccaagcccctacccgggcggcccctgcgccccccagaggcatggatcgcaatggggtgcccccctctgccagagggggccccctgcccggagatcatgtctggagggggcacccacaggcctccccggggctccgtccacatccctgggagccagcagacgaccccgggcacgtccgccctcagagcacaacacagaattcctcaacgtgcctgaccagggcatggccggcatgcagaggaagcgcagcgtggggcaacggccagtgcctggtgtgggccgacccaagccccagcctcggacacatggtcccaggtgccgggccctataccagtacgtgggccaagatgtggacgagctgagcttcaacgtgaacgaggtcattgagatcctcatggaagatccctcgggctggtggaagggccggcttcacggccaggagggccttttcccaggaaactacgtggagaagatctgagctgggccctgggatactgccttctctttcgcccgcctatctgcctgccggcctggtggggagccaggccctgccaatgagagcctcgtttacctgggctgcaatagcctaaaagtccagtcctttggcctccagtcctgcccaggccctgggtcaccaggtcactgctgcagcccccgcccctgggccctggtcttcctccaacatcacacctgctgcccattctccatttctgtgtgtgtcaaaggggactaacagcagaatctacctcccaactgccatgtgattaagaaatgggtcttgagtcctgtgctgttggcaaagtgccaggcacagttggggaggggggggtccttaacaagcgtgactttgctcattctgtcatcactaaggcaataaacctttgccaggtgaaagcacgagttaacttactaagtgcccaacaaggacgatgttttcacagccctgtgaggtaggagctgtgaaggaccccatcttacaggtggaacaatggaggttcagagaggttcactgacccaagactgcacagagccatgccttgcattcatatgtgaccataaagcttgaatttgtcccagtttgggctgggcgcagtggctcacgcctgtaatcccagcactttgggaggctgaggcgggcagatcacgtgagaccaggagttcaagaccagcctggataacacagcaaaaccctgtttctact

SEQ ID NO: 174088 - DNA, 3827 bp, Artificial Sequence
  derived and/or modified sequence
gtgaacgggcagaagcagggccatgcccaagccacccccaagatccccctgaacctgcacctccatcacgacccattcaggagcctccaggagcccagacaccagccccccaccatgggcagcaaggagcgcttccactggcagagccacaacgtgaagcagagcggcgtggatgacatggtgcttcttccccagatcaccgaagacgccattgccgccaacctccggaagcgcttcatggacgactacatcttcacctacatcggctctgtgctcatctctgtaaaccccttcaagcagatgccctacttcaccgaccgtgagatcgacctctatcagggcgcggcccagtatgagaatcccccgcacatctacgccctcacggacaacatgtaccggaacatgcttatcgactgtgagaaccagtgtgtcatcattagtggagagagtggagctgggaagacagtggcagccaaatatatcatgggctacatctccaaggtgtctggcggaggcgagaaggtccagcacgtcaaagatatcatcctgcagtccaacccgctgctcgaggccttcggcaacgccaagactgtgcgcaacaacaattccagccgctttggcaagtactttgagatccagttcagccgaggtggggagccagatgggggcaagatctccaacttcttgctggagaagtcccgcgtggtcatgcaaaatgaaaatgagaggaacttccacatctactaccagctgctggaaggggcctcccaggagcaaaggcagaacctgggcctcatgacaccggactactattactacctcaaccaatcggacacctaccaggtggacggcacggacgacagaagcgactttggtgagactctgagtgctatgcaggttattgggatcccgcccagcatccagcagctggtcctgcagctcgtggcggggatcttgcacctggggaacatcagtttctgtgaagacgggaattacgcccgagtggagagtgtggacctcctggcctttcccgcctacctgctgggcattgacagcgggcgactgcaggagaagctgaccagccgcaagatggacagccgctggggcgggcgcagcgagtccatcaatgtgaccctcaacgtggagcaggcagcctacacccgtgatgccctggccaaggggctctatgcccgcctcttcgacttcctcgtggaggccatcaaccgtgctatgcagaaaccccaggaagagtacagcatcggtgtgctggacatttacggcttcgagatcttccagaaaaatggcttcgagcagttttgcatcaacttcgtcaatgagaagctgcagcaaatctttatcgaacttaccctgaaggccgagcaggaggagtatgtgcaggaaggcatccgctggactccaatccagtacttcaacaacaaggtcgtctgtgacctcatcgaaaacaagctgagccccccaggcatcatgagcgtcttggacgacgtgtgcgccaccatgcacgccacgggcgggggagcagaccagacactgctgcagaagctgcaggcggctgtggggacccacgagcatttcaacagctggagcgccggcttcgtcatccaccactacgctggcaaggtctcctacgacgtcagcggcttctgcgagaggaaccgagacgttctcttctccgacctcatagagctgatgcagaccagtgagcaggccttcctccggatgctcttccccgagaagctggatggagacaagaaggggcgccccagcaccgccggctccaagatcaagaaacaagccaacgacctggtggccacactgatgaggtgcacaccccactacatccgctgcatcaaacccaacgagaccaagaggccccgagactgggaggagaacagagtcaagcaccaggtggaatacctgggcctgaaggagaacatcagggtgcgcagagccggcttcgcctaccgccgccagttcgccaaattcctgcagaggtatgccattctgacccccgagacgtggccgcggtggcgtggggacgaacgccagggcgtccagcacctgcttcgggcggtcaacatggagcccgaccagtaccagatggggagcaccaaggtctttgtcaagaacccagagtcgcttttcctcctggaggaggtgcgagagcgaaagttcgatggctttgcccgaaccatccagaaggcctggcggcgccacgtggctgtccggaagtacgaggagatgcgggaggaagcttccaacatcctgctgaacaagaaggagcggaggcgcaacagcatcaatcggaacttcgtcggggactacctggggctggaggagcggcccgagctgcgtcagttcctgggcaagagggagcgggtggacttcgccgattcggtcaccaagtacgaccgccgcttcaagcccatcaagcgggacttgatcctgacgcccaagtgtgtgtatgtgattgggcgagagaaagtgaagaagggacctgagaagggccaggtgtgtgaagtcttgaagaagaaagtggacatccaggctctgcggggagtctccctcagcacgcgacaggacgacttcttcatcctccaagaggatgccgccgacagcttcctggagagcgtcttcaagaccgagtttgtcagccttctgtgcaagcgcttcgaggaggcgacgcggaggcccctgcccctcaccttcagcgacacactacagtttcgggtgaagaaggagggctggggcggtggcggcacccgcagcgtcaccttctcccgcggcttcggcgacttggcagtgctcaaggttggcggtcggaccctcacggtcagcgtgggcgatgggctgcccaagagctccaagcctacgcggaagggaatggccaagggaaaacctcggaggtcgtcccaagcccctacccgggcggcccctgcgccccccagaggcatggatcgcaatggggtgcccccctctgccagagggggccccctgcccctggagatcatgtctggagggggcacccacaggcctccccggggccctccgtccacatccctgggagccagcagacgaccccgggcacgtccgccctcagagcacaacacagaattcctcaacgtgcctgaccagggcatggccggcatgcagaggaagcgcagcgtggggcaacggccagtgcctggtgtgggccgacccaagccccagcctcggacacatggtcccaggtgccgggccctataccagtacgtgggccaagatgtggacgagctgagcttcaacgtgaacgaggtcattgagatcctcatggaagatccctcgggctggtggaagggccggcttcacggccaggagggccttttcccaggaaactacgtggagaagatctgagctgggccctgggatactgccttctctttcgcccgcctatctgcctgccggcctggtggggagccaggccctgccaatgagagcctcgtttacctgggctgcaatagcctaaaagtccagtcctttggcctccagtcctgcccaggccctgggtcaccaggtcactgctgcagcccccgcccctgggccctggtcttcctccaacatcacacctgctgcccattctccatttctgtgtgtgtcaaaggggactaacagcagaatctacctcccaactgccatgtgattaagaaatgggtcttgagtcctgtgctgttggcaaagtgccaggcacagttggggaggggggggtccttaacaagcgtgactttgctcattctgtcatcactaaggcaataaacctttgccaggtgaaa

SEQ ID NO: 174089 - DNA, 3312 bp, Artificial Sequence
  derived and/or modified sequence
ggcaccaaggccggcagccccgtgaacggccagaagcagggccacgcccaggctaccccaaagattcctctaaacctgcacctccaccacgatcccttccgctctctccaagagcccaggcatcagccccctacaatgggctctaaggagcggttccactggcagagtcacaacgtcaaacagtcgggggtagacgacatggtcctgttgccccaaatcactgaggatgcgatcgctgcgaacctgaggaagcggttcatggacgactacatctttacctatatagggtcagtgctgattagcgtgaaccccttcaaacagatgccctactttactgacagggaaatcgatctctaccagggtgcagctcagtatgaaaacccgccccacatctacgcacttactgacaatatgtatcggaacatgctgatagattgcgaaaaccaatgtgtcattatctccggggagagcggcgctggaaagacagtggctgccaaatacatcatgggatacatcagcaaggtcagcggtggaggcgagaaagtccaacatgtgaaagatattatcctgcagtctaatcctctgcttgaagcctttgggaacgccaaaaccgtaagaaacaataactcttcccgctttggaaagtacttcgagattcaattcagtagggggggagaacctgatggtggtaaaatctctaatttcctcctagagaaaagcagggtggtgatgcagaatgaaaacgagcggaattttcacatctattaccagctgctggagggcgcaagccaggagcagcggcaaaacctggggctgatgacccctgattactactattacttgaatcagtccgacacctatcaagtcgacggaacagacgatcgtagtgacttcggagaaacacttagcgccatgcaagtgataggaatccccccatctatacagcagctggtgctgcagctcgtggctgggatcttgcatctagggaacatttcgttctgtgaggatggcaactatgcccgcgtggagtccgtggatctcctggcttttcctgcctacctattaggaattgactctggaaggctgcaggaaaagctgacatccaggaagatggactcaaggtggggtggccgcagtgaaagtatcaacgtgactctgaatgttgagcaagcagcctacacaagagatgctttggcaaaaggcctatatgccaggctttttgattttctggtggaggccatcaatcgtgcgatgcaaaaaccccaagaggagtattccatcggcgtcctcgacatctacggatttgagatcttccaaaagaacggtttcgagcaattctgtatcaactttgttaacgagaagctccagcagattttcattgagctgacccttaaagccgagcaggaggaatatgtccaagagggcatccgatggactcctatccaatattttaataacaaagtagtgtgtgacctgatagagaataagctgagtccccccgggattatgtccgtactggacgatgtatgcgctactatgcacgccaccgggggcggggctgaccaaacgctgctacaaaagttacaagcagccgttggaactcacgagcacttcaacagttggtcggcgggattcgtgatccatcattacgctggcaaagtgagttatgacgtctccggcttttgcgagaggaacagggatgtgctctttagcgatctaatcgaattgatgcagacctccgaacaagcctttttgcggatgctgttccccgaaaaactggatggagataaaaaaggaaggccatccaccgccggctctaagattaaaaagcaggccaacgacctggtggcgacgttgatgagatgcacgccccattatatccgttgcatcaaacctaatgagacaaaaaggcccagagattgggaggaaaacagggtaaagcatcaggtagagtacctggggttaaaggaaaatatacgtgtgagaagagcggggttcgcctaccggcggcaattcgccaagtttctgcagaggtatgccatcctgaccccagaaacttggcccaggtggcgtggagacgagaggcagggtgtgcagcacctgctccgggcagttaacatggaaccggaccaataccaaatgggaagtaccaaggtattcgtgaagaaccccgaaagcctatttttattggaagaagtgcgggagcgcaaattcgatggttttgcacgcaccatacaaaaagcatggcgccggcacgttgctgtaagaaaatatgaggaaatgagagaggaggcctccaatatcctcctgaataaaaaggaacgcaggcgcaacagtattaatcggaattttgtgggagattacttagggctcgaggagcggcccgagctgagacagttcctgggcaagcgggaacgggttgatttcgctgactcagtcaccaagtacgaccggcggttcaagccaattaaacgggacctgatcctgacccccaagtgtgtctacgtgatcggccgcgaaaaggttaagaaggggccagaaaagggccaggtgtgtgaggttctaaagaaaaaagtggatatccaggcgttgcgaggggtgtccttgagcacacggcaggacgacttctttattctccaggaagatgctgcagattctttcctggagtcagtgttcaaaactgagtttgtgagtctgctgtgcaagagattcgaagaggccactaggcgcccactccctttgaccttctcagatactctgcagttccgggtgaagaaggagggctggggcgggggcggaaccagatcggtgacattcagcaggggctttggtgatctcgctgtccttaaagtaggcggccggaccttgaccgtttccgtgggcgatggcctacctaaatcttccaagcccaccaggaaggggatggccaaaggaaagcctaggcgctcatctcaggcaccgacacgagcagcccccgctccaccgcgcggtatggaccgaaacggagtgcctcccagtgctaggggtggcccgctgcccggggaccatgtgtggcggggtcatccccaggcttcacctgggttacgaccccacccctgggaacccgcagatgaccctggacatgttcgacctcagtcaactacacagaattcctcgacttgtcttacacgggcatggcccgcgtgccgcggctccgctgcttggggcaacggtcaatgtctggtctgggccgatccaagcccttctttgggccacatggttcctggagccggtccgtatacatcaacttgggctaaaatgtggaccagctag

SEQ ID NO: 174090 - DNA, 3297 bp, Artificial Sequence
  derived and/or modified sequence
atgggcagcaaggagcggttccactggcagagccacaacgtgaagcagagtggtgttgacgacatggttctcctgccacagattacagaagatgccatcgctgcaaacctgcgtaagcgtttcatggatgactatatattcacctacattgggtccgtcttaatctcagttaacccattcaaacagatgccgtactttactgatagggagattgatctctaccagggggccgcacaatatgagaaccctccccacatctatgcactgacggataatatgtaccggaatatgcttatcgactgcgagaaccagtgtgttattatcagcggggagtctggggctggaaaaacggtggccgccaaatacataatgggatatatcagcaaggtctccggcggaggagagaaggttcagcacgtcaaggacatcattctgcagtccaatccactccttgaagcttttggcaacgccaagaccgtaagaaacaacaactccagtaggtttggcaaatacttcgaaatccagttttcacgtggcggggaacccgacggcggaaaaatttctaacttccttctagagaagtcccgagttgtcatgcagaatgaaaatgagcgaaacttccatatttactatcagttgttagaaggggctagccaggaacagcgccagaacctaggcttaatgacccccgattactattattatctaaaccaatctgacacctatcaggttgatggcactgatgaccgctccgattttggtgagaccctcagcgcaatgcaagtcattggcattcccccgtctatccagcagttagtcttgcagttggtcgctggcatacttcatcttggtaatatctccttctgtgaggacgggaactacgcccgggtcgaatcggtcgatctcttagcgttccctgcttaccttctgggcattgattctggcaggctccaggaaaagctgacctcccggaagatggattcccggtggggagggaggtcagagtctattaatgtgactttgaacgtggaacaagctgcttatactagggacgcccttgcgaagggactctacgctagattattcgattttcttgtggaggccattaacagggccatgcagaaaccacaggaggagtactccattggcgtgctcgatatctacggcttcgagatttttcaaaagaatggctttgaacagttttgtataaactttgtgaacgagaaattgcaacagatcttcatcgagctcacattgaaggccgagcaagaggaatatgtccaagagggtatcagatggaccccgattcagtatttcaacaacaaggtcgtgtgtgacttgatcgagaacaaattatcacctccgggaatcatgagtgtccttgatgacgtgtgtgctacaatgcacgccaccgggggtggggcagaccaaactcttctgcaaaaactccaagccgccgtcggtacccatgaacacttcaatagctggagtgccggctttgtaatacaccactatgcgggcaaggtgtcatacgatgtgtctggattctgcgagcgtaaccgcgatgtactcttcagcgatctcatcgaactcatgcaaactagcgaacaggcctttcttagaatgctttttccagaaaaattagatggggataaaaagggccgccccagcactgcaggctcaaaaattaaaaagcaagcaaacgatcttgttgctaccctgatgagatgcaccccccactatatacgctgtatcaaacccaatgaaaccaaacggccgcgggactgggaggagaatagagtgaagcaccaggtagaatatcttggactcaaggagaacataagggtgcgtcgggccgggttcgcgtatagacgccagtttgcgaaatttctacaacgctacgcgatactgacaccagaaacttggccccgctggcgcggggatgaaaggcagggagtgcagcacctcctcagggccgtgaatatggagcccgaccaataccaaatgggatccaccaaagtattcgtgaaaaaccccgaatccctgtttttactggaggaggtgcgggagaggaagttcgacggctttgccaggacaattcagaaagcatggagacggcacgtcgccgtcagaaaatacgaggagatgcgcgaggaagccagtaacattctgcttaacaagaaggaaagacgccgcaactccatcaatcgcaacttcgtcggggattacctaggcttagaggagagacctgagcttagacaattcctgggtaagagggagcgcgttgactttgccgacagcgtcactaaatatgaccgacgctttaagccaatcaaaagggatctcattttgacgccaaaatgtgtgtatgtgattggcagagagaaggtgaaaaaggggccagagaaggggcaggtttgtgaagtgcttaagaaaaaagtggatatccaggccttaagaggcgtttccctcagcacacggcaggacgatttctttattctgcaagaagatgccgccgatagtttcttagagtccgtctttaaaaccgaatttgtctctctgctgtgcaaaaggttcgaagaagccacaaggcgcccgctacctctgacatttagcgacactctccagttccgtgttaagaaggaagggtgggggggtggtggcacccggtcagtcacattcagccgcggcttcggggaccttgcagtgctcaaagtgggaggacgtacactgaccgtgagcgtgggcgacgggttaccaaaatcttcaaagcccactcgtaaagggatggctaagggaaagccacgcagaagctctcaagctcctactagggccgcgccagctcctcctaggggcatggatcggaacggagtacctccatctgcgagaggtggcccgctgcctctcgaaataatgtccggtggtgggacacaccgccctcctagaggaccgccctctacctccctgggagcctctagacggccaagagcccgcccaccgagtgagcataataccgagtttctgaacgttcccgatcagggcatggctggtatgcagcgcaaacgaagtgttggacagcgtcctgtcccgggcgttggccgacccaagccccaacctcggacccacggcccacgatgcagggcgctgtaccagtatgttggacaagacgtagacgaactgagttttaatgtcaacgaagtgatcgagatcctgatggaagatccctctggatggtggaaggggcgcctgcatggacaggaaggccttttcccgggcaattacgtggagaagatctag

SEQ ID NO: 174091 - DNA, 3312 bp, Artificial Sequence
  derived and/or modified sequence
ggtactaaagctggaagccctgtcaatggacagaagcagggccatgcacaggccacccctaaaattccattgaacctacatctgcatcatgatcccttccgcagtttgcaggagccaaggcaccaaccgccaacgatgggaagcaaggagcggtttcactggcagtcccataacgtcaagcagagcggcgtggatgacatggtgcttctgcctcagatcactgaggacgccatagcagcaaatctgaggaaacgtttcatggatgactacatattcacctacataggtagtgtcttgattagcgttaatcctttcaagcaaatgccatatttcaccgaccgggaaatagatttataccagggggctgcacaatacgaaaatccccctcacatctacgccctgacagataacatgtaccggaatatgctgatcgactgtgagaatcaatgtgtgatcattagcggcgagagcggggctggtaaaacggtggccgctaaatatattatgggttacatcagcaaagtgagtgggggaggagagaaagtgcagcacgtgaaggacatcatcttgcagtccaatcctctgctcgaggcgtttggtaacgccaagactgtccgaaataacaatagctcgaggttcgggaagtatttcgagatccagttcagtcggggaggggagcccgacgggggaaagatatcaaattttctgctggaaaagtctagagtggtgatgcaaaatgaaaacgagcggaatttccacatatactatcagttactggaaggtgcaagtcaagaacagcggcagaatttgggcttgatgacccccgattactactattatctgaatcaaagcgacacataccaggtggatggaactgatgaccggtcggacttcggagagaccttaagcgctatgcaagtaatcggaatacccccatctatacagcagttagtgcttcaacttgtggctggcattctgcatcttggcaacatatctttttgcgaagatgggaattacgccagagtcgaatctgtcgatctactggcctttccagcgtacctccttggaatcgattccggccgtctgcaggagaagctcacctcccgtaagatggattctcgttggggaggacgctccgaaagtattaacgttaccctgaatgttgaacaagcagcttacacccgcgacgcgcttgctaagggtttgtacgcgaggctgtttgacttcctggtggaagccattaaccgggctatgcagaaaccgcaggaggagtattcaatcggagtcctggacatttacggctttgaaattttccagaagaacggcttcgaacaattctgtattaatttcgtaaacgaaaagctccaacagatatttattgaattgactcttaaggcagagcaggaagaatacgtgcaggaaggcatccggtggacgcccattcaatattttaacaataaggttgtatgtgacctaattgagaataaactcagcccacctgggataatgtccgtcctagacgatgtgtgtgcgacaatgcatgccactggaggaggcgctgaccagacactgctgcagaaactccaggccgcagtagggacccacgagcattttaactcttggtccgccggttttgtaattcaccactatgccggtaaagtatcatacgacgtttcgggtttttgcgagcgcaatcgggatgtgctcttttccgacctgatcgagctcatgcagacgagtgaacaagccttcctacgaatgctatttccggaaaaattggacggcgataagaaggggagacctagcacagcagggtccaaaataaagaagcaagcaaacgatcttgtggccactctgatgaggtgcactccccactatatcagatgcattaagcccaacgaaactaaacgacctagagattgggaagagaatcgggtgaagcaccaggtggagtacctcggcctcaaggaaaatatcagagtgcgtcgagccggtttcgcctatcgcaggcagttcgcgaagtttctgcagcggtatgctatactcacccctgagacctggccacgctggcgaggggacgaacgccagggtgtgcagcacctactccgagcggttaatatggaaccagaccagtatcagatggggtcaaccaaagtctttgttaagaaccctgaatccttgtttctactagaagaagtgagagagcggaaattcgacggctttgccaggactatccagaaggcatggcggcgacatgtcgccgtaagaaagtatgaagagatgagagaagaagcgtccaacatcctgctcaacaaaaaggagagacgtcgcaattcaattaaccgcaatttcgtgggcgattatctcggcctagaagaacggcctgagctgagacagtttctgggaaagagggagagagtggatttcgccgactcagtcactaagtacgacagacgatttaaacctattaagcgcgacctgatcttgaccccgaaatgcgtctatgtgattggacgcgaaaaagtgaagaagggtccggaaaaaggccaggtttgcgaggtgctcaaaaaaaaagttgatatccaggctctgcggggtgttagcttgtcaacccgccaggacgactttttcattttacaagaggatgctgcagacagctttctggagtcagttttcaaaaccgaatttgtgtctttgctatgcaaaagattcgaggaggctacccgtagacccttgcccctcaccttctccgataccctgcagtttcgggtcaagaaagaaggctggggcggagggggaacccgttcagtgaccttctcacggggttttggcgacttagcggtgctgaaagtcgggggaaggaccctgacagtatctgtcggtgatggactgccaaagtcatccaagccaactagaaagggcatggctaaaggaaagccccgacgcagcagccaggcacctacccgcgctgctccagccccaccaagagggatggacagaaacggcgtccctcctagtgctcgcggtggcccacttcctggcgatcacgtttggcggggtcatccacaagcctcacccggactcaggcctcatccctgggaacctgctgacgatccaggacacgtgaggccccagtctacgacacaaaactcatccacatgtctgacaagagcttggccagcctgcagagggagcgccgcatggggaaacggacaatgccttgtgtgggctgaccctagcccttcactaggacatatggtgcccggtgcgggaccttacactagtacctgggcaaagatgtggacttcttag

SEQ ID NO: 174092 - DNA, 3297 bp, Artificial Sequence
  derived and/or modified sequence
atgggctccaaggaacgcttccattggcagtctcacaatgtgaaacagagcggagtcgatgacatggtgctgctcccccagattacggaagatgccattgctgcaaacctgaggaagaggttcatggatgactacattttcacctacatagggagtgtgcttatctccgttaacccttttaaacagatgccgtatttcaccgatcgggagattgacctctatcagggcgctgcgcaatacgagaatccgccacatatatacgcactcacagataatatgtatcgcaacatgctcatcgactgtgagaaccagtgcgtcatcatctccggcgagtcaggagccggtaagaccgtcgctgccaaatacattatgggctacattagtaaggtgagtggtggcggtgaaaaggtgcagcatgtgaaggacatcatactgcagtcaaaccctctcctggaggcattcggcaatgccaaaacagtgaggaataataactctagccgattcggtaagtattttgaaattcagttctccagaggtggagaaccagatggcggaaaaatttctaacttcttacttgaaaagtctagagtcgtcatgcaaaacgaaaatgaacgcaatttccacatctactaccaactgctggagggcgctagccaggaacaaaggcagaacctgggacttatgacccctgattattactactatttgaaccagtctgatacctatcaagtcgatggcactgatgatcgctcagacttcggagagacactctctgccatgcaagtgatcggcatccccccatccatccagcagttggtcctgcagctggtggccggaatccttcacctcggcaacatcagtttttgcgaggacggcaattacgcccgagtggagtccgttgacctccttgccttccctgcctatctattggggattgatagtggacgattgcaggagaaactgaccagtagaaagatggattcgaggtgggggggacgcagcgagagtatcaatgtcaccctgaacgtggagcaggccgcatacacacgagacgctttagccaagggcttatatgcgagactgtttgactttcttgtggaagcgatcaaccgtgcaatgcaaaagccgcaggaggagtactctatcggcgtactggatatctatggtttcgaaatcttccaaaagaacggcttcgaacaattttgcatcaacttcgtgaacgagaaacttcaacagatcttcatcgagcttaccctgaaggctgagcaagaggagtatgtccaggagggtattcgatggactcccatacagtactttaataataaagtggtgtgcgacctgatagagaacaaactcagtccccctggtattatgtccgtgctagacgatgtctgcgctactatgcacgcaactggtggtggcgctgaccagaccttattgcagaagctgcaggccgctgttggtacgcatgaacacttcaactcgtggtccgcagggttcgtcatacaccattatgctggaaaagtcagctacgacgtctccggcttctgcgaacggaaccgcgacgttctgttttccgacctgatcgaactaatgcagacaagtgagcaggccttcctcaggatgctgtttcctgagaagcttgatggtgataagaaagggaggcctagcacggcgggatccaaaataaaaaagcaggcaaacgacctggttgcaactctcatgcgctgcaccccacactacatccgctgtataaagcccaacgaaactaagagaccacgggactgggaagaaaaccgggtgaagcaccaggtggagtatctgggccttaaagaaaacatacgtgttaggcgcgcaggcttcgcttataggcgtcagttcgccaagttcttgcagaggtatgccattctcactcctgaaacgtggccgaggtggaggggcgatgaacgccagggcgttcagcacctcctgcgcgcagtgaatatggaacctgaccagtaccagatgggatcaacgaaagtgtttgtaaagaaccctgagagcctgtttttgttggaggaggtaagggagcggaagttcgatggctttgccaggaccatccaaaaggcctggcggaggcatgtggccgtccggaaatacgaagaaatgagggaggaggcatctaacatactactaaataaaaaagagagacgtaggaattccataaatcggaactttgtgggcgactacctgggcttagaagagcggcctgaactcagacagtttttgggcaaacgcgaaagagtggattttgccgatagcgtgacgaaatatgataggaggttcaaaccaattaaaagagacctcattctgacaccaaaatgcgtttacgtaatcggcagggagaaggtgaaaaaggggccagagaaaggccaggtttgtgaggtgcttaagaagaaagtcgatattcaggccctcaggggggtgtccctctccaccagacaagatgacttctttatactgcaggaggacgcagccgattcttttttagaatccgtgtttaaaaccgaattcgtgagcctgctgtgcaaacggttcgaagaggcaacccgtcgtccgcttccactcaccttttctgacaccctgcagttccgagttaagaaagaaggatggggaggtggaggaaccaggagcgtgaccttttctcgtggttttggcgacttagccgtgctcaaggtggggggtcgtacgcttaccgtttccgtgggggatggactgcctaagagctccaagccgacccgcaaaggcatggcaaaggggaagccgaggcgcagttcccaggcccctacccgtgccgctcccgctcccccacggggtatggatcggaacggtgtgcctccgagcgcacgaggaggcccactgccactggaaatcatgagtgggggaggcacccacagacccccacggggaccaccatccacaagcctgggtgcttcccggcgacctagagcccgtcccccatctgaacataacacggaattcttgaatgtgccggatcagggaatggctggcatgcagagaaagaggtcagtcggacagcgccctgtgcccggagtgggcaggcccaaaccacagcctcgcacgcatggtcctaggtgtcgggctctttaccagtacgtcggacaggacgttgacgagctgtctttcaatgttaacgaagtcatcgaaattttaatggaagacccctcaggctggtggaagggccgtctgcatggacaggagggtcttttcccagggaactacgtggagaagatttag

SEQ ID NO: 174093 - DNA, 3312 bp, Artificial Sequence
  derived and/or modified sequence
ggcaccaaggccggcagccccgtgaacggccagaagcagggccacgcccaggccacccccaagatccccctgaacctgcacctgcaccacgaccccttcagaagcctgcaggagcccagacaccagccccccaccatgggcagcaaggagagattccactggcagagccacaacgtgaagcagagcggcgtggacgacatggtgctgctgccccagatcaccgaggacgccatcgccgccaacctgagaaagagattcatggacgactacatcttcacctacatcggcagcgtgctgatcagcgtgaaccccttcaagcagatgccctacttcaccgacagagagatcgacctgtaccagggcgccgcccagtacgagaaccccccccacatctacgccctgaccgacaacatgtacagaaacatgctgatcgactgcgagaaccagtgcgtgatcatcagcggcgagagcggcgccggcaagaccgtggccgccaagtacatcatgggctacatcagcaaggtgagcggcggcggcgagaaggtgcagcacgtgaaggacatcatcctgcagagcaaccccctgctggaggccttcggcaacgccaagaccgtgagaaacaacaacagcagcagattcggcaagtacttcgagatccagttcagcagaggcggcgagcccgacggcggcaagatcagcaacttcctgctggagaagagcagagtggtgatgcagaacgagaacgagagaaacttccacatctactaccagctgctggagggcgccagccaggagcagagacagaacctgggcctgatgacccccgactactactactacctgaaccagagcgacacctaccaggtggacggcaccgacgacagaagcgacttcggcgagaccctgagcgccatgcaggtgatcggcatcccccccagcatccagcagctggtgctgcagctggtggccggcatcctgcacctgggcaacatcagcttctgcgaggacggcaactacgccagagtggagagcgtggacctgctggccttccccgcctacctgctgggcatcgacagcggcagactgcaggagaagctgaccagcagaaagatggacagcagatggggcggcagaagcgagagcatcaacgtgaccctgaacgtggagcaggccgcctacaccagagacgccctggccaagggcctgtacgccagactgttcgacttcctggtggaggccatcaacagagccatgcagaagccccaggaggagtacagcatcggcgtgctggacatctacggcttcgagatcttccagaagaacggcttcgagcagttctgcatcaacttcgtgaacgagaagctgcagcagatcttcatcgagctgaccctgaaggccgagcaggaggagtacgtgcaggagggcatcagatggacccccatccagtacttcaacaacaaggtggtgtgcgacctgatcgagaacaagctgagcccccccggcatcatgagcgtgctggacgacgtgtgcgccaccatgcacgccaccggcggcggcgccgaccagaccctgctgcagaagctgcaggccgccgtgggcacccacgagcacttcaacagctggagcgccggcttcgtgatccaccactacgccggcaaggtgagctacgacgtgagcggcttctgcgagagaaacagagacgtgctgttcagcgacctgatcgagctgatgcagaccagcgagcaggccttcctgagaatgctgttccccgagaagctggacggcgacaagaagggcagacccagcaccgccggcagcaagatcaagaagcaggccaacgacctggtggccaccctgatgagatgcaccccccactacatcagatgcatcaagcccaacgagaccaagagacccagagactgggaggagaacagagtgaagcaccaggtggagtacctgggcctgaaggagaacatcagagtgagaagagccggcttcgcctacagaagacagttcgccaagttcctgcagagatacgccatcctgacccccgagacctggcccagatggagaggcgacgagagacagggcgtgcagcacctgctgagagccgtgaacatggagcccgaccagtaccagatgggcagcaccaaggtgttcgtgaagaaccccgagagcctgttcctgctggaggaggtgagagagagaaagttcgacggcttcgccagaaccatccagaaggcctggagaagacacgtggccgtgagaaagtacgaggagatgagagaggaggccagcaacatcctgctgaacaagaaggagagaagaagaaacagcatcaacagaaacttcgtgggcgactacctgggcctggaggagagacccgagctgagacagttcctgggcaagagagagagagtggacttcgccgacagcgtgaccaagtacgacagaagattcaagcccatcaagagagacctgatcctgacccccaagtgcgtgtacgtgatcggcagagagaaggtgaagaagggccccgagaagggccaggtgtgcgaggtgctgaagaagaaggtggacatccaggccctgagaggcgtgagcctgagcaccagacaggacgacttcttcatcctgcaggaggacgccgccgacagcttcctggagagcgtgttcaagaccgagttcgtgagcctgctgtgcaagagattcgaggaggccaccagaagacccctgcccctgaccttcagcgacaccctgcagttcagagtgaagaaggagggctggggcggcggcggcaccagaagcgtgaccttcagcagaggcttcggcgacctggccgtgctgaaggtgggcggcagaaccctgaccgtgagcgtgggcgacggcctgcccaagagcagcaagcccaccagaaagggcatggccaagggcaagcccagaagaagcagccaggcccccaccagagccgcccccgccccccccagaggcatggacagaaacggcgtgccccccagcgccagaggcggccccctgcccggcgaccacgtgtggagaggccacccccaggccagccccggcctgagaccccacccctgggagcccgccgacgaccccggccacgtgagaccccagagcaccacccagaacagcagcacctgcctgaccagagcctggcccgcctgcagaggcagcgccgcctggggcaacggccagtgcctggtgtgggccgaccccagccccagcctgggccacatggtgcccggcgccggcccctacaccagcacctgggccaagatgtggaccagctag

SEQ ID NO: 174094 - DNA, 3297 bp, Artificial Sequence
  derived and/or modified sequence
atgggcagcaaggagagattccactggcagagccacaacgtgaagcagagcggcgtggacgacatggtgctgctgccccagatcaccgaggacgccatcgccgccaacctgagaaagagattcatggacgactacatcttcacctacatcggcagcgtgctgatcagcgtgaaccccttcaagcagatgccctacttcaccgacagagagatcgacctgtaccagggcgccgcccagtacgagaaccccccccacatctacgccctgaccgacaacatgtacagaaacatgctgatcgactgcgagaaccagtgcgtgatcatcagcggcgagagcggcgccggcaagaccgtggccgccaagtacatcatgggctacatcagcaaggtgagcggcggcggcgagaaggtgcagcacgtgaaggacatcatcctgcagagcaaccccctgctggaggccttcggcaacgccaagaccgtgagaaacaacaacagcagcagattcggcaagtacttcgagatccagttcagcagaggcggcgagcccgacggcggcaagatcagcaacttcctgctggagaagagcagagtggtgatgcagaacgagaacgagagaaacttccacatctactaccagctgctggagggcgccagccaggagcagagacagaacctgggcctgatgacccccgactactactactacctgaaccagagcgacacctaccaggtggacggcaccgacgacagaagcgacttcggcgagaccctgagcgccatgcaggtgatcggcatcccccccagcatccagcagctggtgctgcagctggtggccggcatcctgcacctgggcaacatcagcttctgcgaggacggcaactacgccagagtggagagcgtggacctgctggccttccccgcctacctgctgggcatcgacagcggcagactgcaggagaagctgaccagcagaaagatggacagcagatggggcggcagaagcgagagcatcaacgtgaccctgaacgtggagcaggccgcctacaccagagacgccctggccaagggcctgtacgccagactgttcgacttcctggtggaggccatcaacagagccatgcagaagccccaggaggagtacagcatcggcgtgctggacatctacggcttcgagatcttccagaagaacggcttcgagcagttctgcatcaacttcgtgaacgagaagctgcagcagatcttcatcgagctgaccctgaaggccgagcaggaggagtacgtgcaggagggcatcagatggacccccatccagtacttcaacaacaaggtggtgtgcgacctgatcgagaacaagctgagcccccccggcatcatgagcgtgctggacgacgtgtgcgccaccatgcacgccaccggcggcggcgccgaccagaccctgctgcagaagctgcaggccgccgtgggcacccacgagcacttcaacagctggagcgccggcttcgtgatccaccactacgccggcaaggtgagctacgacgtgagcggcttctgcgagagaaacagagacgtgctgttcagcgacctgatcgagctgatgcagaccagcgagcaggccttcctgagaatgctgttccccgagaagctggacggcgacaagaagggcagacccagcaccgccggcagcaagatcaagaagcaggccaacgacctggtggccaccctgatgagatgcaccccccactacatcagatgcatcaagcccaacgagaccaagagacccagagactgggaggagaacagagtgaagcaccaggtggagtacctgggcctgaaggagaacatcagagtgagaagagccggcttcgcctacagaagacagttcgccaagttcctgcagagatacgccatcctgacccccgagacctggcccagatggagaggcgacgagagacagggcgtgcagcacctgctgagagccgtgaacatggagcccgaccagtaccagatgggcagcaccaaggtgttcgtgaagaaccccgagagcctgttcctgctggaggaggtgagagagagaaagttcgacggcttcgccagaaccatccagaaggcctggagaagacacgtggccgtgagaaagtacgaggagatgagagaggaggccagcaacatcctgctgaacaagaaggagagaagaagaaacagcatcaacagaaacttcgtgggcgactacctgggcctggaggagagacccgagctgagacagttcctgggcaagagagagagagtggacttcgccgacagcgtgaccaagtacgacagaagattcaagcccatcaagagagacctgatcctgacccccaagtgcgtgtacgtgatcggcagagagaaggtgaagaagggccccgagaagggccaggtgtgcgaggtgctgaagaagaaggtggacatccaggccctgagaggcgtgagcctgagcaccagacaggacgacttcttcatcctgcaggaggacgccgccgacagcttcctggagagcgtgttcaagaccgagttcgtgagcctgctgtgcaagagattcgaggaggccaccagaagacccctgcccctgaccttcagcgacaccctgcagttcagagtgaagaaggagggctggggcggcggcggcaccagaagcgtgaccttcagcagaggcttcggcgacctggccgtgctgaaggtgggcggcagaaccctgaccgtgagcgtgggcgacggcctgcccaagagcagcaagcccaccagaaagggcatggccaagggcaagcccagaagaagcagccaggcccccaccagagccgcccccgccccccccagaggcatggacagaaacggcgtgccccccagcgccagaggcggccccctgcccctggagatcatgagcggcggcggcacccacagaccccccagaggcccccccagcaccagcctgggcgccagcagaagacccagagccagaccccccagcgagcacaacaccgagttcctgaacgtgcccgaccagggcatggccggcatgcagagaaagagaagcgtgggccagagacccgtgcccggcgtgggcagacccaagccccagcccagaacccacggccccagatgcagagccctgtaccagtacgtgggccaggacgtggacgagctgagcttcaacgtgaacgaggtgatcgagatcctgatggaggaccccagcggctggtggaagggcagactgcacggccaggagggcctgttccccggcaactacgtggagaagatctag

SEQ ID NO: 174095 - protein, 921 aa, Artificial Sequence
  derived and/or modified sequence
MNAPERQPQPDGGDAPGHEPGGSPQDELDFSILFDYEYLNPNEEEPNAHKVASPPSGPAYPDDVLDYGLKPYSPLASLSGEPPGRFGEPDRVGPQKFLSAAKPAGASGLSPRIEITPSHELIQAVGPLRMRDAGLLVEQPPLAGVAASPRFTLPVPGFEGYREPLCLSPASSGSSASFISDTFSPYTSPCVSPNNGGPDDLCPQFQNIPAHYSPRTSPIMSPRTSLAEDSCLGRHSPVPRPASRSSSPGAKRRHSCAEALVALPPGASPQRSRSPSPQPSSHVAPQDHGSPAGYPPVAGSAVIMDALNSLATDSPCGIPPKMWKTSPDPSPVSAAPSKAGLPRHIYPAVEFLGPCEQGERRNSAPESILLVPPTWPKPLVPAIPICSIPVTASLPPLEWPLSSQSGSYELRIEVQPKPHHRAHYETEGSRGAVKAPTGGHPVVQLHGYMENKPLGLQIFIGTADERILKPHAFYQVHRITGKTVTTTSYEKIVGNTKVLEIPLEPKNNMRATIDCAGILKLRNADIELRKGETDIGRKNTRVRLVFRVHIPESSGRIVSLQTASNPIECSQRSAHELPMVERQDTDSCLVYGGQQMILTGQNFTSESKVVFTEKTTDGQQIWEMEATVDKDKSQPNMLFVEIPEYRNKHIRTPVKVNFYVINGKRKRSQPQHFTYHPVPAIKTEPTDEYDPTLICSPTHGGLGSQPYYPQHPMVAESPSCLVATMAPCQQFRTGLSSPDARYQQQNPAAVLYQRSKSLSPSLLGYQQPALMAAPLSLADAHRSVLVHAGSQGQSSALLHPSPTNQQASPVIHYSPTNQQLRCGSHQEFQHIMYCENFAPGTTRPGPPPVSQGQRLSPGSYPTVIQQQNATSQRAAKNGPPVSDQKEVLPAGVTIKQEQNLDQTYLDDELIDTHLSWIQNIL

SEQ ID NO: 174096 - DNA, 3254 bp, Artificial Sequence
  derived and/or modified sequence
agcaggaagctcgcgccgccgtcgccgccgccgctcagcttccccgggcgcgtccaggacccgctgcgccaggcgcgccgtccccggacccggcgtgcgtccctacgaggaaagggaccccgccgctcgagccgcctccgccagccccactgcgaggggtcccagagccagccgcgcccgccctcgcccccggccccgcagccttcccgccctgcgcgccatgaacgcccccgagcggcagccccaacccgacggcggggacgccccaggccacgagcctgggggcagcccccaagacgagcttgacttctccatcctcttcgactatgagtatttgaatccgaacgaagaagagccgaatgcacataaggtcgccagcccaccctccggacccgcataccccgatgatgtcctggactatggcctcaagccatacagcccccttgctagtctctctggcgagccccccggccgattcggagagccggatagggtagggccgcagaagtttctgagcgcggccaagccagcaggggcctcgggcctgagccctcggatcgagatcactccgtcccacgaactgatccaggcagtggggcccctccgcatgagagacgcgggcctcctggtggagcagccgcccctggccggggtggccgccagcccgaggttcaccctgcccgtgcccggcttcgagggctaccgcgagccgctttgcttgagccccgctagcagcggctcctctgccagcttcatttctgacaccttctccccctacacctcgccctgcgtctcgcccaataacggcgggcccgacgacctgtgtccgcagtttcaaaacatccctgctcattattcccccagaacctcgccaataatgtcacctcgaaccagcctcgccgaggacagctgcctgggccgccactcgcccgtgccccgtccggcctcccgctcctcatcgcctggtgccaagcggaggcattcgtgcgccgaggccttggttgccctgccgcccggagcctcaccccagcgctcccggagcccctcgccgcagccctcatctcacgtggcaccccaggaccacggctccccggctgggtacccccctgtggctggctctgccgtgatcatggatgccctgaacagcctcgccacggactcgccttgtgggatcccccccaagatgtggaagaccagccctgacccctcgccggtgtctgccgccccatccaaggccggcctgcctcgccacatctacccggccgtggagttcctggggccctgcgagcagggcgagaggagaaactcggctccagaatccatcctgctggttccgcccacttggcccaagccgctggtgcctgccattcccatctgcagcatcccagtgactgcatccctccctccacttgagtggccgctgtccagtcagtcaggctcttacgagctgcggatcgaggtgcagcccaagccacatcaccgggcccactatgagacagaaggcagccgaggggctgtcaaagctccaactggaggccaccctgtggttcagctccatggctacatggaaaacaagcctctgggacttcagatcttcattgggacagctgatgagcggatccttaagccgcacgccttctaccaggtgcaccgaatcacggggaaaactgtcaccaccaccagctatgagaagatagtgggcaacaccaaagtcctggagatacccttggagcccaaaaacaacatgagggcaaccatcgactgtgcggggatcttgaagcttagaaacgccgacattgagctgcggaaaggcgagacggacattggaagaaagaacacgcgggtgagactggttttccgagttcacatcccagagtccagtggcagaatcgtctctttacagactgcatctaaccccatcgagtgctcccagcgatctgctcacgagctgcccatggttgaaagacaagacacagacagctgcctggtctatggcggccagcaaatgatcctcacggggcagaactttacatccgagtccaaagttgtgtttactgagaagaccacagatggacagcaaatttgggagatggaagccacggtggataaggacaagagccagcccaacatgctttttgttgagatccctgaatatcggaacaagcatatccgcacacctgtaaaagtgaacttctacgtcatcaatgggaagagaaaacgaagtcagcctcagcactttacctaccacccagtcccagccatcaagacggagcccacggatgaatatgaccccactctgatctgcagccccacccatggaggcctggggagccagccttactacccccagcacccgatggtggccgagtccccctcctgcctcgtggccaccatggctccctgccagcagttccgcacggggctctcatcccctgacgcccgctaccagcaacagaacccagcggccgtactctaccagcggagcaagagcctgagccccagcctgctgggctatcagcagccggccctcatggccgccccgctgtcccttgcggacgctcaccgctctgtgctggtgcacgccggctcccagggccagagctcagccctgctccacccctctccgaccaaccagcaggcctcgcctgtgatccactactcacccaccaaccagcagctgcgctgcggaagccaccaggagttccagcacatcatgtactgcgagaatttcgcaccaggcaccaccagacctggcccgcccccggtcagtcaaggtcagaggctgagcccgggttcctaccccacagtcattcagcagcagaatgccacgagccaaagagccgccaaaaacggacccccggtcagtgaccaaaaggaagtattacctgcgggggtgaccattaaacaggagcagaacttggaccagacctacttggatgatgagctgatagacacacaccttagctggatacaaaacatattatgaaacagaatgactgtgatctttgatccgagaaatcaaagttaaagttaatgaaattatcaggaaggagttttcaggacctcctgccagaaatcagacgtaaaagaagccattatagcaagacaccttctgtatctgacccctcggagccctccacagcccctcaccttctgtctcctttcatgttcatctcccagcccggagtccacacgcggatcaatgtatgggcactaagcggactctcacttaaggagctcgccacctccctcta

SEQ ID NO: 174097 - DNA, 2766 bp, Artificial Sequence
  derived and/or modified sequence
atgaacgcccccgagagacagccccagcccgacggcggcgacgcccccggccacgagcccggcggcagcccccaggacgagctggacttcagcatcctgttcgactacgagtacctgaaccccaacgaggaggagcccaacgcccacaaggtggccagcccccccagcggccccgcctaccccgacgacgtgctggactacggcctgaagccctacagccccctggccagcctgagcggcgagccccccggcagattcggcgagcccgacagagtgggcccccagaagttcctgagcgccgccaagcccgccggcgccagcggcctgagccccagaatcgagatcacccccagccacgagctgatccaggccgtgggccccctgagaatgagagacgccggcctgctggtggagcagccccccctggccggcgtggccgccagccccagattcaccctgcccgtgcccggcttcgagggctacagagagcccctgtgcctgagccccgccagcagcggcagcagcgccagcttcatcagcgacaccttcagcccctacaccagcccctgcgtgagccccaacaacggcggccccgacgacctgtgcccccagttccagaacatccccgcccactacagccccagaaccagccccatcatgagccccagaaccagcctggccgaggacagctgcctgggcagacacagccccgtgcccagacccgccagcagaagcagcagccccggcgccaagagaagacacagctgcgccgaggccctggtggccctgccccccggcgccagcccccagagaagcagaagccccagcccccagcccagcagccacgtggccccccaggaccacggcagccccgccggctacccccccgtggccggcagcgccgtgatcatggacgccctgaacagcctggccaccgacagcccctgcggcatcccccccaagatgtggaagaccagccccgaccccagccccgtgagcgccgcccccagcaaggccggcctgcccagacacatctaccccgccgtggagttcctgggcccctgcgagcagggcgagagaagaaacagcgcccccgagagcatcctgctggtgccccccacctggcccaagcccctggtgcccgccatccccatctgcagcatccccgtgaccgccagcctgccccccctggagtggcccctgagcagccagagcggcagctacgagctgagaatcgaggtgcagcccaagccccaccacagagcccactacgagaccgagggcagcagaggcgccgtgaaggcccccaccggcggccaccccgtggtgcagctgcacggctacatggagaacaagcccctgggcctgcagatcttcatcggcaccgccgacgagagaatcctgaagccccacgccttctaccaggtgcacagaatcaccggcaagaccgtgaccaccaccagctacgagaagatcgtgggcaacaccaaggtgctggagatccccctggagcccaagaacaacatgagagccaccatcgactgcgccggcatcctgaagctgagaaacgccgacatcgagctgagaaagggcgagaccgacatcggcagaaagaacaccagagtgagactggtgttcagagtgcacatccccgagagcagcggcagaatcgtgagcctgcagaccgccagcaaccccatcgagtgcagccagagaagcgcccacgagctgcccatggtggagagacaggacaccgacagctgcctggtgtacggcggccagcagatgatcctgaccggccagaacttcaccagcgagagcaaggtggtgttcaccgagaagaccaccgacggccagcagatctgggagatggaggccaccgtggacaaggacaagagccagcccaacatgctgttcgtggagatccccgagtacagaaacaagcacatcagaacccccgtgaaggtgaacttctacgtgatcaacggcaagagaaagagaagccagccccagcacttcacctaccaccccgtgcccgccatcaagaccgagcccaccgacgagtacgaccccaccctgatctgcagccccacccacggcggcctgggcagccagccctactacccccagcaccccatggtggccgagagccccagctgcctggtggccaccatggccccctgccagcagttcagaaccggcctgagcagccccgacgccagataccagcagcagaaccccgccgccgtgctgtaccagagaagcaagagcctgagccccagcctgctgggctaccagcagcccgccctgatggccgcccccctgagcctggccgacgcccacagaagcgtgctggtgcacgccggcagccagggccagagcagcgccctgctgcaccccagccccaccaaccagcaggccagccccgtgatccactacagccccaccaaccagcagctgagatgcggcagccaccaggagttccagcacatcatgtactgcgagaacttcgcccccggcaccaccagacccggccccccccccgtgagccagggccagagactgagccccggcagctaccccaccgtgatccagcagcagaacgccaccagccagagagccgccaagaacggcccccccgtgagcgaccagaaggaggtgctgcccgccggcgtgaccatcaagcaggagcagaacctggaccagacctacctggacgacgagctgatcgacacccacctgagctggatccagaacatcctgtag

SEQ ID NO: 174098 - DNA, 2766 bp, Artificial Sequence
  derived and/or modified sequence
atgaacgcccctgagagacagccccagcccgacggaggcgacgctcccggtcacgaaccgggcggctcgccccaggatgagctggatttttccatcttattcgactacgaatatctaaacccaaatgaggaagagccgaatgctcacaaggtggctagtcctccatcagggcctgcttatcctgacgacgtgttggactacggcctgaagccttatagcccgctggcctctctctctggagaacccccaggtaggtttggcgagcctgaccgggttggtccccagaaatttctgagcgccgccaaaccagcaggcgcatccggcttatctccaagaatcgagattacaccctcacacgaactcattcaagccgtgggccccctcagaatgcgggacgcagggctcctcgtcgaacagcctccacttgctggggtggccgcaagtccacgctttacacttcccgttcccggctttgagggctacagggaaccactgtgcctctcgccagctagttctgggagctcagcaagctttattagcgatacctttagtccgtatacctccccttgcgtcagtcctaacaatgggggccctgacgacctatgcccacagttccagaacatcccagcccattacagtccacggacgtctcctatcatgtctccccgcacgagtctggcagaggattcctgcttaggtcggcactctcctgtgcccagaccagctagtaggtcgagttctcctggggccaaacggagacattcctgtgccgaagcacttgtcgccctgcccccaggtgcgtccccccagcggtcccggtcgccatcgcctcagccatcctcacacgtggcgccacaggaccatggaagccctgccggataccctcctgtcgctgggtctgcagtcataatggatgctctcaattccttagccactgacagtccttgtggtattcccccaaaaatgtggaagacaagtcctgaccccagtccagtatccgcagctccatccaaggctggcctgccacggcatatttaccccgccgttgaatttctcggaccctgtgagcaaggcgagaggcgaaatagtgctccagagtcaatcctgcttgtcccaccgacctggcccaaaccactggtcccagcaataccaatctgctcaattcctgtgactgcaagtctgcctcctctggagtggccgctgtcttcccagagtggatcctacgaattgcggattgaggtccagccaaagccccaccaccgggcccattacgagactgaggggtctaggggcgctgttaaagcacccacagggggccatccagttgtgcagctgcacggatacatggaaaacaagccactcggcctgcagatctttataggcactgcagatgagagaatccttaagccacacgcattctatcaggtacatagaatcacagggaagaccgtgacaacaacatcctacgagaaaattgttggcaacaccaaagtcctggaaatcccactcgaacccaagaataacatgcgcgccactatcgattgcgcaggcatccttaaactgagaaacgcagacatcgaacttcggaagggcgaaacagatattgggcgcaaaaatacacgggttagactggtgtttcgtgtacacatccctgaatccagcgggcgcatcgtttctcttcagacagcctccaaccccatcgagtgcagccaaagatctgcgcatgagctgccaatggttgaacggcaggacaccgacagctgtcttgtctacggagggcagcagatgattctcaccggccaaaatttcactagcgagagtaaggtcgtgtttaccgagaagactacagatggacagcagatctgggaaatggaggcaacagtggacaaggataaaagccaacccaacatgttgttcgttgaaataccggaatataggaataaacacatcaggactcctgtgaaagtgaacttttatgtgattaacggaaagcgcaaaaggtcccagccacagcacttcacataccacccagttcctgctataaagactgaacccacagatgagtacgaccctacactcatctgcagtcccacccacggaggacttgggagtcagccctactacccccagcaccctatggtggcagaatctccctcctgcctcgtggcaactatggccccttgccagcagtttcggactggcctcagcagccctgacgctcggtatcagcagcaaaacccagctgctgtgttatatcagaggtcaaagagtctcagcccctctttacttgggtaccagcagcccgcactcatggcagctcccctatccctggcagatgcccacagatcggttttggtgcacgctggaagccagggacagagtagcgcgctgctccatcccagcccgactaaccagcaggcgagtccagtaatccattacagtccaactaaccagcaactccgctgtggtagccaccaggagttccagcatatcatgtattgtgagaatttcgccccggggacgactcgaccgggccccccacccgtttcgcaagggcagaggctctcacccgggagctaccccaccgtgattcagcagcaaaatgccacctctcaaagggccgccaagaatggcccccctgtctctgaccagaaagaggtccttcctgccggagtcaccatcaagcaggaacagaatctcgatcagacttaccttgacgatgagctaatcgacacccatctgtcgtggattcagaacatattatag

SEQ ID NO: 174099 - DNA, 2766 bp, Artificial Sequence
  derived and/or modified sequence
atgaatgcccctgagcggcagccccagccagatggaggagatgcccctggccacgagcccggcggcagcccccaggatgagctggacttcagcatcctgtttgattatgagtacctgaaccccaatgaggaggagcccaatgcccacaaggtggccagcccccccagcggccctgcctacccagatgatgtgctggactatggcctgaagccctacagccccctggccagcctgtctggagagcccccaggccgctttggagagccagacagagtgggcccccagaagttcctgtctgctgccaagccagctggggccagcggcctgagccccagaattgagatcacccccagccatgagctgatccaggccgtgggccccctgaggatgagagatgctggcctgctggtggagcagccccccctggccggcgtggccgccagcccccgcttcaccctgcctgtgcccggctttgagggctaccgggagcccctgtgcctgagccctgccagcagcggcagcagcgccagcttcatcagtgacaccttcagcccctacaccagcccctgtgtgagccccaacaatggaggcccagatgacctgtgcccccagttccagaacatcccagcccactacagccccaggaccagccccatcatgagccccaggaccagcctggccgaggacagctgcctgggccgccacagccctgtgcccaggcctgccagccgcagcagcagccctggggccaagaggaggcacagctgtgccgaggccctggtggccctgcccccaggggccagcccccagaggagccgcagccccagcccccagcccagcagccacgtggccccccaggaccacggcagccctgctggctacccacctgtggccggcagcgctgtgatcatggatgccctgaacagcctggccacagacagcccctgtggcatcccccccaagatgtggaagaccagcccagaccccagccctgtgtctgctgcccccagcaaggccggcctgcccaggcacatctacccagctgtggagttcctgggcccctgtgagcagggcgagaggagaaattctgcccctgagagcatcctgctggtgccccccacctggcccaagcccctggtgcctgccatccccatctgcagcatccctgtgacagccagcctgccccccctggagtggcccctgagcagccagagcggcagctatgagctgcgcatcgaggtgcagcccaagccccaccaccgggcccactatgaaacagagggcagcagaggagctgtgaaggcccccactggaggccaccctgtggtgcagctgcacggctacatggagaacaagcccctgggcctgcagatcttcatcggcacagcagatgagcgcatcctgaagccccacgccttctaccaggtgcaccgcatcaccgggaagacagtgaccaccaccagctatgagaagatcgtgggcaacaccaaggtgctggagatccccctggagcccaagaacaacatgagggccaccatcgactgtgccggcatcctgaagctgagaaatgctgacatcgagctgaggaagggggagacagacattggaaggaagaacaccagggtgcggctggtgttccgggtgcacatccctgagagcagcggcagaattgtgtccctgcagacagccagcaaccccatcgagtgcagccagaggtctgcccacgagctgcccatggtggagcggcaggacacagacagctgcctggtgtatggaggccagcagatgatcctgaccggccagaacttcaccagcgagagcaaggtggtgttcacagagaagaccacagatggccagcagatctgggagatggaggccaccgtggacaaggacaagagccagcccaacatgctgtttgtggagatccctgagtacagaaacaagcacatccgcacccctgtgaaggtgaacttctacgtgatcaacgggaagaggaagaggagccagccccagcacttcacctaccaccctgtgcctgccatcaagacagagcccacagatgaatatgaccccaccctcatctgcagccccacccatggaggcctgggcagccagccctactacccccagcaccccatggtggccgagagccccagctgcctggtggccaccatggccccctgccagcagttcagaacaggcctgagcagcccagatgcccgctaccagcagcagaacccagctgctgtgctgtaccagaggagcaagagcctgagccccagcctgctgggctaccagcagcctgccctgatggccgcccccctgagcctggctgatgcccacaggtctgtgctggtgcacgccggcagccagggccagagcagcgccctgctgcaccccagccccaccaaccagcaggccagccctgtgatccactacagccccaccaaccagcagctgcgctgtggcagccaccaggagttccagcacatcatgtactgtgaaaattttgcccctggcaccacccggcccggccccccacctgtgtcccagggccagaggctgagccctggcagctaccccaccgtcatccagcagcagaatgccaccagccagagagctgccaagaatggacctcctgtgtctgaccagaaggaggtgctgcctgctggggtgaccatcaagcaggagcagaacctggaccagacctacctggatgatgagctgattgacacccacctgtcctggatccagaacatcctgtag

SEQ ID NO: 174100 - DNA, 2766 bp, Artificial Sequence
  derived and/or modified sequence
atgaacgcccccgagcggcagccccagcccgacggcggcgacgcccccggccatgaacccggtggaagtccccaagacgaactcgacttcagcattctgtttgattacgagtacctgaaccctaacgaggaggagcccaatgctcacaaggtggcatctccgccctcagggcctgcctaccctgatgacgttcttgactatggtctgaaaccgtactcccctttagcctcactgagcggcgaaccaccagggcgctttggtgaacccgacagggtcggacctcagaagttcctaagtgccgctaaacctgccggtgcatcaggcttgagccccaggatcgagattacaccaagtcacgaactcatccaagctgtgggtccactccgaatgcgggatgcaggcctcttagtagaacaaccccccttggccggcgtcgctgcctcaccccgttttacgttgcccgttcctggctttgaaggatatagagagcctctctgcctttcaccggccagcagtggctcttccgcatcgtttatcagtgatacattctcaccatataccagtccatgcgtatccccgaataacggcggtccagacgacctatgcccccagttccaaaacattccagcccattactctccacgaacctcccccattatgtctccccgtacaagtctagccgaagattcttgtctgggacggcattcacccgtgcccaggccagcctctcggagtagctcacctggggccaaacgaaggcactcatgcgcagaggcactggtggcccttcccccgggagcatccccacagaggtctagatcaccctccccccagccctcctctcacgttgccccgcaggatcacggctctcctgctggttatcctcccgtcgccggctccgccgtcatcatggacgccctaaattcccttgccaccgatagtccctgcggcatcccccccaagatgtggaagacatcccccgaccctagccccgtcagtgccgcccctagcaaggctgggctgccccgtcacatctaccccgcagttgaatttctgggaccctgtgagcagggggaaaggcgtaatagcgcccctgagtctatcctcctagttcctcccacgtggccaaaaccacttgttccagctattccaatctgctctatccccgtgaccgcctcacttcctcccttagaatggccactgtcaagccaatctgggtcgtacgaacttaggatcgaggtgcagcccaaacctcaccaccgagctcactatgagactgagggtagcaggggcgccgtgaaggcccctactggcggccaccctgtggtccaactgcatgggtacatggaaaacaagcctttgggcctccagatcttcatcgggactgcagacgagcgaatcctgaagccccatgccttttaccaggttcatcggattaccggcaagactgtcacaaccacatcctacgagaagattgtgggtaacactaaggtacttgagatccccctggagcccaagaacaacatgcgtgcaaccatcgactgcgccggaatcctgaagctcaggaatgccgacatcgaacttaggaaaggagagacagacatcggacggaagaacacgcgggtgcgcttagtatttagagtgcacatcccagagtcttcaggcagaattgtgtccctgcagacagcctcaaatccaatagaatgtagtcaacggtccgcccacgaactgcctatggtcgaacggcaggacactgacagctgtttggtctatggggggcagcagatgatcctgacaggacagaatttcacatccgagagcaaggtcgtgttcactgaaaagactaccgacgggcagcaaatatgggagatggaggcaacggtggataaggacaaaagccagcctaacatgctgtttgtcgagatacccgaatatagaaacaagcatattagaacccctgtaaaggtaaacttttatgttataaacggaaagcgtaagagaagtcagccccagcactttacctaccacccagttcccgccattaaaacggaacctaccgacgaatacgaccccacactcatctgttccccaactcatgggggacttggtagccagccatactacccacaacatccgatggtcgcagagtctccgtcatgcctagtcgctacaatggcgccttgtcagcagttcaggacaggactgagttcccctgacgctcgataccaacagcagaacccggcagctgttctgtatcaacggagtaagtcactgtccccttccctcctcggctatcaacagccagccctcatggccgcacctctgagccttgcagatgcccataggagcgtactggtgcatgcggggtcacagggacagtcttccgcgttgctgcatccctctcctaccaaccagcaagcttcccccgtcattcattacagcccaacgaatcagcagctgaggtgcgggtcacaccaggaattccagcatattatgtattgcgagaatttcgctcctggaaccacacggcctgggcccccacccgtttcacaggggcagcgattaagcccaggcagctaccctacagttatccagcagcagaacgcaacatcacagcgcgccgcgaagaatggcccccccgtttcagatcagaaggaagtgctgccagccggagtgacaatcaagcaggagcagaatctggaccagacctatctcgacgatgagctgatcgacacccatctctcctggattcagaatattctttag

SEQ ID NO: 174101 - DNA, 7525 bp, Artificial Sequence
  derived and/or modified sequence
agcaggaagctcgcgccgccgtcgccgccgccgctcagcttccccgggcgcgtccaggacccgctgcgccaggcgcgccgtccccggacccggcgtgcgtccctacgaggaaagggaccccgccgctcgagccgcctccgccagccccactgcgaggggtcccagagccagccgcgcccgccctcgcccccggccccgcagccttcccgccctgcgcgccatgaacgcccccgagcggcagccccaacccgacggcggggacgccccaggccacgagcctgggggcagcccccaagacgagcttgacttctccatcctcttcgactatgagtatttgaatccgaacgaagaagagccgaatgcacataaggtcgccagcccaccctccggacccgcataccccgatgatgtcctggactatggcctcaagccatacagcccccttgctagtctctctggcgagccccccggccgattcggagagccggatagggtagggccgcagaagtttctgagcgcggccaagccagcaggggcctcgggcctgagccctcggatcgagatcactccgtcccacgaactgatccaggcagtggggcccctccgcatgagagacgcgggcctcctggtggagcagccgcccctggccggggtggccgccagcccgaggttcaccctgcccgtgcccggcttcgagggctaccgcgagccgctttgcttgagccccgctagcagcggctcctctgccagcttcatttctgacaccttctccccctacacctcgccctgcgtctcgcccaataacggcgggcccgacgacctgtgtccgcagtttcaaaacatccctgctcattattcccccagaacctcgccaataatgtcacctcgaaccagcctcgccgaggacagctgcctgggccgccactcgcccgtgccccgtccggcctcccgctcctcatcgcctggtgccaagcggaggcattcgtgcgccgaggccttggttgccctgccgcccggagcctcaccccagcgctcccggagcccctcgccgcagccctcatctcacgtggcaccccaggaccacggctccccggctgggtacccccctgtggctggctctgccgtgatcatggatgccctgaacagcctcgccacggactcgccttgtgggatcccccccaagatgtggaagaccagccctgacccctcgccggtgtctgccgccccatccaaggccggcctgcctcgccacatctacccggccgtggagttcctggggccctgcgagcagggcgagaggagaaactcggctccagaatccatcctgctggttccgcccacttggcccaagccgctggtgcctgccattcccatctgcagcatcccagtgactgcatccctccctccacttgagtggccgctgtccagtcagtcaggctcttacgagctgcggatcgaggtgcagcccaagccacatcaccgggcccactatgagacagaaggcagccgaggggctgtcaaagctccaactggaggccaccctgtggttcagctccatggctacatggaaaacaagcctctgggacttcagatcttcattgggacagctgatgagcggatccttaagccgcacgccttctaccaggtgcaccgaatcacggggaaaactgtcaccaccaccagctatgagaagatagtgggcaacaccaaagtcctggagatacccttggagcccaaaaacaacatgagggcaaccatcgactgtgcggggatcttgaagcttagaaacgccgacattgagctgcggaaaggcgagacggacattggaagaaagaacacgcgggtgagactggttttccgagttcacatcccagagtccagtggcagaatcgtctctttacagactgcatctaaccccatcgagtgctcccagcgatctgctcacgagctgcccatggttgaaagacaagacacagacagctgcctggtctatggcggccagcaaatgatcctcacggggcagaactttacatccgagtccaaagttgtgtttactgagaagaccacagatggacagcaaatttgggagatggaagccacggtggataaggacaagagccagcccaacatgctttttgttgagatccctgaatatcggaacaagcatatccgcacacctgtaaaagtgaacttctacgtcatcaatgggaagagaaaacgaagtcagcctcagcactttacctaccacccagtcccagccatcaagacggagcccacggatgaatatgaccccactctgatctgcagccccacccatggaggcctggggagccagccttactacccccagcacccgatggtggccgagtccccctcctgcctcgtggccaccatggctccctgccagcagttccgcacggggctctcatcccctgacgcccgctaccagcaacagaacccagcggccgtactctaccagcggagcaagagcctgagccccagcctgctgggctatcagcagccggccctcatggccgccccgctgtcccttgcggacgctcaccgctctgtgctggtgcacgccggctcccagggccagagctcagccctgctccacccctctccgaccaaccagcaggcctcgcctgtgatccactactcacccaccaaccagcagctgcgctgcggaagccaccaggagttccagcacatcatgtactgcgagaatttcgcaccaggcaccaccagacctggcccgcccccggtcagtcaaggtcagaggctgagcccgggttcctaccccacagtcattcagcagcagaatgccacgagccaaagagccgccaaaaacggacccccggtcagtgaccaaaaggaagtattacctgcgggggtgaccattaaacaggagcagaacttggaccagacctacttggatgatgagctgatagacacacaccttagctggatacaaaacatattatgaaacagaatgactgtgatctttgatccgagaaatcaaagttaaagttaatgaaattatcaggaaggagttttcaggacctcctgccagaaatcagacgtaaaagaagccattatagcaagacaccttctgtatctgacccctcggagccctccacagcccctcaccttctgtctcctttcatgttcatctcccagcccggagtccacacgcggatcaatgtatgggcactaagcggactctcacttaaggagctcgccacctccctctaaacaccagagagaactcttcttttcggtttatgttttaaatcccagagagcatcctggttgatcttaatggtgttccgtccaaatagtaagcacctgctgaccaaaagcacattctacatgagacaggacactggaactctcctgagaacagagtgactggagcttggggggatggacgggggacagaagatgtgggcactgtgattaaaccccagcccttgcgttcgtttttccaggtcacagatacagctcctgtaccttttgaaggcaaggagttctcagagcaaccaaaggaacgtgacccaagagcccagcttacaggctgaagaaacccaaaaccctcgatagagacagaaactgaactgtcagtccttagagctcgcccagtccatgccacaactgggccacagctaaagctttatttttgaattctcattccaaaaccaaactgtcttgcccagacaagatcacctgttaagacttcttggcgttaagttatgacatgtatacgcgtttgttattattattttttctgctttaaaaggctgaccagggcacctagccctggagctgtcttggcgagctgttctttaacccctgcagcacgcagtcctgctaacacaatttccatagacttggggggctgacccaggctgcagagagcaagcacctgtctgctgcagctgtacaacctggatgctttgcaaggttccggcttgctttcttcctagcagccagagtgcttttccgtaaagcggtggagaatctcaagcatgtgcatttaattgaggaatagcagaagggctaaagcaaccaagaaaagaagtgtgggtatttttgttaagtaaaacagcccaagtgcttctggaggtgggtttctaccaagatagaggaaaagggctgaattccctctaagtgggacagccgagctcaggatgtgcttcccagcttcactggttaatttgacctgaacctatttaaagatcccttctgcccctgaagacctatccgcactcaaattctaacatgaagaaatctactcgaatgcatcctttactttgaatgagctctattcggttgcatgttatatgtgatttccttcctcccaactgtttccactgagcgcacccagtctcccctagtcttcctctgtgggtgtgatttttgtgatttttacaaacaaaacccttgaagttcttggcagatgtgtttgtttctgtttgcatgtactgcagataccccaggacaagcgggggattcatttttcagccattcagttgtttcctcaataatccgcagcaaagtgaaaatattcttagcactcagactgtacttagagtgttttctcagtccagtctgtacagtctgtaggcagaaggcctcagaagaaagtcatggccactcagtgcccactgtgggctttgtaagtcctggctctcccgtcaaggttacccagaggtaaaagcttcctgggagtggggccaggtgtgtttggcactccagatagaaggcaaaatgctcagattcgggcctgtgcacttgtatgcaacctgtcggtcgatacctagcatttatttttccctgacaatgaacgacctttccctcacccaccctaagctcaaagagtttagcaaaattctcttttaaataaacagaatgccagtaagaggttgacccctaccatggaacttctgggatgctaaatacttcctcatgaacaaaataagttccttattataagttccttatactagcagcttcacctaaagaattttctctccagcaatattgacttcactggggaaaagccaagagtgtgtggtgagtgatttgttctcactcgacctggctaggactggctaggagctgttttttgtacatgagggaatttgggctttcctcagttatctgaatgttttacccaagtgccttcctgctattgtagcaaagtagctcagcttccttgtccacagggtgaaaaaggactaatgcattttccatcagttttctaactatgttagcaaaaacggcctcctggtagctcaacctcctgtacgcgtgtgtgtgtgtaatacacacacaaataaacccctctgtttttctaagacatcttagctggatattataggaagcactttcataaacaactgtaacaaatcgcaaaggaaagagaaacaaaagcattagatttgagacataaacaggcaagagaaagtgtattaggaactgacagctatcaaggaagttttgtcagttacaaatgctaggaggaaattttgccaagaaggatggctcatgaaatatttccagtacgggaagaggcaataagatcctctaagagaatgagaaagtaggggtgtctaaatggtaaagatgggtgtgttgcacgtgtgttagaaggatctcagttgagtgaaggtttgcactgctacatctaagttaatgtaaatatgtagcactctgacaggtctaccgtgttgctgaatgtagtatatttccaaagtttgcaagtcttcctgtattgtacaaagatgctgctgcttgataatatgtatagcaatccagattagtatgttattaaattttattttcttacctgtatttttatgctttttacctgtcctcaaaatattacacccctgttggaattagatttatatttataaatggtcagaaatctttttaagtgtctctttttacacataggttgatttttttttcttaagagaaatgatgtattcttgaaacatttgttactcattccaggaaacaaaaacccatataataaaacccccactcagagcctgttagtcacctctctagaagatggcatctcaggagaaggaatggctttgtggaagaaggaatcacctttttcttgctcaagaattatgctgacttcagccctgagcctggatctggtcactgagaatcatcaagtgtctagatcctccccccaaaataactaatttagtaggtgattttgattttaaaaaattgacaccaaaaccctgcctgcattgtaatggaattcgaaaagaattcatgttcacagaactcaacgttcaggctaatatttacagaagggaccaaatctaaatcctggtagataactcctgtatgctttatccaaaggacacccacagttttccagcatagatataaccaaggatgaattgattccttcaaagaactgggaggcacggatattgcattttttgtttacatccagtagccaagacgcctcagtgagccagtcttgggcagaggctgtcacatttaggcagattggaagttggtatgttctaattctcactctggactacagtgaggctgaatttatcatgtcaaaaaaaaaaaaaaaaaaagacctttccaagtgctttctattgctcagaattgaaagaatgttttcatttcaagtttacaagaggcatggatggagttgtgacgttcttgacaagctgggctaacctttcccgaacttgtttcccggaggcaaggtgctcggtgacccagcgcatcttaaccttgggtctcctaggctcgaggctagggcattacgtttcgtggaaccaaagcagccaattgcatagcaagtattttcctgcattccaattaaatgcttaagaaaaagcagcatcctataaaattgtgatcataaacatccatttccctcagcttttgtgagtgccttgacttacagccaacatcactgtttaactcagtctgtttaaaaacaaacttttctggtggttgataacagagagttgctccctgagccatcagggtcctgggagctggaagtgaaagggttattaacattctacctttatgcagctgttggctgaccagaataaactccctgctgagttcaagctttgaatggaatggatgcaaatgatgttgtttccattagagcaggtgctcacagcattctgattggcctgagcagaccgaggctatggctgttgggacaagcttagcatcctggacatcttgtcaaagaacctcactcacccctctggcctctacagccctcagaggagagaaaaccaattctccaacaaacaggtctctccaacatggtggtgctggcaggcttaggtttagaaaatcctgactgttaaaggcgtttgaatacatcacattcctatgcaaatgtttttaatctccagtttaatgtagtttatttttcctatatgtaaagtatttttatacggcttgtatcatgatagtttagcaataaaacagttggaagcaacatcta

SEQ ID NO: 174102 - DNA, 2766 bp, Artificial Sequence
  derived and/or modified sequence
atgaacgccccagaacgtcagccgcagccagatgggggtgacgctccagggcatgaaccaggaggcagtcctcaggatgagctggacttttcaattctgttcgactatgaatatcttaaccccaatgaagaagaaccgaatgctcacaaagtggctagcccgccaagcggtcccgcttatcccgacgacgtgctcgactatggacttaaaccctactctcccctggcttccctttcaggcgaacccccaggccgattcggggagccagaccgtgtgggcccacagaaatttctgtcggccgctaagcctgccggagcctctggtctgtccccacgtatcgagatcaccccatctcatgagttaattcaggccgttggcccactgaggatgcgggacgctggacttctagtggagcagccccctttagcaggcgtagcagcatctccaaggttcactctccccgtccctggatttgaggggtaccgtgagcccctctgtcttagtcctgccagctcgggatcctctgcatcttttatttctgatacattttccccgtacactagcccgtgcgtgtcccctaacaacgggggtccagacgacctgtgtccgcagttccaaaatatccctgcccattactctccaaggacctcccccattatgtcaccacgtacaagcctagctgaagactcttgcctgggcaggcactccccggtcccacgccctgcatcccggagctcaagtcctggtgctaaaagaagacatagctgtgctgaggctcttgtcgctctcccacccggagcatcaccacagaggtccagatcaccaagtcctcagccctcttcccatgtggcacctcaggaccatggaagtcccgctggataccctcctgtcgccggttctgcggttattatggatgctctaaatagtctagctaccgattccccatgcggcattccacctaagatgtggaagacctcccccgacccgtcacctgtctccgccgcaccatcaaaagccggactgccaagacatatctaccctgcagtcgaatttttgggcccatgcgaacagggagaaaggcgtaacagcgcgccagagtcgatcctgctcgttccccctacctggcccaaaccattggtgcccgctataccgatctgtagcattccggtgaccgcttcactccccccactggaatggccattgtctagccagagcggaagttacgagcttaggatcgaagtgcagcctaaacctcaccatcgtgcacactacgagacggaaggatcacgaggagctgtgaaggccccaaccggagggcatccagtagtgcaactgcacggatatatggaaaataaacccctgggattgcagatcttcatcggcaccgccgacgagaggatcttaaagccacatgctttttaccaggtacaccgcatcaccggtaaaactgtcaccactacaagctatgaaaagatcgtgggtaatactaaagtcctggagataccgctcgaacccaagaacaatatgcgggcaaccatcgactgcgccggaatcctgaagttgcgcaatgcagatatagagttgaggaagggagagactgatatcggcagaaagaatacacgggtcagacttgttttccgagtgcacatccccgagtcatcaggccgaatagtaagccttcaaactgcatccaaccccatcgagtgctcccaacggtcggcccacgagctgcctatggtggagaggcaagacactgactcgtgtctcgtgtacgggggtcagcagatgatacttaccggccagaattttacgagtgagtctaaagtcgtgttcacagaaaagactacggatggacaacagatctgggagatggaggcaactgtcgataaggacaaatcccaacccaatatgctgttcgttgaaatcccagagtatcgcaataagcatattcggacaccagtcaaggtcaatttctatgtgatcaatgggaaaagaaagcgcagccaacctcagcacttcacctatcaccctgtccccgctattaaaacagagcctacagatgaatacgaccccacacttatttgcagtcctacgcatggaggcctcggatcacagccctattacccacagcacccaatggtcgcggagtctccttcctgcctggttgcaaccatggcaccctgccagcagtttagaaccggcctctccagccccgacgccagataccagcagcagaaccccgctgccgtcctgtaccagcgcagcaagagtctgtctccatccctgttggggtatcagcagcctgccctcatggccgcacccctttccttggcagatgctcaccggagcgttcttgttcatgctggatcccagggccagagcagcgctttactgcaccctagtcctactaatcagcaggcctcacctgtcatacactactcaccaaccaaccagcagctaagatgtgggagtcaccaggagtttcagcacatcatgtactgcgagaacttcgctccaggaacaactcgccctgggccaccacccgtgtcacagggtcagcgactgtctccgggatcgtaccccacagtgatccaacagcaaaatgccaccagtcagcgcgctgcaaaaaatgggccaccagttagcgatcaaaaagaagtcttgcccgctggcgtcaccattaagcaagaacagaacctggaccagacctacctcgatgatgaactgatcgatacccacctctcatggattcaaaacatcctatag

SEQ ID NO: 174103 - protein, 140 aa, Artificial Sequence
  derived and/or modified sequence
MRKVKFTQQNYHDRLSQILTDFPKLDDIHPFYADLMNILYDKDHYKLALGQINIAKNLVDNVAKDYVRLMKYGDSLYRCKQLKRAALGRMCTVIKRQKQSLEYLEQVRQHLSRLPTIDPNTRTLLLCGYPNVGKSSFINK

SEQ ID NO: 174104 - protein, 634 aa, Artificial Sequence
  derived and/or modified sequence
MAHYNFKKITVVPSAKDFIDLTLSKTQRKTPTVIHKHYQIHRIRHFYMRKVKFTQQNYHDRLSQILTDFPKLDDIHPFYADLMNILYDKDHYKLALGQINIAKNLVDNVAKDYVRLMKYGDSLYRCKQLKRAALGRMCTVIKRQKQSLEYLEQVRQHLSRLPTIDPNTRTLLLCGYPNVGKSSFINKVTRADVDVQPYAFTTKSLFVGHMDYKYLRWQVVDTPGILDHPLEDRNTIEMQAITALAHLRAAVLYVMDLSEQCGHGLREQLELFQNIRPLFINKPLIVVANKCDVKRIAELSEDDQKIFTDLQSEGFPVIETSTLTEEGVIKVKTEACDRLLAHRVETKMKGNKVNEVLNRLHLAIPTRRDDKERPPFIPEGVVARRKRMETEESRKKRERDLELEMGDDYILDLQKYWDLMNLSEKHDKIPEIWEGHNIADYIDPAIMKKLEELEKEEELRTAAGEYDSVSESEDEEMLEIRQLAKQIREKKKLKILESKEKNTQGPRMPRTAKKVQRTVLEKEMRSLGVDMDDKDDAHYAVQARRSRSITRKRKREDSAPPSSVARSGSCSRTPRDVSGLRDVKMVKKAKTMMKNAQKKMNRLGKKGEADRHVFDMKPKHLLSGKRKAGKKDRR

SEQ ID NO: 174105 - protein, 518 aa, Artificial Sequence
  derived and/or modified sequence
MKYGDSLYRCKQLKRAALGRMCTVIKRQKQSLEYLEQVRQHLSRLPTIDPNTRTLLLCGYPNVGKSSFINKVTRADVDVQPYAFTTKSLFVGHMDYKYLRWQVVDTPGILDHPLEDRNTIEMQAITALAHLRAAVLYVMDLSEQCGHGLREQLELFQNIRPLFINKPLIVVANKCDVKRIAELSEDDQKIFTDLQSEGFPVIETSTLTEEGVIKVKTEACDRLLAHRVETKMKGNKVNEVLNRLHLAIPTRRDDKERPPFIPEGVVARRKRMETEESRKKRERDLELEMGDDYILDLQKYWDLMNLSEKHDKIPEIWEGHNIADYIDPAIMKKLEELEKEEELRTAAGEYDSVSESEDEEMLEIRQLAKQIREKKKLKILESKEKNTQGPRMPRTAKKVQRTVLEKEMRSLGVDMDDKDDAHYAVQARRSRSITRKRKREDSAPPSSVARSGSCSRTPRDVSGLRDVKMVKKAKTMMKNAQKKMNRLGKKGEADRHVFDMKPKHLLSGKRKAGKKDRR

SEQ ID NO: 174106 - protein, 587 aa, Artificial Sequence
  derived and/or modified sequence
MRKVKFTQQNYHDRLSQILTDFPKLDDIHPFYADLMNILYDKDHYKLALGQINIAKNLVDNVAKDYVRLMKYGDSLYRCKQLKRAALGRMCTVIKRQKQSLEYLEQVRQHLSRLPTIDPNTRTLLLCGYPNVGKSSFINKVTRADVDVQPYAFTTKSLFVGHMDYKYLRWQVVDTPGILDHPLEDRNTIEMQAITALAHLRAAVLYVMDLSEQCGHGLREQLELFQNIRPLFINKPLIVVANKCDVKRIAELSEDDQKIFTDLQSEGFPVIETSTLTEEGVIKVKTEACDRLLAHRVETKMKGNKVNEVLNRLHLAIPTRRDDKERPPFIPEGVVARRKRMETEESRKKRERDLELEMGDDYILDLQKYWDLMNLSEKHDKIPEIWEGHNIADYIDPAIMKKLEELEKEEELRTAAGEYDSVSESEDEEMLEIRQLAKQIREKKKLKILESKEKNTQGPRMPRTAKKVQRTVLEKEMRSLGVDMDDKDDAHYAVQARRSRSITRKRKREDSAPPSSVARSGSCSRTPRDVSGLRDVKMVKKAKTMMKNAQKKMNRLGKKGEADRHVFDMKPKHLLSGKRKAGKKDRR

SEQ ID NO: 174107 - DNA, 1905 bp, Artificial Sequence
  derived and/or modified sequence
atggcccactacaacttcaagaagatcaccgtggtgcccagcgccaaggacttcatcgacctgaccctgagcaagacccagagaaagacccccaccgtgatccacaagcactaccagatccacagaatcagacacttctacatgagaaaggtgaagttcacccagcagaactaccacgacagactgagccagatcctgaccgacttccccaagctggacgacatccaccccttctacgccgacctgatgaacatcctgtacgacaaggaccactacaagctggccctgggccagatcaacatcgccaagaacctggtggacaacgtggccaaggactacgtgagactgatgaagtacggcgacagcctgtacagatgcaagcagctgaagagagccgccctgggcagaatgtgcaccgtgatcaagagacagaagcagagcctggagtacctggagcaggtgagacagcacctgagcagactgcccaccatcgaccccaacaccagaaccctgctgctgtgcggctaccccaacgtgggcaagagcagcttcatcaacaaggtgaccagagccgacgtggacgtgcagccctacgccttcaccaccaagagcctgttcgtgggccacatggactacaagtacctgagatggcaggtggtggacacccccggcatcctggaccaccccctggaggacagaaacaccatcgagatgcaggccatcaccgccctggcccacctgagagccgccgtgctgtacgtgatggacctgagcgagcagtgcggccacggcctgagagagcagctggagctgttccagaacatcagacccctgttcatcaacaagcccctgatcgtggtggccaacaagtgcgacgtgaagagaatcgccgagctgagcgaggacgaccagaagatcttcaccgacctgcagagcgagggcttccccgtgatcgagaccagcaccctgaccgaggagggcgtgatcaaggtgaagaccgaggcctgcgacagactgctggcccacagagtggagaccaagatgaagggcaacaaggtgaacgaggtgctgaacagactgcacctggccatccccaccagaagagacgacaaggagagaccccccttcatccccgagggcgtggtggccagaagaaagagaatggagaccgaggagagcagaaagaagagagagagagacctggagctggagatgggcgacgactacatcctggacctgcagaagtactgggacctgatgaacctgagcgagaagcacgacaagatccccgagatctgggagggccacaacatcgccgactacatcgaccccgccatcatgaagaagctggaggagctggagaaggaggaggagctgagaaccgccgccggcgagtacgacagcgtgagcgagagcgaggacgaggagatgctggagatcagacagctggccaagcagatcagagagaagaagaagctgaagatcctggagagcaaggagaagaacacccagggccccagaatgcccagaaccgccaagaaggtgcagagaaccgtgctggagaaggagatgagaagcctgggcgtggacatggacgacaaggacgacgcccactacgccgtgcaggccagaagaagcagaagcatcaccagaaagagaaagagagaggacagcgccccccccagcagcgtggccagaagcggcagctgcagcagaacccccagagacgtgagcggcctgagagacgtgaagatggtgaagaaggccaagaccatgatgaagaacgcccagaagaagatgaacagactgggcaagaagggcgaggccgacagacacgtgttcgacatgaagcccaagcacctgctgagcggcaagagaaaggccggcaagaaggacagaagatag

SEQ ID NO: 174108 - DNA, 1557 bp, Artificial Sequence
  derived and/or modified sequence
atgaagtacggcgacagcctgtacagatgcaagcagctgaagagagccgccctgggcagaatgtgcaccgtgatcaagagacagaagcagagcctggagtacctggagcaggtgagacagcacctgagcagactgcccaccatcgaccccaacaccagaaccctgctgctgtgcggctaccccaacgtgggcaagagcagcttcatcaacaaggtgaccagagccgacgtggacgtgcagccctacgccttcaccaccaagagcctgttcgtgggccacatggactacaagtacctgagatggcaggtggtggacacccccggcatcctggaccaccccctggaggacagaaacaccatcgagatgcaggccatcaccgccctggcccacctgagagccgccgtgctgtacgtgatggacctgagcgagcagtgcggccacggcctgagagagcagctggagctgttccagaacatcagacccctgttcatcaacaagcccctgatcgtggtggccaacaagtgcgacgtgaagagaatcgccgagctgagcgaggacgaccagaagatcttcaccgacctgcagagcgagggcttccccgtgatcgagaccagcaccctgaccgaggagggcgtgatcaaggtgaagaccgaggcctgcgacagactgctggcccacagagtggagaccaagatgaagggcaacaaggtgaacgaggtgctgaacagactgcacctggccatccccaccagaagagacgacaaggagagaccccccttcatccccgagggcgtggtggccagaagaaagagaatggagaccgaggagagcagaaagaagagagagagagacctggagctggagatgggcgacgactacatcctggacctgcagaagtactgggacctgatgaacctgagcgagaagcacgacaagatccccgagatctgggagggccacaacatcgccgactacatcgaccccgccatcatgaagaagctggaggagctggagaaggaggaggagctgagaaccgccgccggcgagtacgacagcgtgagcgagagcgaggacgaggagatgctggagatcagacagctggccaagcagatcagagagaagaagaagctgaagatcctggagagcaaggagaagaacacccagggccccagaatgcccagaaccgccaagaaggtgcagagaaccgtgctggagaaggagatgagaagcctgggcgtggacatggacgacaaggacgacgcccactacgccgtgcaggccagaagaagcagaagcatcaccagaaagagaaagagagaggacagcgccccccccagcagcgtggccagaagcggcagctgcagcagaacccccagagacgtgagcggcctgagagacgtgaagatggtgaagaaggccaagaccatgatgaagaacgcccagaagaagatgaacagactgggcaagaagggcgaggccgacagacacgtgttcgacatgaagcccaagcacctgctgagcggcaagagaaaggccggcaagaaggacagaagatag

SEQ ID NO: 174109 - DNA, 1764 bp, Artificial Sequence
  derived and/or modified sequence
atgagaaaggtgaagttcacccagcagaactaccacgacagactgagccagatcctgaccgacttccccaagctggacgacatccaccccttctacgccgacctgatgaacatcctgtacgacaaggaccactacaagctggccctgggccagatcaacatcgccaagaacctggtggacaacgtggccaaggactacgtgagactgatgaagtacggcgacagcctgtacagatgcaagcagctgaagagagccgccctgggcagaatgtgcaccgtgatcaagagacagaagcagagcctggagtacctggagcaggtgagacagcacctgagcagactgcccaccatcgaccccaacaccagaaccctgctgctgtgcggctaccccaacgtgggcaagagcagcttcatcaacaaggtgaccagagccgacgtggacgtgcagccctacgccttcaccaccaagagcctgttcgtgggccacatggactacaagtacctgagatggcaggtggtggacacccccggcatcctggaccaccccctggaggacagaaacaccatcgagatgcaggccatcaccgccctggcccacctgagagccgccgtgctgtacgtgatggacctgagcgagcagtgcggccacggcctgagagagcagctggagctgttccagaacatcagacccctgttcatcaacaagcccctgatcgtggtggccaacaagtgcgacgtgaagagaatcgccgagctgagcgaggacgaccagaagatcttcaccgacctgcagagcgagggcttccccgtgatcgagaccagcaccctgaccgaggagggcgtgatcaaggtgaagaccgaggcctgcgacagactgctggcccacagagtggagaccaagatgaagggcaacaaggtgaacgaggtgctgaacagactgcacctggccatccccaccagaagagacgacaaggagagaccccccttcatccccgagggcgtggtggccagaagaaagagaatggagaccgaggagagcagaaagaagagagagagagacctggagctggagatgggcgacgactacatcctggacctgcagaagtactgggacctgatgaacctgagcgagaagcacgacaagatccccgagatctgggagggccacaacatcgccgactacatcgaccccgccatcatgaagaagctggaggagctggagaaggaggaggagctgagaaccgccgccggcgagtacgacagcgtgagcgagagcgaggacgaggagatgctggagatcagacagctggccaagcagatcagagagaagaagaagctgaagatcctggagagcaaggagaagaacacccagggccccagaatgcccagaaccgccaagaaggtgcagagaaccgtgctggagaaggagatgagaagcctgggcgtggacatggacgacaaggacgacgcccactacgccgtgcaggccagaagaagcagaagcatcaccagaaagagaaagagagaggacagcgccccccccagcagcgtggccagaagcggcagctgcagcagaacccccagagacgtgagcggcctgagagacgtgaagatggtgaagaaggccaagaccatgatgaagaacgcccagaagaagatgaacagactgggcaagaagggcgaggccgacagacacgtgttcgacatgaagcccaagcacctgctgagcggcaagagaaaggccggcaagaaggacagaagatag

SEQ ID NO: 174110 - DNA, 1905 bp, Artificial Sequence
  derived and/or modified sequence
atggcccactataattttaaaaagatcacggtggttccctctgcaaaggattttatcgatttaacccttagtaaaacacaacgtaaaaccccgactgtgatccataaacattaccaaattcaccgcatacgccacttttacatgagaaaggtcaaattcacccagcaaaactatcatgataggctgtcgcagattttgaccgacttcccgaaactcgacgacatccaccccttttatgccgatctgatgaacatactctacgacaaagaccattacaaattggccctaggacagatcaatatagcgaagaatctggtagacaatgttgccaaggactacgtccggctaatgaagtatggcgactctctctatcggtgtaaacagttgaaacgcgccgctctaggccgaatgtgtacagtcataaaaagacagaaacaatcactggagtacctggagcaggtgagacagcacctttctcggctgcctacaattgatccgaacacacggactctgctgctgtgcggataccccaacgtcgggaaaagctcctttatcaacaaggttacgagagctgacgttgatgtgcagccctacgcctttactactaagtccctatttgtgggccatatggactataagtatctgcgatggcaggtggtcgacacaccggggattctagatcaccctctcgaggataggaacacaatcgaaatgcaggccataacagcactggcacacctgagagctgccgtcctctacgtgatggatttatctgagcagtgcggacatggattgagagagcagctcgaacttttccagaacatcagacccctgttcataaataaacccctcattgtcgttgccaataaatgtgacgtgaagcgaatcgccgaactgagtgaggatgatcagaaaattttcaccgaccttcagtccgaaggattcccagtgattgagacatccactcttacggaggagggtgtcatcaaggtcaagactgaggcatgcgatcgtctcctcgcccatagggtagaaacaaaaatgaagggaaataaggttaacgaagtcctgaatcgcttacacttggctatccctactagacgggacgacaaggaacgtccgcctttcattccggagggtgtggtggcccggcggaagcgcatggagaccgaagagagtaggaaaaaacgcgagcgggatctcgaactcgagatgggggacgactatatcttggaccttcaaaagtattgggacctaatgaacctgagcgaaaaacacgataagattccagagatctgggagggacataatatcgccgactacatcgaccctgccattatgaagaaactggaggaattagagaaagaagaagagctgaggacggctgcaggagaatatgactccgtgagcgagagcgaggacgaagagatgctggagatcagacaattggcaaaacagattcgggagaagaaaaagctgaagatactcgaaagcaaagagaaaaacacccaagggcccagaatgccccggaccgcaaagaaagtccagagaactgtgctcgagaaagagatgcgcagtctgggagtggatatggacgacaaggatgacgctcattacgcggttcaagcacgccgctcacgatctatcactcgcaaacgcaagcgagaggacagtgcgccccctagtagcgtggcccggtcggggtcatgctctagaaccccccgagatgtctcgggactgcgcgatgtgaaaatggtaaaaaaggcaaaaaccatgatgaagaacgcacagaaaaagatgaatcgactgggaaagaagggggaggcagacagacacgtctttgacatgaaacctaaacatctcttgagtggaaagagaaaagccggtaaaaaagatcgtcgatag

SEQ ID NO: 174111 - DNA, 1557 bp, Artificial Sequence
  derived and/or modified sequence
atgaaatatggagatagcctgtacagatgcaaacagcttaaacgcgccgccctcgggaggatgtgcacagtcatcaaaagacaaaaacaatcactcgagtacttagagcaggtccgccagcacctgtctcggctgccaaccatcgacccgaacaccaggaccctgctgctgtgcggctatcccaatgtgggaaagtcttcgttcataaataaggtgaccagggccgatgttgatgtgcagccttacgccttcacgacgaagtctctgtttgtcggccacatggactataaatatctgaggtggcaggtcgtagacaccccgggaatcctcgaccatcctcttgaagatcggaataccatcgaaatgcaggcaatcacagccttagcccacctccgcgcagcggtgttgtatgtgatggatctgtcagagcagtgtgggcacggactgcgggagcagcttgaactgttccagaatatcagacccctcttcatcaataaacccctaattgtcgtggctaataagtgcgatgtgaagagaattgctgagctaagtgaggatgatcagaagattttcaccgatctgcaatcagaggggttccctgtgatagaaactagtactctcactgaagagggtgttatcaaagtgaaaaccgaagcatgtgaccgactcctagctcatagagtagagacgaaaatgaaagggaacaaggtgaacgaagttctcaatcgactccacctcgctatcccgaccagaagggatgacaaagaacgccctccgttcatcccagagggtgtggttgcccgaaggaagcggatggaaactgaagaaagccggaagaagcgagaaagagaccttgagctcgagatgggggacgactatatcctagacttgcagaagtactgggatctgatgaacctttctgaaaaacatgacaagattccggagatctgggagggccacaacatcgccgattatatcgaccccgccatcatgaaaaagctggaggaactggaaaaagaagaggaactgcggacagcagctggcgaatacgacagtgtgtctgagagcgaggacgaggagatgctggagatccgtcaactcgcgaagcagatcagagagaagaaaaaacttaagattctggagtctaaggagaaaaacacacagggacccaggatgccgcgcacagccaaaaaagttcagagaactgtgctcgagaaggaaatgaggtcacttggcgtagatatggatgacaaggacgacgcccactacgctgtacaagctaggcggagccggtctataaccagaaaacgcaagagggaagattctgccccaccatcctcagtcgcccggtccggttcttgctcaagaaccccacgggacgtctcaggcttaagggacgtgaagatggtcaaaaaagctaagactatgatgaaaaacgcccagaagaagatgaataggctggggaaaaagggagaggctgatagacatgtcttcgacatgaagccaaagcatctactctcaggtaagcgtaaggctggcaagaaggatagaaggtag

SEQ ID NO: 174112 - DNA, 1764 bp, Artificial Sequence
  derived and/or modified sequence
atgcgcaaggtaaagtttacgcagcagaattaccatgaccggctctcgcagatactgaccgactttcctaagctggacgacattcatccattttacgcagacctgatgaatatcttatacgataaggatcattacaagctggcactgggccagattaacattgccaagaacttagtcgacaatgtagcaaaagactacgtccggctgatgaagtacggcgatagtctatatcgctgtaaacaattaaagcgtgccgcattgggtcggatgtgcactgtcatcaagaggcagaaacagagcctggagtatctagagcaagttagacagcatttatctagattaccaactatcgaccctaacacgcgaacactgctgctctgtggctatcctaatgtggggaaaagttccttcataaataaagtgactagagccgatgttgacgtgcagccttacgcgtttactaccaagtccctgttcgtcggtcacatggattacaagtacctccgatggcaagtagtggatacacctggaatacttgatcacccattggaagacagaaacactatcgaaatgcaagcaatcacagctctggctcatctgcgggccgccgtgctgtacgtgatggacctatccgagcaatgcgggcacgggctacgcgagcagcttgagctcttccagaacattagacctttgttcattaataagccactcatagtggtggcaaacaagtgtgatgtgaaaaggattgctgaattatccgaagacgatcaaaagatcttcacagatctacaaagcgaaggatttcccgtaatcgagacctccaccctcacggaggagggggtaataaaagtcaaaacggaagcttgtgatcggctgttagcccaccgcgttgaaaccaagatgaaggggaataaggtgaacgaagtgctgaatcgcctgcacctggccattcctactagacgcgatgataaagagcgcccacccttcatcccagagggcgtggttgcccgacgcaagcggatggaaaccgaagagagtagaaagaagagggaacgggacctggaactggagatgggcgacgattatatcctcgacttgcagaagtattgggacctgatgaacctgtccgaaaagcacgataaaattccagagatctgggaggggcacaacatagctgactatatcgacccagccataatgaagaagctggaagaattagaaaaggaggaagaactgcggacggcagccggcgagtacgactcagtgtcagaatccgaagacgaggagatgttggagatccgccagctcgctaaacaaatcagggaaaaaaagaaactgaagatattggaaagtaaagaaaagaatactcaaggtcccagaatgcctcgaacagcaaaaaaagtgcaaagaacagtgctggaaaaggagatgcggtccctcggagttgacatggacgacaaagacgacgctcactacgccgtacaggctcgaaggagtaggagcatcacaaggaaaaggaagcgtgaagattccgctcccccttcctctgtcgccaggagcggttcttgtagcaggactccgcgggatgtaagcggactgcgcgacgtgaaaatggtgaagaaggctaagacaatgatgaaaaatgctcagaaaaaaatgaacaggctcggaaaaaagggagaggctgacaggcacgtgttcgatatgaagccaaagcaccttttgagcggaaagaggaaggccggcaaaaaggaccgaaggtag

SEQ ID NO: 174113 - DNA, 756 bp, Artificial Sequence
  derived and/or modified sequence
gggtccaccagagatcggatcccccagagaccggggtccacctaagaccgtggtccacccaaagactgagggcccccagagatgggggtacacccagagttgggttccctggaggggccccgggtgacgatgtgggcgagtggagggggaccccgacatgtgagggaggaagcgttccgtggtccgtgatgagccttcggattctgggtttggcgtagccccctcccctctcaggaatcctgggacttcatagacctcacgttgtcgaagactcaacgaaagactccaaccgttattcataaacattaccaaatacatcgcattagacatttttacatgagaaaagtcaaatttactcaacagaattaccatgatagactttcacaaattctaacagatttccccaaattggatgatattcatccgttctatgctgatttgatgaatattctctacgacaaggatcattacaagttggctctggggcaaataaatattgccaaaaatttagtggacaatgttgctaaagattatgtgcgactgatgaagtatggcgactctctctaccgctgcaaacagctgaagcgtgcggccctgggacggatgtgcacagtgatcaagaggcagaagcagagtttggagtatttggagcaagtgcgtcagcatttatcccgtttgccaaccattgatccgaataccaggaccctgcttttgtgtgggtacccaaatgttgggaagtccagcttcatcaacaag

SEQ ID NO: 174114 - DNA, 4696 bp, Artificial Sequence
  derived and/or modified sequence
cgcccgacagtggaagtcccacctgcgcccgacggcggaagttccgggagtgccaagtacccgcgtgcatacggctgccggcatggcacattacaacttcaagaaaattacggtggtgccgtccgccaaggacttcatagacctcacgttgtcgaagactcaacgaaagactccaaccgttattcataaacattaccaaatacatcgcattagacatttttacatgagaaaagtcaaatttactcaacagaattaccatgatagactttcacaaattctaacagatttccccaaattggatgatattcatccgttctatgctgatttgatgaatattctctacgacaaggatcattacaagttggctctggggcaaataaatattgccaaaaatttagtggacaatgttgctaaagattatgtgcgactgatgaagtatggcgactctctctaccgctgcaaacagctgaagcgtgcggccctgggacggatgtgcacagtgatcaagaggcagaagcagagtttggagtatttggagcaagtgcgtcagcatttatcccgtttgccaaccattgatccgaataccaggaccctgcttttgtgtgggtacccaaatgttgggaagtccagcttcatcaacaaggtgacgagagcagacgtggatgtccagccctatgcgttcacaaccaagtctctgtttgttgggcacatggattataagtatctacgttggcaggttgtagacactcctgggatcctggaccaccctctggaggataggaacaccatcgagatgcaggccatcactgccctggcccacctccgtgctgcggtcctgtatgtgatggatttgtctgagcagtgtgggcatgggctgagggagcagctagaactcttccagaacatcagacctctcttcatcaacaagcctctcatagttgtagccaacaaatgtgatgtgaagagaatagctgaactttctgaagatgatcagaaaatatttacagatttgcagtctgaaggattccctgtaatagagaccagcaccctgactgaggaaggtgttattaaagttaaaacagaggcttgcgataggcttttggctcatcgagtggaaaccaaaatgaagggaaataaagtgaatgaggtgctgaatagactgcacctggctatcccaaccaggagggacgataaggagaggccccctttcatccctgaaggagtggtggctcgcaggaagaggatggaaactgaggagtccaggaagaagagggaacgagatcttgagctggaaatgggagatgattatattttggatcttcagaagtactgggatttaatgaatttgtctgaaaaacatgataagataccagaaatctgggaaggccataatatagctgattatattgatccagccatcatgaagaaattggaagaattagaaaaagaagaagagctgagaacagctgctggagagtatgacagtgtatctgagagtgaagacgaagagatgctggaaatccgacagctggcaaagcaaattcgagagaaaaagaagttgaaaattctggagtccaaagaaaagaatacacagggacccaggatgccgcgaactgctaagaaggttcagaggacagttttggagaaggagatgcgtagtcttggtgttgacatggacgataaagacgatgcccattacgcagtccaggcaagaagatcccggagcatcactaggaaaagaaagcgggaagactctgctcccccgtcctctgtggcccggagtgggagttgctctcgaactccacgtgacgtttctggtcttagggatgtcaagatggtgaagaaagccaagactatgatgaagaatgctcagaagaagatgaatcggttggggaagaaaggggaggcggatagacacgtgtttgatatgaagcccaagcacttgctgtctgggaagaggaaagctggtaaaaaggacaggagatagtatccgtttggttggcgtggcttcgctagagtgttgctgtttatttcctggtttggcacagtatggtttcatgaaattggagctctgtataaactgaaaaagacaaaataagtaaagcacttgttgctttgctgaaaactatggttaaccctatataggtgtgggaaatttttgtcactgcataatattacaaatattttgagtagacagtgtttccacatttaatggagtatcagttgcttcagattttcagaactgggaagatttactggtttaactaggttgtttttgatggagaaaaaccttattttcttttgtaagagctgggagcaaacacgtttatgagtgtgtcggaatcccgtgcttaaaatacgctcttaaattattttctagtcttattttacaatgtctcattgtagtctgtcttcaactattttatccaaaataaacctccagaagaaagtagttttcatttacttagctcatgttttggtttagttatagtcgctatggatttggccaaataaaaaggcaaacaacatgacatttctattttgttttaaagcaaaaatacttttgggggagtaaaatgttgctggaggcattaggcaattaaatatgggcattctcctatttctgtggcccgtccctgaagttacatgttcagtaaaacacaaaaacaccgccaatgccacctcaaaagcacctgctggggagcgttggggtgaagagctgtggggtcggagggacctgcccaggggtccgtgtgctcctggagctccaaagacacacaggggtccaagagccaccacggataagttatcaagtcacacaatcaacattatagctgaggaaaggactttagttaatcacacttctggattacatgtggcaattttaaaaatttaccagggctgggctgggcgcaggggctcaagcctgtagttccagcactttgggaggccgaggtgggcagatcaggaggtcaggagttcgagaccagcctggccaacatggtgaaaccccatctctactaaaaatacaaaaattagccatgcgtggtggtgggcatctgtaatcctagctgctcgggaggctaaggcaggagaattgcttgagcccagaggcggaggttgcagtgagccgagatcgtgccactgcactccagcctgggtgacagagagagactccgtgtgaaaaaaaaaaaaaaaataccaggtctggtttttgaaattctttctccgtattaaacaccaaaacttaacatatagtttactttgtgttaaacaacaacagtatggccgggcgcggcagctcatgcctgtaatcccagcactttgggaggccgaggcaggcggatcacgaggtcaggagatcgagaccatcctggctaacacggtgaaaccccgtctctactaaaaatacaaaaaattagctgggtgtggtggcgggcgcctgtagtcccaactacttgggaggctgaggcaggagaatggcttgaacccgggaggcggagcttgcagtgagccaagatcgcaccactgcactccagcctggtcgacagcgagactccatctcaaaaaaaaaaaaaaaataccaggtctggtttttgaaattctttctccgtattaaacaccaaaacttaacatatagtttactttgtgttaaacaacaacagtatgttttaaagcaagtatgtctttatttgtaagcatattactgaaacgatcaaatgaacagaagtggataaacgtcgagtcacttggctgagaccatacgcatcttccgtactgcttgtattaggatgcaagattgaatgtgtcttttttttaaaaatgcagccttgtgttgcactctgaaataagtgatttaaaaagaaaaacatgatacagagatcccatcctgaccttggaggcttggataaagctgtggggagacagcctcatggtccagccaggctagtccgcctgcttcaggactctcaagatctccccaagactttcaggatcagctgctgttaatcaaacaagtgcttataaaatggaaattgggacaaaggaaatgttaaatttcctccctgcaaccaggcagatgagaaatatggaaataaggaaaagggaaaatgaagatatgacaaagttgatgaaaaggttgaaatagtgatttatacatgatgggcaatcaagtgccccttttgccctgttttttggagagggtgtatcattgcctcaatggtgcgtctgcctgcactgagggcattacacatggctgactcgacctccctgcctctcacactctgtgtattttgtgaagctccacaaacggggtcacgtcatccaggtgaggccaccaccggtacagaaacctctcggcaatggttcttagccagggggtgactttgacttcacccctcgcctccctctccagcagctcccacagctcctcctgggacaggtagaggatgcttttcgtttcactgggatccgggttcagagtgacgtttttcctcacaagcagaaggtaacaaatttcatgctctccccaaattctgtctgattttgccttgtggtgatagattgtcatgaacacaatgtcctctggagaaatctattgacagaaattggtgcagtgttaacaacgctaatgtaaaacacagaatttacagaaaaatagagaaaataaacacatttgttttcctcagaaaatgaa

SEQ ID NO: 174115 - DNA, 2269 bp, Artificial Sequence
  derived and/or modified sequence
gtgcatacggctgccggcatggcacattacaacttcaagaaaattacggtggtgccgtccgccaaggacttcatagacctcacgttgtcgaagactcaacgaaagactccaaccgttattcataaacattaccaaatacatcgcattagacatttttacatgagaaaagtcaaatttactcaacagaattaccatgatagactttcacaaattctaacagatttccccaaattggattgttgctaaagattatgtgcgactgatgaagtatggcgactctctctaccgctgcaaacagctgaagcgtgcggccctgggacggatgtgcacagtgatcaagaggcagaagcagagtttggagtatttggagcaagtgcgtcagcatttatcccgtttgccaaccattgatccgaataccaggaccctgcttttgtgtgggtacccaaatgttgggaagtccagcttcatcaacaaggtgacgagagcagacgtggatgtccagccctatgcgttcacaaccaagtctctgtttgttgggcacatggattataagtatctacgttggcaggttgtagacactcctgggatcctggaccaccctctggaggataggaacaccatcgagatgcaggccatcactgccctggcccacctccgtgctgcggtcctgtatgtgatggatttgtctgagcagtgtgggcatgggctgagggagcagctagaactcttccagaacatcagacctctcttcatcaacaagcctctcatagttgtagccaacaaatgtgatgtgaagagaatagctgaactttctgaagatgatcagaaaatatttacagatttgcagtctgaaggattccctgtaatagagaccagcaccctgactgaggaaggtgttattaaagttaaaacagaggcttgcgataggcttttggctcatcgagtggaaaccaaaatgaagggaaataaagtgaatgaggtgctgaatagactgcacctggctatcccaaccaggagggacgataaggagaggccccctttcatccctgaaggagtggtggctcgcaggaagaggatggaaactgaggagtccaggaagaagagggaacgagatcttgagctggaaatgggagatgattatattttggatcttcagaagtactgggatttaatgaatttgtctgaaaaacatgataagataccagaaatctgggaaggccataatatagctgattatattgatccagccatcatgaagaaattggaagaattagaaaaagaagaagagctgagaacagctgctggagagtatgacagtgtatctgagagtgaagacgaagagatgctggaaatccgacagctggcaaagcaaattcgagagaaaaagaagttgaaaattctggagtccaaagaaaagaatacacagggacccaggatgccgcgaactgctaagaaggttcagaggacagttttggagaaggagatgcgtagtcttggtgttgacatggacgataaagacgatgcccattacgcagtccaggcaagaagatcccggagcatcactaggaaaagaaagcgggaagactctgctcccccgtcctctgtggcccggagtgggagttgctctcgaactccacgtgacgtttctggtcttagggatgtcaagatggtgaagaaagccaagactatgatgaagaatgctcagaagaagatgaatcggttggggaagaaaggggaggcggatagacacgtgtttgatatgaagcccaagcacttgctgtctgggaagaggaaagctggtaaaaaggacaggagatagtatccgtttggttggcgtggcttcgctagagtgttgctgtttatttcctggtttggcacagtatggtttcatgaaattggagctctgtataaactgaaaaagacaaaataagtaaagcacttgttgctttgctgaaaactatggttaaccctatataggtgtgggaaatttttgtcactgcataatattacaaatattttgagtagacagtgtttccacatttaatggagtatcagttgcttcagattttcagaactgggaagatttactggtttaactaggttgtttttgatggagaaaaaccttattttcttttgtaagagctgggagcaaacacgtttatgagtgtgtcggaatcccgtgcttaaaatacgctcttaaattattttctagtcttattttacaatgtctcattgtagtctgtcttcaactattttatccaaaataaac

SEQ ID NO: 174116 - DNA, 2566 bp, Artificial Sequence
  derived and/or modified sequence
agagatcggatcccccagagaccggggtccacctaagaccgtggtccacccaaagactgagggcccccagagatgggggtacacccagagttgggttccctggaggggccccgggtgacgatgtgggcgagtggagggggaccccgacatgtgagggaggaagcgttccgtggtccgtgatgagccttcggattctgggtttggcgtagccccctcccctctcaggaatcctgggacttcatagacctcacgttgtcgaagactcaacgaaagactccaaccgttattcataaacattaccaaatacatcgcattagacatttttacatgagaaaagtcaaatttactcaacagaattaccatgatagactttcacaaattctaacagatttccccaaattggatgatattcatccgttctatgctgatttgatgaatattctctacgacaaggatcattacaagttggctctggggcaaataaatattgccaaaaatttagtggacaatgttgctaaagattatgtgcgactgatgaagtatggcgactctctctaccgctgcaaacagctgaagcgtgcggccctgggacggatgtgcacagtgatcaagaggcagaagcagagtttggagtatttggagcaagtgcgtcagcatttatcccgtttgccaaccattgatccgaataccaggaccctgcttttgtgtgggtacccaaatgttgggaagtccagcttcatcaacaaggtgacgagagcagacgtggatgtccagccctatgcgttcacaaccaagtctctgtttgttgggcacatggattataagtatctacgttggcaggttgtagacactcctgggatcctggaccaccctctggaggataggaacaccatcgagatgcaggccatcactgccctggcccacctccgtgctgcggtcctgtatgtgatggatttgtctgagcagtgtgggcatgggctgagggagcagctagaactcttccagaacatcagacctctcttcatcaacaagcctctcatagttgtagccaacaaatgtgatgtgaagagaatagctgaactttctgaagatgatcagaaaatatttacagatttgcagtctgaaggattccctgtaatagagaccagcaccctgactgaggaaggtgttattaaagttaaaacagaggcttgcgataggcttttggctcatcgagtggaaaccaaaatgaagggaaataaagtgaatgaggtgctgaatagactgcacctggctatcccaaccaggagggacgataaggagaggccccctttcatccctgaaggagtggtggctcgcaggaagaggatggaaactgaggagtccaggaagaagagggaacgagatcttgagctggaaatgggagatgattatattttggatcttcagaagtactgggatttaatgaatttgtctgaaaaacatgataagataccagaaatctgggaaggccataatatagctgattatattgatccagccatcatgaagaaattggaagaattagaaaaagaagaagagctgagaacagctgctggagagtatgacagtgtatctgagagtgaagacgaagagatgctggaaatccgacagctggcaaagcaaattcgagagaaaaagaagttgaaaattctggagtccaaagaaaagaatacacagggacccaggatgccgcgaactgctaagaaggttcagaggacagttttggagaaggagatgcgtagtcttggtgttgacatggacgataaagacgatgcccattacgcagtccaggcaagaagatcccggagcatcactaggaaaagaaagcgggaagactctgctcccccgtcctctgtggcccggagtgggagttgctctcgaactccacgtgacgtttctggtcttagggatgtcaagatggtgaagaaagccaagactatgatgaagaatgctcagaagaagatgaatcggttggggaagaaaggggaggcggatagacacgtgtttgatatgaagcccaagcacttgctgtctgggaagaggaaagctggtaaaaaggacaggagatagtatccgtttggttggcgtggcttcgctagagtgttgctgtttatttcctggtttggcacagtatggtttcatgaaattggagctctgtataaactgaaaaagacaaaataagtaaagcacttgttgctttgctgaaaactatggttaaccctatataggtgtgggaaatttttgtcactgcataatattacaaatattttgagtagacagtgtttccacatttaatggagtatcagttgcttcagattttcagaactgggaagatttactggtttaactaggttgtttttgatggagaaaaaccttattttcttttgtaagagctgggagcaaacacgtttatgagtgtgtcggaatcccgtgcttaaaatacgctcttaaattattttctagtcttattttacaatgtctcattgtagtctgtcttcaactattttatccaaaataaacctccagaagaaagtagttttcattt

SEQ ID NO: 174117 - DNA, 1905 bp, Artificial Sequence
  derived and/or modified sequence
atggcccactacaacttcaagaagatcaccgtggtgcccagcgccaaggacttcatcgacctgaccctgagcaagacccagaggaagacccccaccgtcatccacaagcactaccagatccaccgcatccgccacttctacatgaggaaggtgaagttcacccagcagaactaccatgaccggctgagccagatcctgacagacttccccaagctggatgacatccaccccttctacgccgacctgatgaacatcctgtatgacaaggaccactacaagctggccctgggccagatcaacatcgccaagaacctggtggacaacgtggccaaggactatgtgcggctgatgaagtatggagacagcctgtaccgctgcaagcagctgaagagagctgccctgggccgcatgtgcaccgtcatcaagaggcagaagcagagcctggagtacctggagcaggtgcggcagcacctgagccggctgcccaccatcgaccccaacaccaggaccctgctgctgtgtggctaccccaacgtgggcaagagcagcttcatcaacaaggtgaccagggcagatgtggatgtgcagccctatgccttcaccaccaagagcctgtttgtgggccacatggactacaagtacctgcgctggcaggtggtggacaccccaggcatcctggaccaccccctggaggacaggaacaccatcgagatgcaggccatcacagccctggcccacctgcgggctgctgtgctgtatgtgatggacctgtctgagcagtgtggccacggcctgcgggagcagctggagctgttccagaacatccggcccctcttcatcaacaagcccctgattgtggtggccaacaagtgtgatgtgaagagaattgctgagctgtctgaagatgaccagaagatcttcacagacctgcagagcgagggcttccctgtgattgagaccagcaccctgacagaggagggcgtcatcaaggtgaagacagaggcctgtgaccggctgctggcccaccgggtggagaccaagatgaagggcaacaaggtgaatgaggtgctgaaccggctgcacctggccatccccaccaggagagatgacaaggagcggccccccttcatccctgagggcgtggtggcccggaggaagaggatggagacagaggagagcaggaagaagcgggagcgggacctggagctggagatgggagatgactacatcctggacctgcagaagtactgggacctgatgaacctgtctgagaagcatgacaagatccctgagatctgggagggccacaacattgctgactacatcgaccctgccatcatgaagaagctggaggagctggagaaggaggaggagctgaggacagctgctggggagtatgacagcgtgtctgagagtgaagatgaggagatgctggagatccggcagctggccaagcagatccgggagaagaagaagctgaagatcctggagagcaaggagaagaacacccagggccccaggatgcccaggacagccaagaaggtgcagaggacagtgctggagaaggagatgaggagcctgggcgtggacatggatgacaaggatgatgcccactatgctgtgcaggcccggcgcagccgcagcatcaccaggaagaggaagcgggaggacagcgccccacccagctctgtggcccggagcggcagctgcagcaggaccccaagagatgtgtctggcctgagagatgtgaagatggtgaagaaggccaagaccatgatgaagaatgcccagaagaagatgaaccggctgggcaagaagggggaggccgacagacatgtgtttgacatgaagcccaagcacctgctgagcggcaagaggaaggccggcaagaaggacagaagatag

SEQ ID NO: 174118 - DNA, 1557 bp, Artificial Sequence
  derived and/or modified sequence
atgaagtatggagacagcctgtaccgctgcaagcagctgaagagagctgccctgggccgcatgtgcaccgtcatcaagaggcagaagcagagcctggagtacctggagcaggtgcggcagcacctgagccggctgcccaccatcgaccccaacaccaggaccctgctgctgtgtggctaccccaacgtgggcaagagcagcttcatcaacaaggtgaccagggcagatgtggatgtgcagccctatgccttcaccaccaagagcctgtttgtgggccacatggactacaagtacctgcgctggcaggtggtggacaccccaggcatcctggaccaccccctggaggacaggaacaccatcgagatgcaggccatcacagccctggcccacctgcgggctgctgtgctgtatgtgatggacctgtctgagcagtgtggccacggcctgcgggagcagctggagctgttccagaacatccggcccctcttcatcaacaagcccctgattgtggtggccaacaagtgtgatgtgaagagaattgctgagctgtctgaagatgaccagaagatcttcacagacctgcagagcgagggcttccctgtgattgagaccagcaccctgacagaggagggcgtcatcaaggtgaagacagaggcctgtgaccggctgctggcccaccgggtggagaccaagatgaagggcaacaaggtgaatgaggtgctgaaccggctgcacctggccatccccaccaggagagatgacaaggagcggccccccttcatccctgagggcgtggtggcccggaggaagaggatggagacagaggagagcaggaagaagcgggagcgggacctggagctggagatgggagatgactacatcctggacctgcagaagtactgggacctgatgaacctgtctgagaagcatgacaagatccctgagatctgggagggccacaacattgctgactacatcgaccctgccatcatgaagaagctggaggagctggagaaggaggaggagctgaggacagctgctggggagtatgacagcgtgtctgagagtgaagatgaggagatgctggagatccggcagctggccaagcagatccgggagaagaagaagctgaagatcctggagagcaaggagaagaacacccagggccccaggatgcccaggacagccaagaaggtgcagaggacagtgctggagaaggagatgaggagcctgggcgtggacatggatgacaaggatgatgcccactatgctgtgcaggcccggcgcagccgcagcatcaccaggaagaggaagcgggaggacagcgccccacccagctctgtggcccggagcggcagctgcagcaggaccccaagagatgtgtctggcctgagagatgtgaagatggtgaagaaggccaagaccatgatgaagaatgcccagaagaagatgaaccggctgggcaagaagggggaggccgacagacatgtgtttgacatgaagcccaagcacctgctgagcggcaagaggaaggccggcaagaaggacagaagatag

SEQ ID NO: 174119 - DNA, 1764 bp, Artificial Sequence
  derived and/or modified sequence
atgaggaaggtgaagttcacccagcagaactaccatgaccggctgagccagatcctgacagacttccccaagctggatgacatccaccccttctatgctgacctgatgaacatcctgtatgacaaggaccactacaagctggccctgggccagatcaacatcgccaagaacctggtggacaacgtggccaaggactatgtgcggctgatgaagtacggggacagcctgtaccgctgcaagcagctgaagagagctgccctgggccgcatgtgcaccgtcatcaagaggcagaagcagagcctggagtacctggagcaggtgcggcagcacctgagccggctgcccaccatcgaccccaacaccaggaccctgctgctgtgtggctacccaaatgtgggcaagagcagcttcatcaacaaggtgaccagggcagatgtggatgtgcagccctatgccttcaccaccaagagcctgtttgtgggccacatggactacaagtacctgcgctggcaggtggtggacaccccaggcatcctggaccaccccctggaggacaggaacaccatcgagatgcaggccatcacagccctggcccacctgcgggctgctgtgctgtatgtgatggacctgtctgagcagtgtggccacggcctgcgggagcagctggagctgttccagaacatccggcccctcttcatcaacaagcccctcatcgtggtggccaacaagtgtgatgtgaagagaattgctgagctgtctgaagatgaccagaagatcttcacagacctgcagagcgagggcttccctgtgattgagaccagcaccctgacagaggagggcgtcatcaaggtgaagacagaggcctgtgaccggctgctggcccaccgggtggagaccaagatgaagggcaacaaggtgaatgaggtgctgaaccggctgcacctggccatccccaccaggagagatgacaaggagaggcctcccttcatccctgagggcgtggtggcccggaggaagaggatggagacagaggagagcaggaagaagcgggagcgggacctggagctggagatgggagatgactacatcctggacctgcagaagtactgggacctgatgaacctgtctgagaagcatgacaagatccctgagatctgggagggccacaacattgctgactacattgatcctgccatcatgaagaagctggaggagctggagaaggaggaggagctgaggacagctgctggggagtatgattctgtgtctgagagtgaagatgaggagatgctggagatccggcagctggccaagcagatccgggagaagaagaagctgaagatcctggagagcaaggagaagaacacccagggccccaggatgcccaggacagccaagaaggtgcagaggacagtgctggagaaggagatgaggagcctgggcgtggacatggatgacaaggatgatgcccactatgctgtgcaggcccggcgcagccgcagcatcaccaggaagaggaagagagaagattctgccccacccagctctgtggcccggagcggcagctgcagcaggaccccaagagatgtgtctggcctgagagatgtgaagatggtgaagaaggccaagaccatgatgaagaatgcccagaagaagatgaaccggctgggcaagaagggggaggccgacagacatgtgtttgacatgaagcccaagcacctgctgagcggcaagaggaaggccggcaagaaggacagaagatag

SEQ ID NO: 174120 - DNA, 1905 bp, Artificial Sequence
  derived and/or modified sequence
atggcccactacaacttcaagaagatcaccgtggtgcccagcgccaaggactttattgatctgacactgtcaaagactcagaggaaaacaccaacagtgattcataaacattaccagatccaccgaattagacatttttacatgaggaaggtcaagttcactcagcaaaattaccatgataggctttctcagatccttaccgattttccaaagctagacgatatacacccgttttatgctgatctgatgaacatcctttacgacaaggaccactacaagctcgccttagggcagattaacattgccaaaaatctggtggataatgtggccaaagattatgtgagactgatgaagtacggggattctctttatcggtgtaagcagttgaagcgagcagctctggggagaatgtgcacagtcatcaagagacaaaagcagtctctcgaatacctggagcaagtgcgccagcacttgagccggctgccaaccattgatccaaacacccgcacgctgttattatgtggttaccctaacgttggcaaatcatcattcattaacaaagtgacacgggccgatgttgatgtgcagccctacgcattcaccaccaaatctcttttcgtgggccacatggactacaaatatctgagatggcaggtggtcgacacaccggggatactagatcaccccttagaggatagaaacacaattgaaatgcaggccataacggctctcgcgcacctgcgggccgcagtgctttatgtgatggatctgagcgagcaatgtggacacggcctgcgcgaacagctggagctgttccagaatatcaggcctctcttcattaacaaacctttgatcgttgttgcaaataagtgcgacgtaaaacggatagccgagctctccgaagacgatcagaagatcttcaccgatttgcagagcgaaggatttcccgttatcgagacgtccaccctaacagaggagggagttattaaggttaaaaccgaggcgtgcgatcgtctcctggctcacagagtcgaaacaaagatgaaaggaaacaaagtcaatgaagtgctcaaccgcttgcacctagctattcccactcgacgggatgataaggagagacccccatttatccctgagggcgtggtggcgaggaggaaaaggatggaaaccgaggagtctcggaaaaagcgggagcgtgatcttgagctggagatgggcgatgactacatcctggacttgcagaaatattgggatttgatgaaccttagcgagaagcacgataaaatccctgaaatttgggaagggcacaacatagcagattacatcgaccctgcgatcatgaaaaagttagaagagctggagaaggaagaggagttacgcactgccgccggagaatatgattctgtctccgagagtgaagacgaggaaatgcttgaaattcggcagttggcaaagcagatccgggagaagaagaaactaaagatcctcgagtcaaaagagaagaacacccaaggaccacggatgcctaggaccgcaaaaaaggtgcagcgcacagtgctcgaaaaagagatgaggtccctgggagttgatatggacgacaaggacgacgcccattacgcagtgcaagcgcggcggagccgaagcatcaccagaaaaagaaaacgggaggactccgctcccccctcttctgttgcccgcagtggttcctgtagtcgtacacctcgagatgtgagtgggctgcgcgatgtaaaaatggtgaagaaagcgaaaacaatgatgaagaacgcacaaaagaagatgaaccgactcgggaagaagggcgaagcagatcggcatgtgttcgatatgaagcctaaacacctgctgtctggcaaacgaaaggctggcaagaaggaccggagatag

SEQ ID NO: 174121 - DNA, 1557 bp, Artificial Sequence
  derived and/or modified sequence
atgaagtacggcgacagcctgtaccggtgcaagcagctgaagcgggccgcactgggacgaatgtgtaccgtcatcaagaggcagaagcaatcgctcgagtacttagagcaagtgagacagcatctgtctaggctgccgaccatcgatcccaacactagaaccctgctcctttgcgggtacccgaacgtgggcaagagttccttcattaataaggtgacaagagccgacgttgatgtacagccatatgcctttaccaccaagagcctttttgttgggcacatggactacaaatatctacggtggcaggttgtggatacacctggtatactggatcatcctttagaagacagaaatactatcgaaatgcaggccattaccgcccttgcgcacttacgagcagctgtgctgtatgttatggatctgtctgagcagtgtggccatggcctccgggagcagctggagctgttccaaaatatcaggcctctgttcatcaataagccgcttatcgtggtggcaaataagtgcgacgttaagaggattgctgaactgagcgaggacgaccaaaaaatttttaccgatcttcagtcagaaggtttccccgtgatcgagaccagtaccctaactgaggaaggagttatcaaggtgaagactgaggcctgcgacaggctcctggcgcacagggtcgaaactaagatgaaggggaacaaagttaacgaggtgctcaaccgcctacatctcgccatacccacgagacgcgatgacaaggagcgccctccattcatcccagaaggtgttgtagcccggaggaagagaatggaaactgaggagtcaaggaaaaagcgagagcgcgacctcgagcttgagatgggcgacgattacattcttgatcttcagaagtattgggatcttatgaatctgtccgagaagcacgacaagatccccgagatctgggagggtcacaatatcgctgattacattgatccggcaataatgaagaagctggaagaactggaaaaagaggaagagctgagaaccgcggcaggagaatatgacagcgtcagtgaaagcgaagacgaagagatgctggaaattcgacagctagcgaaacagattcgtgagaagaagaaactgaagatcctggagagcaaggaaaagaatactcaggggcctagaatgcctaggacagcaaaaaaggtacaacggacagttttggagaaggagatgcgatcccttggggtggacatggacgataaagatgatgcacattatgcggtgcaggcccgccgctctaggagcataaccagaaagaggaaaagagaggactccgcaccaccttcctctgtggccaggtccggcagctgttcacgtactcccagagacgtctctggacttagagacgtgaaaatggtcaagaaagcaaagaccatgatgaaaaacgcacagaagaaaatgaaccgccttggaaagaagggtgaggcagacaggcacgtattcgacatgaagccaaaacacctgctttccggaaagagaaaggccgggaaaaaggatcgccggtag

SEQ ID NO: 174122 - DNA, 1764 bp, Artificial Sequence
  derived and/or modified sequence
atgcggaaggtgaagttcacccagcagaactaccacgaccggctgagtcagatcttaactgatttccctaaactggatgatattcatcctttttatgccgacctgatgaatatcttatatgataaggaccactataaacttgcactggggcagatcaacatcgcaaagaacttagtcgataatgtggctaaggattatgtcagactcatgaagtatggcgatagtttgtaccgctgcaaacaactcaaacgggcagctcttggccggatgtgcaccgtaattaagagacagaaacaaagtctggaataccttgagcaggtccgccagcacctctccagactgcccacaatcgacccaaacacccggactcttctactctgcggataccccaatgtcggtaagagcagcttcatcaacaaagtgacaagagccgacgtcgacgtacagccgtatgcatttaccacaaagtcactatttgtgggtcatatggactacaaatatctcaggtggcaagtagtcgacactcctggaatcttggaccatccgctggaggacaggaataccatcgagatgcaagccatcaccgcgctcgcccacttgcgagccgctgtgctgtatgtgatggatttatcggaacaatgcggccacggactacgtgagcagctcgagctcttccagaacattaggccactgttcatcaacaagccgctcatcgttgttgcaaacaaatgtgatgtaaaaaggatcgctgagttgagcgaggacgatcaaaagatctttacagatttgcagagtgaaggttttcctgtgatcgaaacctccacccttacagaggagggagtcattaaagtcaagacagaagcctgtgaccggctgctggcacatagagtggagactaagatgaaaggtaacaaagtgaacgaagtcttaaatcgcctccatttagctatcccaacaaggcgagacgataaagagcggccccccttcatacctgaaggcgtcgtggccagacgaaaaaggatggagacagaggagtcccgtaagaagagggaaagagacctggagcttgagatgggcgacgattatattctcgatctgcaaaagtactgggatcttatgaatttgtctgaaaagcacgacaaaattccagagatctgggagggccacaatattgcagactatatcgatcccgcaatcatgaaaaaattggaagagttggaaaaggaagaggaattgcggactgcagccggtgagtacgacagcgtatcagagtccgaggacgaggagatgcttgaaatccgccagcttgccaagcaaatccgtgagaagaagaaattaaagatcttagagtctaaggaaaaaaatacacaggggcctcgcatgcctcggacggcaaagaaggtgcagagaacagtcctggagaaggaaatgcgtagcctgggtgttgacatggatgataaggacgatgcacattatgctgttcaggcaagacgctctcgatctattactcgaaagaggaaaagggaagatagtgcaccgccttcttccgtggctagatctggctcatgtagtcgcacacctagggacgtgagtggacttcgtgatgttaaaatggtcaagaaggccaagactatgatgaagaatgcgcagaagaagatgaatcgattgggtaagaaaggggaagccgacaggcacgtgtttgatatgaagcctaagcatctcctaagtgggaaaagaaaggccggaaagaaggaccggcggtag

SEQ ID NO: 174123 - DNA, 1905 bp, Artificial Sequence
  derived and/or modified sequence
atggctcactataatttcaaaaaaatcaccgtggtcccgtctgccaaggacttcatcgatttgaccctgagtaagacccaaagaaaaacccccacagtcatccataagcactatcagatccacagaatccgacatttttacatgaggaaagtgaagttcacacaacagaactaccacgacaggctctcacagatacttaccgattttcctaaattggatgacattcatcctttttacgcagacctgatgaatatcctctatgacaaggatcactacaagcttgccttaggtcaaattaacattgctaaaaatcttgtcgacaacgtagctaaggattacgtgagactgatgaagtacggagacagcctctatagatgcaagcagctcaagagagcagccctgggcagaatgtgcactgtgatcaaaaggcagaagcagagcttagagtatctggaacaggtgagacagcaccttagccggctgcccacaattgacccgaacaccagaaccctcctgctatgtggttaccccaatgtcgggaaatcttcctttattaacaaggtgacaagagctgacgttgacgtgcagccctacgcttttaccacgaaatccctgtttgtgggccacatggactacaagtatctgaggtggcaggtggtggatacaccgggtatcctggaccaccccctcgaagatcgaaatacaatagagatgcaagccataacggcattggcccacctgcgtgctgccgttctatatgtcatggatttgtctgaacagtgtgggcacggcctgcgtgagcagctcgagttgtttcagaatattcgcccattgttcattaacaagcctctgatagtggtagcaaacaagtgcgacgttaagcggatcgccgagttatccgaggacgaccagaaaatatttaccgatctccagtcagaagggttcccagttatcgaaacttcgaccctcacagaggagggcgtgattaaagtgaagaccgaagcctgcgaccggctcttggctcatagagtggagaccaaaatgaaagggaataaagtgaatgaggtcttaaatagactgcatttggccatcccgacacgcagggatgataaggaacgaccacccttcatacctgaaggggtggtggcacgtcggaaaagaatggagactgaggaaagtcggaagaaacgtgaacgtgacctggagcttgagatgggggatgattatatcttagatttgcagaagtactgggatctgatgaacctttccgaaaagcatgacaaaatccctgaaatctgggaggggcacaacattgccgactacatcgaccccgcaataatgaagaagctggaggaacttgaaaaagaggaggagctgaggaccgcagcaggtgagtacgactccgtatctgaaagtgaggacgaagaaatgttggagatcagacagctagccaaacagatccgggagaaaaagaagctgaagattcttgaatccaaggaaaagaacacccagggtccacgcatgccacgcacagcaaaaaaagtgcagcgtaccgtgctggaaaaagagatgcgaagtcttggcgtagacatggacgacaaggatgacgcccattacgctgttcaggccagaaggagcagatcaattacaagaaagagaaaacgagaggacagcgcaccaccatcatcggttgccagaagtgggagctgcagtcgtacccctagggacgtttcagggctgcgcgacgtgaagatggtgaagaaagctaagacaatgatgaagaatgcacagaaaaaaatgaacaggctggggaagaaaggcgaggccgatcggcacgtgtttgatatgaaacccaagcaccttctcagcggaaagcgcaaggccggaaaaaaggatcgacgctag

SEQ ID NO: 174124 - DNA, 1557 bp, Artificial Sequence
  derived and/or modified sequence
atgaagtatggagactccctgtatagatgtaagcagttaaagcgcgcagccctggggagaatgtgcacagtgattaagagacagaaacagagcctcgagtatctcgaacaggtgcgtcagcatctttccaggctaccaacaatcgatcctaacacccgaacactcctattatgcggatacccaaatgtaggcaagtcctcctttatcaacaaggtgacgcgagccgatgtggatgtgcagccgtatgccttcaccactaagagcctctttgtcggccacatggactacaagtacttacgctggcaggttgtggatacacctggaattctggaccatcccttagaagaccgcaacactatcgaaatgcaggcaatcactgcgctggcgcacctccgagcggctgttctgtacgtgatggatctttcggagcagtgtggccacggtctcagggagcagctcgaactgttccaaaatattcgaccactctttatcaataaacccctgatcgtggtggccaacaagtgcgatgttaaaaggatcgctgagctgagcgaggatgaccaaaaaatcttcactgatctccagtcagagggcttccctgtaattgaaacctccaccctgaccgaggaaggcgtgattaaagtgaagaccgaagcctgcgataggttgctcgctcaccgcgttgaaactaaaatgaaaggaaacaaggtcaatgaggtgctgaatagactccatctcgccattcctacccgacgagatgacaaggagaggcctcctttcatccccgagggcgtcgtggctcggagaaagcgcatggagaccgaggaaagccgaaaaaagcgtgagcgggatctggaactcgaaatgggcgatgattacattttggatctccagaagtactgggatcttatgaatctatctgagaagcatgataagattccggagatatgggaaggtcacaacattgcggattatatcgaccccgcaatcatgaagaaactggaggaacttgaaaaggaagaggaactaagaactgcagccggagaatatgatagcgtgagtgagtctgaggacgaggaaatgctcgagattcgccagctcgcgaagcaaataagagaaaaaaagaaactcaagatcctggaatccaaagagaagaatacccagggcccacgcatgcctcgcaccgcgaagaaggttcagaggaccgtgcttgagaaggaaatgcgttccctcggcgtggatatggatgataaggatgacgcgcactatgcagttcaggctcgcagatcccggagcatcacccgcaagcgaaagcgggaagattcagcaccgccttctagcgtggctcggagtggatcatgttcccgcactcccagggatgtctccgggctgcgggatgtgaaaatggtaaagaaggctaagactatgatgaaaaatgctcagaaaaagatgaaccgcctcggaaaaaagggcgaggccgacaggcatgtgtttgatatgaagcctaagcatctcctgagcgggaagagaaaagcaggtaaaaaagaccgaagatag

SEQ ID NO: 174125 - DNA, 1764 bp, Artificial Sequence
  derived and/or modified sequence
atgcggaaggttaagtttacgcagcagaactatcacgacaggctgtcccagattttaacagacttccccaagcttgacgatattcaccctttttatgcggaccttatgaacattctctacgataaggatcactacaagctagcactggggcagattaatattgcgaagaatttggtggataatgttgccaaggattatgtgcgccttatgaagtacggggactccttgtatcgttgcaaacagttaaaaagagctgctcttggaagaatgtgcaccgtaataaagagacagaaacagagcctggagtatctggaacaggtcagacaacatctttcccggctaccgacaatagatccgaatactaggacgctgttgctatgtggataccccaatgtcggaaagtcttctttcatcaacaaagtgacccgggctgatgtggacgtgcaaccatacgcttttaccactaagtctctgttcgtcggtcacatggactacaaatatctgcggtggcaagtggtggacacaccaggcattctggaccaccccctggaggaccgaaacacaattgagatgcaggcaattaccgctctcgcgcacctccgtgctgctgtactttatgtgatggaccttagcgagcagtgcgggcatggcctgagagagcaactggagcttttccaaaacattcggccattattcatcaataagcctctgatcgttgtcgcgaacaagtgcgatgtaaagcgaattgctgagctgagtgaagacgatcagaaaatctttaccgacctgcagagcgaaggctttcccgttatcgaaaccagtaccctcacagaggaaggcgtcatcaaggtcaaaacagaagcctgcgataggctcttggcccatcgtgtcgagaccaaaatgaagggaaataaggttaatgaggtcctgaataggttgcatctggcaatccccaccaggagagacgataaggaaaggccaccattcattcccgagggtgtggtggccagacgtaagaggatggaaaccgaagagtcccgaaagaagcgtgagcgagaccttgaactggagatgggcgatgattacatcctggacctgcagaagtattgggacctgatgaacctctccgagaaacacgataaaattcccgagatctgggaggggcataatatagcagattatatcgaccccgcaatcatgaagaaactggaagagctagagaaggaggaagaactgcgtaccgcagccggtgagtacgactcagtttctgaatctgaagatgaggaaatgcttgagattcgccagctcgctaagcagattagggaaaaaaaaaagcttaaaattctggaatcaaaggagaaaaatacccagggtccgagaatgccaagaaccgcgaagaaagtgcagaggaccgtgctggagaaggaaatgcgctcactcggcgtcgacatggatgataaggatgacgcgcactacgcagtgcaggctcgccgatctaggtctatcacaagaaagcgaaagagggaggatagcgccccaccctccagtgtcgccagaagtggatcttgtagcagaacccccagggatgtaagcggccttcgagacgttaagatggtgaagaaggccaaaacaatgatgaagaatgctcaaaagaagatgaacagactggggaaaaagggcgaagctgaccggcacgtgtttgacatgaaacctaagcatctattgtccggtaaaagaaaagcgggtaagaaggatcgcagatag

SEQ ID NO: 174126 - protein, 260 aa, Artificial Sequence
  derived and/or modified sequence
MDRHSSYIFIWLQLELCAMAVLLTKGEIRCYCDAAHCVATGYMCKSELSACFSRLLDPQNSNSPLTHGCLDSLASTTDICQAKQARNHSGTTIPTLECCHEDMCNYRGLHDVLSPPRGEASGQGNRYQHDGSRNLITKVQELTSSKELWFRAAVIAVPIAGGLILVLLIMLALRMLRSENKRLQDQRQQMLSRLHYSFHGHHSKKGQVAKLDLECMVPVSGHENCCLTCDKMRQADLSNDKILSLVHWGMYSGHGKLEFV

SEQ ID NO: 174127 - protein, 247 aa, Artificial Sequence
  derived and/or modified sequence
MDRHSSYIFIWLQLELCAMAVLLTKGEIRCYCDAAHCVATGYMCKSELSACFSRLLDPQNSNSPHICQAKQARNHSGTTIPTLECCHEDMCNYRGLHDVLSPPRGEASGQGNRYQHDGSRNLITKVQELTSSKELWFRAAVIAVPIAGGLILVLLIMLALRMLRSENKRLQDQRQQMLSRLHYSFHGHHSKKGQVAKLDLECMVPVSGHENCCLTCDKMRQADLSNDKILSLVHWGMYSGHGKLEFV

SEQ ID NO: 174128 - DNA, 783 bp, Artificial Sequence
  derived and/or modified sequence
atggaccgtcactcgtcgtacattttcatttggttacagttagaactctgcgctatggccgtactcctaacaaaaggagaaatccgctgctactgcgatgccgcacactgcgtcgcgaccggttatatgtgcaagtcagagttgagcgcatgcttttcaaggctcctcgatcctcagaattcgaattcacctctgacccatgggtgcctggacagcctggccagtacgacagacatctgtcaggctaagcaggcaaggaaccacagtggcacaacgattccaacccttgaatgttgtcacgaagatatgtgcaactacaggggtctacatgacgtgctttcccctccgagaggtgaagcttccggacagggaaatcgctaccagcatgatgggtctaggaatctgataactaaggtgcaagagttaacatcctctaaggaactgtggtttcgcgctgccgtgattgccgttcccatagctggagggttaatcctggtgttactgattatgcttgctcttcgcatgctcagatctgagaacaaacgcctgcaagatcagcggcagcaaatgctctctcggctccattactcctttcacgggcaccactctaagaaggggcaggtggctaagctcgatctggagtgcatggttccagtgtctggccatgaaaactgctgccttacttgtgacaagatgaggcaggcagacctgtccaacgataagattctgagcttggtgcactggggaatgtattctggccacgggaagttggaatttgtgtag

SEQ ID NO: 174129 - DNA, 744 bp, Artificial Sequence
  derived and/or modified sequence
atggatcgacatagctcctacatctttatttggctccaacttgaactgtgcgccatggccgtcctccttaccaagggggagatcaggtgttattgcgacgctgcgcactgcgttgcgactggctacatgtgcaaaagtgagctgtcagcatgcttcagccgcctgcttgatccacagaactctaattcacctcatatatgtcaagcaaaacaggcccgtaaccactctggaacaacaattccaaccctggaatgctgtcacgaagacatgtgcaattatagaggactgcatgacgtgttgtcgcctccaaggggcgaggcttctggccaggggaaccgctaccagcacgacggcagcaggaacctgatcaccaaagtgcaggagttaacctcaagcaaggagctgtggttccgagcagccgtgattgccgtgcctatcgcaggcgggctgatactggtgctcctcatcatgcttgccctccgtatgctgcggtctgagaacaagcgcctacaggaccaacggcagcagatgctttccaggttgcactacagctttcacggacaccatagtaagaaaggccaggtggctaaattagatttggaatgtatggtgcctgtttctgggcacgaaaattgctgcctcacttgtgacaagatgcgtcaagccgacctatctaatgataaaatcctgagccttgtgcattggggcatgtattccggccatgggaaactagagtttgtgtag

SEQ ID NO: 174130 - DNA, 783 bp, Artificial Sequence
  derived and/or modified sequence
atggacagacacagcagctacatcttcatctggctgcagctggagctgtgtgccatggctgtgctgctgaccaagggggagatccgctgctactgtgatgctgcccactgtgtggccaccggctacatgtgcaagtctgagctgagcgcctgcttcagccggctgctggacccccagaacagcaacagccccctgacccacggctgcctggacagcctggccagcaccacagacatctgccaggccaagcaggccaggaaccacagcggcaccaccatccccaccctggagtgctgccacgaggacatgtgcaactaccggggcctgcatgatgtgctgagccccccaagaggagaggccagcggccagggcaaccgctaccagcatgatggcagcaggaacctgatcaccaaggtgcaggagctgaccagcagcaaggagctgtggttccgggctgctgtgattgctgtgcccatcgccggcggcctcatcctggtgctgctgatcatgctggccctgaggatgctgcggtctgagaacaagaggctgcaggaccagaggcagcagatgctgagccggctgcactacagcttccacggccaccacagcaagaagggccaggtggccaagctggacctggagtgcatggtgcctgtgtctggccacgagaactgctgcctgacctgtgacaagatgaggcaggccgacctgagcaatgacaagatcctgagcctggtgcactggggcatgtacagcggccacggcaagctggagtttgtgtag

SEQ ID NO: 174131 - DNA, 744 bp, Artificial Sequence
  derived and/or modified sequence
atggacagacacagcagctacatcttcatctggctgcagctggagctgtgtgccatggctgtgctgctgaccaagggggagatccgctgctactgtgatgctgcccactgtgtggccaccggctacatgtgcaagtctgagctgagcgcctgcttcagccggctgctggacccccagaacagcaacagcccccacatctgccaggccaagcaggccaggaaccacagcggcaccaccatccccaccctggagtgctgccacgaggacatgtgcaactaccggggcctgcatgatgtgctgagccccccaagaggagaggccagcggccagggcaaccgctaccagcatgatggcagcaggaacctgatcaccaaggtgcaggagctgaccagcagcaaggagctgtggttccgggctgctgtgattgctgtgcccatcgccggcggcctcatcctggtgctgctgatcatgctggccctgaggatgctgcggtctgagaacaagaggctgcaggaccagaggcagcagatgctgagccggctgcactacagcttccacggccaccacagcaagaagggccaggtggccaagctggacctggagtgcatggtgcctgtgtctggccacgagaactgctgcctgacctgtgacaagatgaggcaggccgacctgagcaatgacaagatcctgagcctggtgcactggggcatgtacagcggccacggcaagctggagtttgtgtag

SEQ ID NO: 174132 - DNA, 783 bp, Artificial Sequence
  derived and/or modified sequence
atggaccggcacagcagctacatcttcatctggctgcagctggagttgtgcgccatggccgtgttactgacaaagggggaaatcagatgttattgcgacgccgcgcactgtgtagcaacaggctacatgtgtaagtccgagctttccgcatgttttagtagactgctcgacccacagaatagtaactcccctctgacacacgggtgcctagattcactggcctcgactacggatatctgtcaagctaagcaggccagaaatcattccggcacaacgatccctacacttgagtgctgccatgaagatatgtgtaactatcgcggattgcatgatgtgctgtctcccccccgcggcgaagccagcggccaaggcaaccgttaccagcacgatggctctcgcaaccttattacgaaagtacaggaactcaccagcagcaaagaactgtggtttcgagccgccgtgattgcagttcctatagcaggtggactaatattggttctgctgattatgttagcgctgaggatgctcagaagcgagaataaaagattgcaagatcagaggcagcagatgctgagcagactgcactattcattccatggccatcattcaaaaaagggtcaggtagctaagttggaccttgaatgtatggtgccagttagtgggcacgagaactgttgcctcacctgtgataagatgcgccaagccgacctgtccaatgacaagatcctatcccttgtgcactggggtatgtactcaggtcacgggaaacttgaatttgtttag

SEQ ID NO: 174133 - DNA, 744 bp, Artificial Sequence
  derived and/or modified sequence
atggaccggcacagcagctacatcttcatctggctgcagctggagttgtgtgcgatggcagtactcctcacgaaaggggaaatccgctgctactgtgacgccgcacactgcgtggccaccggctatatgtgtaagagcgagctcagcgcatgcttttctcggttattagacccacagaatagtaattcacctcatatatgccaagctaagcaggcccgaaatcattcggggacaacgatccctactctagagtgctgccacgaagacatgtgtaactatcggggcctgcacgacgtgcttagccctcccaggggcgaggcaagcggccaggggaaccgatatcagcatgacgggagtcggaatctgataacaaaagtacaggagttaacatccagcaaagaactgtggttccgcgctgcggtgattgcggtgcctatagctgggggtctgatccttgtgctgcttatcatgctagcattacgtatgctgcgctccgaaaacaaacgcctccaagaccagcggcaacaaatgctgtcccgcctccattattcattccatgggcatcatagtaaaaagggccaagtggcgaagctggatcttgaatgcatggtgcctgtgtcaggtcacgaaaactgctgtctgacctgtgacaagatgaggcaggcagatctcagcaatgataagattctgtccctggttcattggggcatgtattctggccacggcaaactggaattcgtgtag

SEQ ID NO: 174134 - DNA, 783 bp, Artificial Sequence
  derived and/or modified sequence
atggaccgccacagctcctacatcttcatctggctgcagttagaattgtgcgccatggcggtgttgctcaccaaaggcgaaatccgctgttactgcgacgccgctcactgcgtggccaccgggtacatgtgtaagtcggagctcagtgcctgcttcagcagacttctagaccctcaaaattcaaattcccctctaactcacggctgtctggacagcctcgctagcaccaccgatatatgccaggccaaacaggccaggaatcacagcgggaccacgattccaacactcgaatgctgccacgaggacatgtgtaactatcgcggtttgcacgatgtcctcagcccgccacggggagaggcaagtgggcagggaaaccgctatcagcatgatgggagccgcaatctgattaccaaggtgcaagagctcaccagcagcaaggaactctggtttcgggcagctgtgattgcagtccctatcgcaggaggcctgatccttgtcctcctgattatgctggctttacgtatgctacggagcgagaataaaaggctccaagaccaaagacaacagatgttgtcacgactgcattattcattccacgggcaccactcaaagaaaggacaggtcgcaaaactcgatttagagtgcatggtccccgtgtccggtcatgaaaattgctgtctgacctgcgacaagatgcggcaggcggacctctctaatgacaaaatcctcagcctcgtgcactggggaatgtatagtggccacggcaagctagaattcgtctag

SEQ ID NO: 174135 - DNA, 744 bp, Artificial Sequence
  derived and/or modified sequence
atggacagacactcttcttatattttcatctggctgcagttggaactgtgtgcgatggctgtcctgctaacgaagggagagattaggtgctactgtgacgccgcacactgtgtggccacaggctacatgtgtaagtccgagttgtccgcttgcttttcccgcctactcgatccccagaattcaaacagtcctcatatttgccaagccaagcaggcacgaaaccactccggaactactattcctacacttgagtgctgtcatgaggacatgtgtaattatagaggcctccatgatgtgctgtcccctccccgaggtgaagccagcggacaaggcaaccgttatcagcacgacggctcccgcaatcttatcacaaaggtccaggagctaacaagtagcaaggagctgtggtttcgggcagctgtgatcgcagtgcctattgccggtggtttgatcctggtactacttattatgcttgctctgcgaatgttacggagcgaaaataagagattacaggatcaacgacagcagatgctgagtagattacactatagttttcacggccatcattccaaaaaggggcaggtagcaaagctcgacctggaatgcatggtacccgtgagcgggcatgaaaattgttgcctgacttgcgacaaaatgagacaggcggatctctcgaacgacaaaatcttatcactagtgcattggggcatgtattctggccacgggaagcttgaatttgtgtag

SEQ ID NO: 174136 - DNA, 1877 bp, Artificial Sequence
  derived and/or modified sequence
cgccgctcggagccgccgggcaggtcccccagcgctcgcgtctgggcccgccccccgctgcggggcggattgacaggagcccggcggccaatcggacgccgtggggcggggcgaggcggggcggtgcaggccggctcccggcgcggggcgctatttacggcgcggagccggagagacctgggctggcgcgggcgggagctgcggcggatacccttgcgtgctgtggagaccctactctcttcgctgagaacggccgctagcggggactgaaggccgggagcccactcccgacccggggctagcgtgcgtccctagagtcgagcggggcaagggagccagtggccgccgacgggggaccgggaaacttttctgggctcctgggcgcgccctgtagccgcgctccatgctccggcagcggcccgaaacccagccccgccgctgacggcgcccgccgctccgggcagggcccatgccctgcgcgctccgggggtcgtaggctgccgccgagccggggctccggaagccggcgggggcgccgcggccgtgcggggcgtcaatggatcgccactccagctacatcttcatctggctgcagctggagctctgcgccatggccgtgctgctcaccaaaggtgaaattcgatgctactgtgatgctgcccactgtgtagccactggttatatgtgtaaatctgagctcagcgcctgcttctctagacttcttgatcctcagaactcaaattccccactcacccatggctgcctggactctcttgcaagcacgacagacatctgccaagccaaacaggcccgaaaccactctggcaccaccatacccacattggaatgctgtcatgaagacatgtgcaattacagagggctgcacgatgttctctctcctcccaggggtgaggcctcaggacaaggaaacaggtatcagcatgatggtagcagaaaccttatcaccaaggtgcaggagctgacttcttccaaagagttgtggttccgggcagcggtcattgccgtgcccattgctggagggctgattttagtgttgcttattatgttggccctgaggatgcttcgaagtgaaaataagaggctgcaggatcagcggcaacagatgctctcccgtttgcactacagctttcacggacaccattccaaaaaggggcaggttgcaaagttagacttggaatgcatggtgccggtcagtgggcacgagaactgctgtctgacctgtgataaaatgagacaagcagacctcagcaacgataagatcctctcgcttgttcactggggcatgtacagtgggcacgggaagctggaattcgtatgacggagtcttatctgaactacacttactgaacagcttgaaggccttttgagttctgctggacaggagcactttatctgaagacaaactcatttaatcatctttgagagacaaaatgacctctgcaaacagaatcttggatatttcttctgaaggattatttgcacagacttaaatacagttaaatgtgttatttgcttttaaaattataaaaagcaaagagaagactttgtacacactgtcaccagggttatttgcatccaagggagctggaattgagtacctaaataaacaaaaatgtgccctatgtaagcttctacatcttgatttattgtaaagatttaaaagaaatatatatattttgtctgaaatttaatagtgtctttcataaatttaactgggaaacgtgagacagtacatgttaattatacaaatggccatttgctgttaataatttgttctcaactctaggatgtggcttggtttttttttttctcttttcttttttaaacaagaccaagatcttgcttattcttccatg

SEQ ID NO: 174137 - DNA, 1484 bp, Artificial Sequence
  derived and/or modified sequence
gctggcgcgggcgggagctgcggcggatacccttgcgtgctgtggagaccctactctcttcgctgagaacggccgctagcggggactgaaggccgggagcccactcccgacccggggctagcgtgcgtccctagagtcgagcggggcaagggagccagtggccgccgacgggggaccgggaaacttttctgggctcctgggcgcgccctgtagccgcgctccatgctccggcagcggcccgaaacccagccccgccgctgacggcgcccgccgctccgggcagggcccatgccctgcgcgctccgggggtcgtaggctgccgccgagccggggctccggaagccggcgggggcgccgcggccgtgcggggcgtcaatggatcgccactccagctacatcttcatctggctgcagctggagctctgcgccatggccgtgctgctcaccaaaggtgaaattcgatgctactgtgatgctgcccactgtgtagccactggttatatgtgtaaatctgagctcagcgcctgcttctctagacttcttgatcctcagaactcaaattccccacacatctgccaagccaaacaggcccgaaaccactctggcaccaccatacccacattggaatgctgtcatgaagacatgtgcaattacagagggctgcacgatgttctctctcctcccaggggtgaggcctcaggacaaggaaacaggtatcagcatgatggtagcagaaaccttatcaccaaggtgcaggagctgacttcttccaaagagttgtggttccgggcagcggtcattgccgtgcccattgctggagggctgattttagtgttgcttattatgttggccctgaggatgcttcgaagtgaaaataagaggctgcaggatcagcggcaacagatgctctcccgtttgcactacagctttcacggacaccattccaaaaaggggcaggttgcaaagttagacttggaatgcatggtgccggtcagtgggcacgagaactgctgtctgacctgtgataaaatgagacaagcagacctcagcaacgataagatcctctcgcttgttcactggggcatgtacagtgggcacgggaagctggaattcgtatgacggagtcttatctgaactacacttactgaacagcttgaaggccttttgagttctgctggacaggagcactttatctgaagacaaactcatttaatcatctttgagagacaaaatgacctctgcaaacagaatcttggatatttcttctgaaggattatttgcacagacttaaatacagttaaatgtgttatttgcttttaaaattataaaaagcaaagagaagactttgtacacactgtcaccagggttatttgcatccaagggagctggaattgagtacctaaataaacaaaaatgtgccctatgtaagcttctacatcttgatttattgtaaagatttaaaagaaatatatatattttgtctg

SEQ ID NO: 174138 - DNA, 783 bp, Artificial Sequence
  derived and/or modified sequence
atggacagacacagcagctacatcttcatctggctgcagctggagctgtgcgccatggccgtgctgctgaccaagggcgagatcagatgctactgcgacgccgcccactgcgtggccaccggctacatgtgcaagagcgagctgagcgcctgcttcagcagactgctggacccccagaacagcaacagccccctgacccacggctgcctggacagcctggccagcaccaccgacatctgccaggccaagcaggccagaaaccacagcggcaccaccatccccaccctggagtgctgccacgaggacatgtgcaactacagaggcctgcacgacgtgctgagcccccccagaggcgaggccagcggccagggcaacagataccagcacgacggcagcagaaacctgatcaccaaggtgcaggagctgaccagcagcaaggagctgtggttcagagccgccgtgatcgccgtgcccatcgccggcggcctgatcctggtgctgctgatcatgctggccctgagaatgctgagaagcgagaacaagagactgcaggaccagagacagcagatgctgagcagactgcactacagcttccacggccaccacagcaagaagggccaggtggccaagctggacctggagtgcatggtgcccgtgagcggccacgagaactgctgcctgacctgcgacaagatgagacaggccgacctgagcaacgacaagatcctgagcctggtgcactggggcatgtacagcggccacggcaagctggagttcgtgtag

SEQ ID NO: 174139 - DNA, 744 bp, Artificial Sequence
  derived and/or modified sequence
atggacagacacagcagctacatcttcatctggctgcagctggagctgtgcgccatggccgtgctgctgaccaagggcgagatcagatgctactgcgacgccgcccactgcgtggccaccggctacatgtgcaagagcgagctgagcgcctgcttcagcagactgctggacccccagaacagcaacagcccccacatctgccaggccaagcaggccagaaaccacagcggcaccaccatccccaccctggagtgctgccacgaggacatgtgcaactacagaggcctgcacgacgtgctgagcccccccagaggcgaggccagcggccagggcaacagataccagcacgacggcagcagaaacctgatcaccaaggtgcaggagctgaccagcagcaaggagctgtggttcagagccgccgtgatcgccgtgcccatcgccggcggcctgatcctggtgctgctgatcatgctggccctgagaatgctgagaagcgagaacaagagactgcaggaccagagacagcagatgctgagcagactgcactacagcttccacggccaccacagcaagaagggccaggtggccaagctggacctggagtgcatggtgcccgtgagcggccacgagaactgctgcctgacctgcgacaagatgagacaggccgacctgagcaacgacaagatcctgagcctggtgcactggggcatgtacagcggccacggcaagctggagttcgtgtag

SEQ ID NO: 174140 - protein, 410 aa, Artificial Sequence
  derived and/or modified sequence
METSSPRPPRPSSNPGLSLDARLGVDTRLWAKVLFTALYALIWALGAAGNALSAHVVLKARAGRAGRLRHHVLSLALAGLLLLLVGVPVELYSFVWFHYPWVFGDLGCRGYYFVHELCAYATVLSVAGLSAERCLAVCQPLRARSLLTPRRTRWLVALSWAASLGLALPMAVIMGQKHELETADGEPEPASRVCTVLVSRTALQVFIQVNVLVSFVLPLALTAFLNGVTVSHLLALCSQVPSTSTPGSSTPSRLELLSEEGLLSFIVWKKTFIQGGQVSLVRHKDVRRIRSLQRSVQVLRAIVVMYVICWLPYHARRLMYCYVPDDAWTDPLYNFYHYFYMVTNTLFYVSSAVTPLLYNAVSSSFRKLFLEAVSSLCGEHHPMKRLPPKPQSPTLMDTASGFGDPPETRT

SEQ ID NO: 174141 - DNA, 1233 bp, Artificial Sequence
  derived and/or modified sequence
atggagaccagcagccccagaccccccagacccagcagcaaccccggcctgagcctggacgccagactgggcgtggacaccagactgtgggccaaggtgctgttcaccgccctgtacgccctgatctgggccctgggcgccgccggcaacgccctgagcgcccacgtggtgctgaaggccagagccggcagagccggcagactgagacaccacgtgctgagcctggccctggccggcctgctgctgctgctggtgggcgtgcccgtggagctgtacagcttcgtgtggttccactacccctgggtgttcggcgacctgggctgcagaggctactacttcgtgcacgagctgtgcgcctacgccaccgtgctgagcgtggccggcctgagcgccgagagatgcctggccgtgtgccagcccctgagagccagaagcctgctgacccccagaagaaccagatggctggtggccctgagctgggccgccagcctgggcctggccctgcccatggccgtgatcatgggccagaagcacgagctggagaccgccgacggcgagcccgagcccgccagcagagtgtgcaccgtgctggtgagcagaaccgccctgcaggtgttcatccaggtgaacgtgctggtgagcttcgtgctgcccctggccctgaccgccttcctgaacggcgtgaccgtgagccacctgctggccctgtgcagccaggtgcccagcaccagcacccccggcagcagcacccccagcagactggagctgctgagcgaggagggcctgctgagcttcatcgtgtggaagaagaccttcatccagggcggccaggtgagcctggtgagacacaaggacgtgagaagaatcagaagcctgcagagaagcgtgcaggtgctgagagccatcgtggtgatgtacgtgatctgctggctgccctaccacgccagaagactgatgtactgctacgtgcccgacgacgcctggaccgaccccctgtacaacttctaccactacttctacatggtgaccaacaccctgttctacgtgagcagcgccgtgacccccctgctgtacaacgccgtgagcagcagcttcagaaagctgttcctggaggccgtgagcagcctgtgcggcgagcaccaccccatgaagagactgccccccaagccccagagccccaccctgatggacaccgccagcggcttcggcgacccccccgagaccagaacctag

SEQ ID NO: 174142 - DNA, 1233 bp, Artificial Sequence
  derived and/or modified sequence
atggagacctcttcgccgcgaccacctagaccttcctcaaacccaggtctcagccttgacgccagactgggagtcgacacaagactctgggctaaagtgctgttcacggctctgtacgccttaatctgggctctgggtgccgccggtaacgctctgtcagcacatgttgtgctgaaggcaagagccgggcgcgccggtaggctgcgccaccatgttctgtcacttgccctggcaggcctgctgctgctgctggtgggcgtacctgtggagctatacagcttcgtttggttccattatccgtgggttttcggcgacttaggatgtagaggatactactttgtgcatgaactatgtgcatacgcaaccgtgttatcagttgccggcctatctgctgaacgctgtctggctgtttgccagccgctgagagctcggtcgctgctgacgccacggagaacaagatggttggtcgctttgagctgggcggcgtccttgggcctggcccttccaatggctgtaataatgggccagaaacacgagctggaaactgctgatggcgagcccgaacccgctagccgggtatgcaccgtgctcgtctccaggaccgctttacaagtgttcattcaggtgaatgtgcttgtaagtttcgtgttgcccctagctctgaccgctttccttaacggcgtaaccgtgtctcatctcctggctctgtgctcccaggtgcctagcacctctacacctggaagttccaccccctcccggttggaacttctgtccgaggagggcctgctttccttcatcgtctggaagaagactttcatccagggagggcaggtctcactagtacgacacaaagacgtccgtcggattagatccctccaaaggagtgtacaggtgctgagagccatcgtggtcatgtacgttatctgttggcttccctatcacgcccgccgactgatgtattgttacgtgccagatgacgcctggacggaccctctgtataacttctatcattatttctacatggtgaccaatacgcttttttatgtgagtagcgctgtaactcctctgctatataacgccgtgagtagtagcttccggaagctctttctcgaggccgtttctagtctgtgtggtgagcatcacccaatgaagagattgcccccaaagcctcagagtcccacactgatggacaccgcctcaggattcggcgatcccccagaaactcgaacttag

SEQ ID NO: 174143 - DNA, 1233 bp, Artificial Sequence
  derived and/or modified sequence
atggagaccagcagcccccggcccccccggcccagcagcaaccctggcctgagcctggatgcccggctgggcgtggacacccggctgtgggccaaggtgctcttcaccgccctgtatgccctgatctgggccctgggcgctgctggaaatgccctgagcgcccacgtggtgctgaaggcccgggccggccgggccggccgcctgcggcaccacgtgctgagcctggccctggccggcctgctgctgctgctggtgggcgtgcctgtggagctgtacagctttgtgtggttccactacccctgggtgtttggagacctgggctgccggggctactactttgtgcatgagctgtgtgcctatgccaccgtgctgtctgtggccggcctgtctgctgagcgctgcctggccgtgtgccagcccctgcgggcccggagcctgctgacccccaggaggacccgctggctggtggccctgtcctgggccgccagcctgggcctggccctgcccatggctgtgatcatgggccagaagcatgagctggagacagcagatggagagcctgagcccgccagccgggtgtgcaccgtgctggtgtccaggacagccctgcaggtgttcatccaggtgaatgtgctggtgtcctttgtgctgcccctggccctgacagccttcctgaatggagtgacagtgagccacctgctggccctgtgcagccaggtgcccagcaccagcaccccaggcagcagcacccccagccggctggagctgctgtctgaggagggcctgctgtccttcatcgtgtggaagaagaccttcatccagggcggccaggtgtccctggtgcgccacaaggatgtgcggcgcatccgcagcctgcagaggtctgtgcaggtgctgcgggccatcgtggtgatgtatgtgatctgctggctgccctaccacgcccggcggctgatgtactgctacgtgcctgatgatgcctggacagaccccctgtacaacttctaccactacttctacatggtgaccaacaccctcttctacgtgtcctctgctgtgacccccctgctgtacaatgctgtgagcagcagcttcaggaagctgttcctggaggccgtgagcagcctgtgtggggagcaccaccccatgaagaggctgccccccaagccccagagccccaccctgatggacacagccagcggctttggagaccccccagagaccaggacatag

SEQ ID NO: 174144 - DNA, 1569 bp, Artificial Sequence
  derived and/or modified sequence
agtgagagggagggagcgccggccgcgggagcgggatggaaaccagcagcccgcggcccccgcggcccagctccaacccggggctgagcctggacgcccggctgggcgtggacactcgcctctgggccaaggtgctgttcaccgcgctctacgcactcatctgggcgctgggcgcggcgggcaatgcgctgtccgcgcacgtggtgctgaaggcgcgggccgggcgcgcggggcgcctgcgccaccacgtgctcagcctggcgctcgcgggcctgctgctgctgctggtcggcgtgccggtggagctctacagcttcgtgtggttccactacccctgggtcttcggcgacctgggctgccgcggctactacttcgtgcacgagctgtgcgcctacgccacggtgctgagcgtggcaggcctgagcgccgagcgctgcctagccgtgtgccagcccctgcgtgcccgcagcctgctgacgccacgccggacccggtggctggtggcgctctcgtgggccgcctcgctcggcctcgccctgcccatggccgtcatcatggggcagaagcacgaactcgagacggcggacggggagccggagcccgcctcgcgagtgtgcacggtgctggtgagccgcaccgcgctccaagtctttatccaggtgaatgtgctggtgtccttcgtgctccccttggcactaactgctttcctgaatggggtcacagtgagccacctgctggccctctgctcccaagtgccgtccacttctaccccgggcagctccacccccagccgcctggagctgctgagtgaggagggtctcctcagcttcatcgtatggaagaagacctttatccagggaggccaggtcagcctggtgagacataaagacgtgcgccggatccgcagcctccagcgcagcgtccaggttctcagagccatcgtggtcatgtatgtcatctgctggctgccgtaccatgcccgcaggctcatgtactgctacgtacctgatgacgcgtggactgacccactgtacaatttctaccactacttctacatggtgaccaacacacttttctacgtcagctcagctgtgactcctcttctctacaacgccgtgtcctcctccttcagaaaactcttcctggaagccgtcagctccctgtgtggagagcaccaccccatgaagcggttacccccgaagccccagagtcccaccctaatggatacagcttcaggctttggggatcccccagaaacccggacctgaatgtaatgcaagaatgaacagaacaagcaaaatgaccagctgcttagtcacctggcaaagcaggtgagcaacctcatcactaatcattcaagcttcgcagccagggcgacttctatcaacccctgctctgctgagaaccatcaagcgcagggaagccacgtgacccctcctagcctcaggctccctcgtctgtgtagtggagataaagaacagcacccatctcttagtgttgcctgagactaaagtgcttagcacagaacctggtgcgtagtagatgctcaataaatttttgctggcacga

SEQ ID NO: 174145 - DNA, 1233 bp, Artificial Sequence
  derived and/or modified sequence
atggagaccagcagcccccggcccccccggcccagcagcaaccccgggctgagtttggacgctcgtttgggagtggacactagattgtgggccaaggtgcttttcacggccttgtacgccctcatctgggccttaggcgcagcggggaatgccctgtccgcacacgtggtcctgaaggcccgagcgggacgagcgggtcgactgcggcatcacgtgctaagcctcgctcttgctgggctgcttctgctcctcgtcggcgtgccagtggagctgtatagctttgtctggttccactacccttgggtcttcggggatctcggttgcaggggatactatttcgtccacgaactgtgtgcctatgcgacagtgctgtctgtagccggcctgtctgccgaacgatgccttgcagtgtgccagcctctgcgggctcgatcattacttactcccaggaggacccggtggctcgtagcactctcgtgggcagcctccttgggtctggcccttcccatggcagttatcatgggccagaagcatgagctggagacagctgacggagagcccgaaccggcgagtcgagtctgtactgtattagtttccaggactgctctgcaagtattcatccaggtcaatgttctggtctctttcgtgcttccattggccctgaccgcttttctgaatggtgtcactgtctctcatctgctcgccttgtgtagtcaggtccccagcacgagtactcctggaagcagcacaccatccaggctcgaattgctcagcgaagagggcctgctttcctttatcgtatggaagaaaacattcatacaaggtggccaggtctctttggtccgtcataaggacgtccgcaggattcggagcctccagcgcagtgtgcaggtcctcagggcaattgttgttatgtacgtgatttgttggctgccataccatgcacgacgactgatgtactgttatgttccggacgacgcatggaccgatcccctttataatttttaccactacttctacatggtaaccaacactttattctatgtgtcatccgctgtgacccctctgctgtataatgcagtgtccagctctttcagaaagctgttccttgaagctgtgtcttctctttgtggggagcaccatccaatgaaaaggctgcccccaaaaccgcagtccccaacactgatggacaccgccagcgggttcggggaccccccagaaacacggacatag

SEQ ID NO: 174146 - DNA, 1233 bp, Artificial Sequence
  derived and/or modified sequence
atggaaacaagctcacctagacctccaagacctagttcaaatccgggactcagcctggacgccagactgggtgtcgataccaggctgtgggcaaaagtgttgtttacggcactgtacgcgctcatttgggctctcggcgcagcgggtaatgccctatccgcccacgtggtcctgaaggccagggcagggagggctggtagactgcggcatcatgtcctgtcactggcgctagctggactcctcctcttgttggtcggtgttcctgtagagctgtatagcttcgtgtggtttcactatccatgggtgtttggtgatctgggatgccgtggctattattttgtgcatgagctctgcgcttatgccaccgttctgtccgtggccggactgtccgccgaacgctgtctggccgtgtgccagcctctgagggctcggagcctccttaccccaagaagaactcgctggctagttgccctatcttgggccgcatcgctgggcctagctttgccaatggccgttattatgggccagaaacacgaattggaaactgccgatggtgagcctgagccagcgtcaagagtgtgtacagtactggtaagccggacagctcttcaagtgttcatccaggttaacgtcctggtctcattcgtcctgcccctggctctgacagcctttttgaatggtgtgacagtgagccacctgcttgctctatgcagccaagtgccatctacgagcactcctggaagttcaacgccatcgaggcttgagttgctgtcagaggagggccttctgtccttcatagtctggaaaaaaactttcattcaaggcggacaagtcagcctggttcgtcataaggatgtcagaagaatccgttctctgcagagatccgtacaggtcctgagagccattgtggtaatgtatgtcatatgctggctcccctaccacgctaggagactgatgtattgctacgtgccagatgatgcttggacagatccgctctacaacttttatcattatttctacatggtgacaaacacgctattttacgtgagttccgctgtcacacccctgctgtacaatgcagtctcatcatcgttcagaaaactctttcttgaggctgtgagtagtctgtgtggagagcatcaccccatgaaacggctgccacctaagccacaatctcccactcttatggatacagcctctggctttggcgatccgccagagacaaggacatag

SEQ ID NO: 174147 - protein, 495 aa, Artificial Sequence
  derived and/or modified sequence
MAEPTSDFETPIGWHASPELTPTLGPLSDTAPPRDSWMFWAMLPPPPPPLTSSLPAAGSKPSSESQPPMEAQSLPGAPPPFDAQILPGAQPPFDAQSPLDSQPQPSGQPWNFHASTSWYWRQSSDRFPRHQKSFNPAVKNSYYPRKYDAKFTDFSLPPSRKQKKKKRKEPVFHFFCDTCDRGFKNQEKYDKHMSEHTKCPELDCSFTAHEKIVQFHWRNMHAPGMKKIKLDTPEEIARWREERRKNYPTLANIERKKKLKLEKEKRGAVLTTTQYGKMKGMSRHSQMAKIRSPGKNHKWKNDNSRQRAVTGSGSHLCDLKLEGPPEANADPLGVLINSDSESDKEEKPQHSVIPKEVTPALCSLMSSYGSLSGSESEPEETPIKTEADVLAENQVLDSSAPKSPSQDVKATVRNFSEAKSENRKKSFEKTNPKRKKDYHNYQTLFEPRTHHPYLLEMLLAPDIRHERNVILQCVRYIIKKDFFGLDTNSAKSKDV

SEQ ID NO: 174148 - DNA, 1488 bp, Artificial Sequence
  derived and/or modified sequence
atggctgaacctacttcagactttgaaacccctatcgggtggcatgcttcaccagaactaactcccacactgggccctctgtctgacacagccccaccgcgagacagttggatgttctgggcgatgttgccacccccacctccgccactgacgtcttccctgccggcggctggctcaaagccttcgtctgagtcacagcctcctatggaagctcagtccctgcctggcgcccctcctccctttgatgctcagatccttccgggcgctcagccaccattcgatgctcaatctcctttagactcccagcctcagccttcaggccagccttggaacttccatgcatccacttcttggtactggagacagagctccgatcgattcccgcggcaccagaagtcattcaatcccgctgtgaagaacagctattaccctcggaagtatgacgcgaagttcacagacttcagtcttccaccatctagaaagcaaaagaaaaaaaaacggaaagagccagtatttcatttcttttgtgacacttgtgatagggggttcaagaatcaggaaaagtatgacaagcatatgtccgagcacactaagtgtcctgagctggattgcagcttcactgcacacgagaagattgtgcagttccattggaggaacatgcatgccccagggatgaaaaaaatcaaacttgatacgccagaagagattgcccgctggcgggaagagagaaggaaaaattaccctaccttggcgaatattgaaagaaagaagaaattgaagctagagaaggagaagcgtggcgccgtgctgactacgacccagtatggcaagatgaaagggatgagtagacacagtcaaatggcaaagatcagatcgccaggcaaaaatcacaaatggaaaaacgataacagcaggcagcgagctgtgaccggtagtggatcgcacctctgcgacctcaaattagaagggccgccggaggctaatgccgatccattaggcgtactgataaactctgattcagaatcggacaaagaggagaagccccagcactctgtcataccaaaagaagttactcctgctttgtgctctttgatgtcctcctacggcagtttatctggcagcgaatccgagccggaagaaacgcccatcaagactgaggccgatgtattggcagaaaatcaggtccttgatagcagcgcccctaagtctcctagccaggacgtgaaggctacagtgcggaacttttccgaagccaagagcgagaatcgcaaaaaatctttcgaaaaaaccaaccctaagcggaagaaggactaccacaactaccagactctcttcgaacctcgcacgcaccacccttacctccttgagatgctactcgctcctgatattcgccatgaaaggaacgtcatcctgcagtgtgtgcgttatattattaaaaaagatttctttgggctggatacgaatagcgccaaatcaaaggacgtatag

SEQ ID NO: 174149 - DNA, 1488 bp, Artificial Sequence
  derived and/or modified sequence
atggccgagcccaccagtgactttgagacccccatcggctggcacgccagccctgagctgacccccaccctgggccccctgagtgacacagccccaccccgggacagctggatgttctgggccatgctgcccccacctcctccacccctgaccagcagcctgcctgctgctggcagcaagcccagcagcgagagccagccccccatggaggcccagagcctgcccggggcccctcctccatttgatgcccagatcctgcccggggcccagcccccatttgatgcccagagccccctggacagccagccccagcccagcggccagccctggaacttccacgccagcacctcctggtactggaggcagagcagtgaccgcttccccaggcaccagaagagcttcaacccagctgtgaagaacagctactaccccaggaaatatgatgccaagttcacagacttcagcctgccccccagcaggaagcagaagaagaagaagaggaaggagcccgtcttccacttcttctgtgacacctgtgaccggggcttcaagaaccaggagaagtatgacaagcacatgtctgagcacaccaagtgcccagagctggactgcagcttcaccgcccacgagaagatcgtgcagttccactggaggaacatgcacgcccctggcatgaagaagatcaagctggacaccccagaggagatcgcccgctggagggaggagaggaggaagaactaccccaccctggccaacattgaaaggaagaagaagctgaagctggagaaggagaagagaggagctgtgctgaccaccacccagtatggcaagatgaagggcatgagccgccacagccagatggccaagatccgcagccctgggaagaaccacaagtggaagaatgacaacagccggcagagagctgtgacaggcagcggcagccacctgtgtgacctgaagctggagggccccccagaggccaatgctgaccccctgggcgtgctgatcaacagcgacagcgagagtgacaaggaggagaagccccagcacagcgtcatccccaaggaggtgaccccagccctgtgcagcctgatgagcagctatggcagcctgagcggcagcgagagcgagcctgaggagacccccatcaagacagaagcagatgtgctggccgagaaccaggtgctggacagcagcgcccccaagagccccagccaggatgtgaaggccaccgtgaggaacttcagcgaggccaagtcagaaaataggaagaagagctttgagaagaccaaccccaagaggaagaaggactaccacaactaccagaccctgtttgagcccaggacccaccacccctacctgctggagatgctgctggccccagacatcagacatgaaagaaatgtcatcctgcagtgtgtgcgctacatcatcaagaaggacttcttcggcctggacaccaacagcgccaagagcaaggatgtgtag

SEQ ID NO: 174150 - DNA, 1488 bp, Artificial Sequence
  derived and/or modified sequence
atggccgagcccaccagcgacttcgagacccccatcggctggcacgcctccccagagcttacacctaccttaggccctttgtctgatactgcaccacccagagattcttggatgttctgggctatgctacccccacccccccccccactgactagttctctgccggccgcaggaagcaaaccaagctcagagagccagcctcccatggaggcacagtcactccccggggctccacctcctttcgacgcccagattctgcccggggcacagccccccttcgatgcacagtccccactggattcccagccccagccatccggtcagccctggaacttccacgctagtacctcttggtattggcgacagagctctgatcgtttcccccgtcaccagaaatcttttaacccggcagtcaaaaatagctactatccaaggaagtacgacgccaagtttactgatttctccctaccaccctctcgtaaacagaagaaaaaaaaaagaaaggaacccgtcttccatttcttctgtgacacatgtgacagggggttcaaaaaccaagaaaagtacgacaagcacatgagcgaacatactaaatgtcccgaactggattgctcattcaccgcacatgaaaagatcgtgcagttccactggcgcaatatgcacgccccgggaatgaagaagatcaaacttgatactcccgaagaaatagcccgatggcgggaggaacggcgcaagaactaccccactctcgccaatatcgaaagaaagaagaaactcaagctggaaaaagagaaacggggggcggttctgaccactacgcaatatggtaaaatgaaagggatgagcaggcattctcaaatggccaagatcaggagtcctggaaagaatcacaagtggaaaaacgacaattcccgtcaacgagcggtgaccggaagcggatctcatttatgtgacctaaagctggaggggcctccagaagccaacgccgacccgctgggagtcctgataaactctgactcggagagtgacaaggaggaaaaacctcagcactctgtgattcccaaggaagtaaccccagccctgtgctcactcatgtcttcctacggatctctttctggatccgaatcggagcctgaggagactcctattaagaccgaggctgacgtcctggctgagaaccaggtcctagacagctccgcccccaagtctccaagccaagacgtcaaggctactgtgcggaactttagtgaggcaaaatctgagaatagaaaaaagtcttttgaaaagacaaatccaaagagaaagaaggactaccacaattatcagaccctcttcgaaccaaggacccaccacccttaccttctggagatgcttctggcacctgatatcagacatgagcgaaacgttatactgcagtgtgtgcgctacatcatcaagaaggatttctttgggttggatactaatagcgcgaagagcaaagatgtgtag

SEQ ID NO: 174151 - DNA, 3492 bp, Artificial Sequence
  derived and/or modified sequence
aatgcttgctccacagtcgcgtgctagactccggacccgccagtggtatggctgagccgactagtgatttcgagactcctatcgggtggcatgcgtctcccgagctgactcccacgttagggcccctgagcgacactgccccgccgcgggacagctggatgttctgggcaatgctgccgccaccgccaccaccacttacgtcctcgcttcccgcagccgggtcaaagccttcctctgagtcgcagccccccatggaggcccagtctctccccggggctccgccccccttcgacgcccagattcttcccggggcgcaaccccccttcgacgcccagtctccccttgattctcagcctcaacccagcggccagccttggaatttccatgcttccacatcgtggtattggagacagtcttctgataggtttcctcggcatcagaagtccttcaaccctgcagttaaaaattcttattatccacgaaagtatgatgcaaaattcacagacttcagcttacctcccagtagaaaacagaaaaaaaagaaaagaaaggaaccagtttttcactttttttgtgatacctgtgatcgtggttttaaaaatcaagaaaagtatgacaaacacatgtctgaacatacaaaatgccctgaattagattgctcttttactgcacacgagaagattgtccagttccattggagaaatatgcatgctcctggcatgaagaagatcaagttagacactccagaggaaattgcacggtggagggaagaaagaaggaaaaactatccaactctggccaatattgaaaggaagaagaagttaaaacttgaaaaggagaagagaggagcagtattgacaacaacacaatatggcaagatgaaggggatgtccagacattcacaaatggcaaagatcagaagtcctggcaagaatcacaaatggaaaaacgacaattctagacagagagcagtcactggatcaggcagtcacttgtgtgatttgaagctagaaggtccaccggaggcaaatgcagatcctcttggtgttttgataaacagtgattctgagtctgataaggaggagaaaccacaacattctgtgatacccaaggaagtgacaccagccctatgctcactaatgagtagctatggcagtctttcagggtcagagagtgagccagaagaaactcccatcaagactgaagcagacgttttggcagaaaaccaggttcttgatagcagtgctcctaagagtccaagtcaagatgttaaagcaactgttagaaatttttcagaagccaagagtgagaaccgaaagaaaagctttgaaaaaacaaaccctaagaggaaaaaagattatcacaactatcaaacgttattcgaaccaagaacacaccatccatatctcttggaaatgcttctagctccggacattcgacatgaaagaaatgtgattttgcagtgtgttcggtacatcatcaaaaaagacttttttggactggatactaattctgcgaaaagtaaagatgtataggcatctggtgtttcagcatacataactgaagcatgtgaaacagtatcatcctcgttagtagaggaaaaccaaaacccttttttccgtcaaaattggatttgtaattaaattgtaagcctcgtaggatgtatgttggaattttaagtctttcctttggttctatgcaaataaaaaaataactgattttttaagactgtgtctgtattgttgggattgaatctagtatttgctgggagaattttttctttgtatttattttaatgtattgttctcatgtaagaatgactgatgttgtgttagttaagaattgaagataggtttagcagtaaagaagaaagcttttaaaaggattgattcagctaagcaaagttgggcagagaaatacagccattttgtttttaatgcagaaaaggaagatgttctgtagcaagggggaatattttaaaaataaaccagatcaaattaatacaatcagaaggtttcgaaatgtaaatattccttatttaagacatgtttaaattcacctactagcacgacttacatagctcaaatattgaatgtttaaaatattaatacagatggggcctctttatgtttagataaaattgaagtacttaattgaagctttttaaaaattgtaaagtaaatgaaagctattgagatctttttgtctcctataataccagggaatttgagcttgtgttctagtcattgtactagctgtagctattggtctgtccttttgacatacagctaaaagggactaaatttgtaaaaaattagtttgttatagttgaagattaacttttcctaacattgtgattattgaagttcatgaatcttgctgtcaaggaagaaaggtaagaaagctgatagctcctccatgttggtaaaatcctctccagaatcttggaacacctggcatgtgaccctagtgacgtcacagacctgagatgaagattcatgtttagccagtgttttccagccttgtacccaccatacagatctgtttattctgtttcaccctactcctccagtgagccccatattttgggaaattatctgccttatacattaactaattcaattcatgtaacactgttgagtgcttactctttgtacctctattgtgcctatattaaaggtatacaaataaataaggccatgtctgacttcaaggaactcagtttaattttgatatattcaaagatgtgattcccaaccaactcaggatgaagtaactagtgttacaactgagttgatattctaaaatataacacagtttgtacttttattactagttagcatacacattttataggcttatgggttaataaatgaattcatggactcctggactactttcattgatgaccatatctccagggatgttgttgatccccacactgccttaaggtatattatagaaacagttttattttccatttttcttgtttcctgataataaatgtatttaggactgaaaatactcctgagtactcccttggctgtatgtctgacagtctttagctatggtgactattgtttatttttaatgggtatttcagattccaagtgtatttaaaatttctaaggagatataatatagcctgtatggtttctactttatggaattatatggtcaatatttgtaaatattctatgagttttgggtgggtagaggggtgctttgcctgttttgggtacaggtttttttggatttagcttgttaattgttcaaactttctgccttctacattcctatcttattgttcgtttaatcagtttctgaaatgtaagcattacatgactattggtgagttgtgccttttataactgaaatactttactttttctcatatcctctataattgacttctattttccttaatcaaaccagctctgggaaatttaatacatttatattaattgagattattaaaacatttggactatt

SEQ ID NO: 174152 - DNA, 1488 bp, Artificial Sequence
  derived and/or modified sequence
atggctgagccaacaagtgacttcgagacacctattggctggcatgcgtcccccgagctgactccaaccctaggccctctgtctgacactgcgccaccgagggactcttggatgttttgggccatgctgccccctcctcccccaccgctcacttcgagcctgcctgccgctggcagtaaaccatctagtgaaagccagccacctatggaagcccagtctctgcccggagctcctccgcctttcgacgctcagatcctccctggcgctcaaccacccttcgatgcgcagtcccctctggatagccagccccaacccagtggccagccgtggaacttccacgcatctacctcctggtattggcgccaaagttccgacagattcccacgacaccagaagagcttcaaccccgctgttaaaaactcatactaccctcgaaaatacgacgccaaattcaccgactttagcctgccaccttcgcgtaagcagaaaaaaaaaaagcgcaaggaacccgtgttccacttcttttgtgacacctgtgatagaggattcaagaatcaagaaaagtatgataagcacatgtcggagcataccaagtgtccagaattagactgctcttttacagctcacgagaaaatagtgcaattccactggcgcaatatgcacgcacctggaatgaaaaaaatcaaactggacactccagaggaaattgcaaggtggagagaggaaaggaggaagaattatcctacattggctaacatagagcggaaaaaaaagctcaaattggagaaggaaaagcgcggagcggtgctcactaccacccagtatggcaagatgaagggaatgtcccgccattcacaaatggccaaaatccgtagtccgggtaaaaatcacaaatggaagaacgataatagccgccagcgagccgtcacaggctctggctctcatctatgcgacttaaagctcgagggccctcccgaagccaatgcggaccctcttggtgtcttaataaactccgactcagagagcgataaagaagaaaaacctcagcactccgtgattcccaaggaggtcactcctgctctgtgcagcctcatgtcaagctacggatcactgagtgggtcggaaagcgagcctgaggagacacccatcaagacagaggcagacgtcctcgctgagaaccaggtgttggattcaagtgcacccaagagcccgtcacaggacgttaaggcgaccgtgagaaacttctcagaggcgaagagcgagaataggaagaagtctttcgaaaaaactaacccaaagcgcaaaaaggactatcacaactatcagacactgtttgaacctagaacgcaccatccctatctgcttgagatgctgctcgccccagatatccgccatgagaggaatgttatcttgcagtgcgtgagatatatcattaaaaaggacttcttcggccttgacacaaattccgccaagtctaaggatgtttag

SEQ ID NO: 174153 - DNA, 1488 bp, Artificial Sequence
  derived and/or modified sequence
atggccgagcccaccagcgacttcgagacccccatcggctggcacgccagccccgagctgacccccaccctgggccccctgagcgacaccgccccccccagagacagctggatgttctgggccatgctgccccccccccccccccccctgaccagcagcctgcccgccgccggcagcaagcccagcagcgagagccagccccccatggaggcccagagcctgcccggcgcccccccccccttcgacgcccagatcctgcccggcgcccagccccccttcgacgcccagagccccctggacagccagccccagcccagcggccagccctggaacttccacgccagcaccagctggtactggagacagagcagcgacagattccccagacaccagaagagcttcaaccccgccgtgaagaacagctactaccccagaaagtacgacgccaagttcaccgacttcagcctgccccccagcagaaagcagaagaagaagaagagaaaggagcccgtgttccacttcttctgcgacacctgcgacagaggcttcaagaaccaggagaagtacgacaagcacatgagcgagcacaccaagtgccccgagctggactgcagcttcaccgcccacgagaagatcgtgcagttccactggagaaacatgcacgcccccggcatgaagaagatcaagctggacacccccgaggagatcgccagatggagagaggagagaagaaagaactaccccaccctggccaacatcgagagaaagaagaagctgaagctggagaaggagaagagaggcgccgtgctgaccaccacccagtacggcaagatgaagggcatgagcagacacagccagatggccaagatcagaagccccggcaagaaccacaagtggaagaacgacaacagcagacagagagccgtgaccggcagcggcagccacctgtgcgacctgaagctggagggcccccccgaggccaacgccgaccccctgggcgtgctgatcaacagcgacagcgagagcgacaaggaggagaagccccagcacagcgtgatccccaaggaggtgacccccgccctgtgcagcctgatgagcagctacggcagcctgagcggcagcgagagcgagcccgaggagacccccatcaagaccgaggccgacgtgctggccgagaaccaggtgctggacagcagcgcccccaagagccccagccaggacgtgaaggccaccgtgagaaacttcagcgaggccaagagcgagaacagaaagaagagcttcgagaagaccaaccccaagagaaagaaggactaccacaactaccagaccctgttcgagcccagaacccaccacccctacctgctggagatgctgctggcccccgacatcagacacgagagaaacgtgatcctgcagtgcgtgagatacatcatcaagaaggacttcttcggcctggacaccaacagcgccaagagcaaggacgtgtag

SEQ ID NO: 174154 - protein, 447 aa, Artificial Sequence
  derived and/or modified sequence
MPDIIWVFPPQAEAEEDCHSDTVRADDDEENESPAETDLQAQLQMFRAQWMFELAPGVSSSNLENRPCRAARGSLQKTSADTKGKQEQAKEEKARELFLKAVEEEQNGALYEAIKFYRRAMQLVPDIEFKITYTRSPDGDGVGNSYIEDNDDDSKMADLLSYFQQQLTFQESVLKLCQPELESSQIHISVLPMEVLMYIFRWVVSSDLDLRSLEQLSLVCRGFYICARDPEIWRLACLKVWGRSCIKLVPYTSWREMFLERPRVRFDGVYISKTTYIRQGEQSLDGFYRAWHQVEYYRYIRFFPDGHVMMLTTPEEPQSIVPRLRTRNTRTDAILLGHYRLSQDTDNQTKVFAVITKKKEEKPLDYKYRYFRRVPVQEADQSFHVGLQLCSSGHQRFNKLIWIHHSCHITYKSTGETAVSAFEIDKMYTPLFFARVRSYTAFSERPL

SEQ ID NO: 174155 - DNA, 4559 bp, Artificial Sequence
  derived and/or modified sequence
agagaatatgcttttcagactcattttcctttggaaattaatagtaaggtctcaagtgccccctacagccttgctactcaaagtgggttccacaaagtgttgacagtatggtactaaatagaaagtggctgaatgagaaatgtagattgcagagggcaactggtgtgtttatatgcctgacattatttgggttttcccccctcaggcagaagctgaggaagattgtcattctgatactgtcagagcagatgatgatgaagaaaatgaaagtcctgctgaaacagatctgcaggcacaactccagatgttccgagctcagtggatgtttgaacttgctccaggtgtaagctctagcaatttagaaaatcgaccttgcagagcagcaagaggctctctccagaaaacatcggcagataccaaaggaaaacaagaacaggcaaaagaagaaaaggctcgagaactcttcctaaaagcagtagaagaagaacaaaatggagctctctatgaagccatcaagttttatcgtagggctatgcaacttgtacctgatatagagttcaagattacttatacccggtctccagatggtgatggcgttggaaacagctacattgaagataatgatgatgacagcaaaatggcagatctcttgtcctacttccagcagcaactcacatttcaggagtctgtgcttaaactgtgtcagcctgagcttgagagcagtcagattcacatatcagtgctgccaatggaggtcctgatgtacatcttccgatgggtggtgtctagtgacttggacctcagatcattggagcagttgtcgctggtgtgcagaggattctacatctgtgccagagaccctgaaatatggcgtctggcctgcttgaaagtttggggcagaagctgtattaaacttgttccgtacacgtcctggagagagatgtttttagaacggcctcgtgttcggtttgatggcgtgtatatcagtaaaaccacatatattcgtcaaggggaacagtctcttgatggtttctatagagcctggcaccaagtggaatattacaggtacataagattctttcctgatggccatgtgatgatgttgacaacccctgaagagcctcagtccattgttccacgtttaagaactaggaataccaggactgatgcaattctactgggtcactatcgcttgtcacaagacacagacaatcagaccaaagtatttgctgtaataactaagaaaaaagaagaaaaaccacttgactataaatacagatattttcgtcgtgtccctgtacaagaagcagatcagagttttcatgtggggctacagctatgttccagtggtcaccagaggttcaacaaactcatctggatacatcattcttgtcacattacttacaaatcaactggtgagactgcagtcagtgcttttgagattgacaagatgtacacccccttgttcttcgccagagtaaggagctacacagctttctcagaaaggcctctgtagagcctcaagtccagtcctctatcacttttgcatgaattaaagtatatagcgcaaaagagcacctaagttataaatgtgtgtgtgtgcgtgtgtgtgtatatatatatatatatatatatatatatatatatatatatatatatatggaattggaacttattttaaattgttggagttcttttaagaagaatataaattgattattttttttatttaaagggatagttgattcctggggtgttttgaaattaagttggaattaagttgcttaagcatatttatgttgtgagaaaccttaatatgaggtttatcatgccctttttcaagcagatttatgagcagatttctgtcacataagtcgtcttctgcttgagtatcctaatatttcaatgcatcaggggagcgctccactggataagcattttatttcccgcatggcataatgtttttgcactaaaggctcaaagtgtgagaacctgttctggatttgtttgaaattatttcaccaataaagatcataaataaatgtttctttcaagaaaatatatttggatggcctttttaaagtaacaggatatttaataagagtcctagatagccagcggagactttaagaatcattgcctctagctgggtgtggtggcatgcacctgtagtcccagctatttgggaggctgatgcaggagaatagcttaagcccaggaatttgagtctgggagtttgagtccagcatgggcaacataacaagaccccatcccttattaaaagaaaaaaaaataattcctcatttcatcattggtctttatatgtagccacaaacactgacctcatgtaggcaccttaccaatatatgacattaagtgagagtgaatcccttaggactggaacacttcaagctcaaccaactgactcagttgtcattcttcacaaaagaatagtagaggatcatgtaaacctgagcctaactcttgttccagtatgaaagttgggggagagcaccagccacctaggaaaactgtatgttacctttttactcaaaggagtcccccctgcccagtaacagtcctattagtgtttaatttcagagtttgtgtctggtagacctctacctgattcagatttggttttgttgtttcaaccatagttagagacaaattctcatgtactttcagaaatcaatatctgcagccactgttacttttaattgacattaagagacacttcataggttcccacaattcagtatgggataggctttttaaaaagcacatacagaccaggcgtggtggctcatgcctataatcccagcactttgggaggctaagacaggcagatcacctgagctcaggagtccaagaccagcctgggcaacatggcaaaacaccgtctctacaaaaaaaaaaaaaaaaaaaattagccaagtacagtggggcacacctatagtcgcagctacttgggaggctggggcaggagaattgcctgagcctgggaagtggaagttgcagtgagccaagatcgtgccattccactccagcctgagcaacacagtgagaccctatctcaaaaaaataatgatgatagtacacgttatgttaaaggtgaaatgtgcatacagaaggaagagagttggccaggtgtggtgactcacacctataatcccaatactttgggaggccaaggcaggaggattgcttgaggtcaggagttttagaccagcctggacaacatagcaagacctcatctcttctaaaaattaaaaaaaaaaaaaataggcatggtggtacacacctgtggtcccagctagttgggaggctaaggcaggaggatcacttagccaggaggctgaggctacagtgagccaagattgcaccactgtgctccagcctgggtgagaaagcgagaccctgtctcaaaaaagaaaaaaaagagaggttggccttttgtagcaatctgagaagtgtgtttttcaagttggaaaggaaggagaaaagcaacttgcctaagataaggtagctcttcatgatatgactgttatttctgatatacaaataaatagaacatgattaggacatagtcaaatatagctagaaaaatatattcctaaggaaagtgagatttgaggagtccctgttgttctgcaacatccctagattgaatgatctgttgcagatggtggataccaagttcaaatttaaagatttctttgtaagcagtaaagtgactttcacttatttaacttagaactggaaaaagtaacttttttccagattacattttctgtatatttgtaaaatgcaaaagcaatatatatttgttgtgagaaaattagaatatacagataaaataaaatttaaaaaaacacccaaagataaccagaagaaaatttttgctatgtaacctttttcttctggtctttgcaaatcctgccgtagaaactttttaacttcaggagtgtccttcctttgctctattaggacattacagaaaccaatactatgaaaagctgacagcagtatctggattaactttttaaaaacaatgaaagcattttacagaaattacatttcagatcgtgctggaactgtgttcagaagatatcctcagagggaatctggcctgagcaccatcatgtttaattgcctcctcctgtcttgcattttcctcccagcccccttcctaccccttagcagagggccaggtgagggtgcttggggcccatgggggctgggagtgtagacttcagttacacccccagcccccaggggaaagcattagccttgaatcctcaatcccaggccctctactaaccactctcaacctatggtatttatcttttgattattctgtgcatctataaaaatgggattatattgtacagaatgctttgtaagctttctctccccacataagaatgccctgtaagcattttgttaaatatttttaatgactttagagtccaactttatactcctctttacgcattttggttttctaatttaatggtagtgtaaacgtttttggaataaacattcctgtggctaaa

SEQ ID NO: 174156 - DNA, 1580 bp, Artificial Sequence
  derived and/or modified sequence
ctccagtctgtctgtgctctcaaaaactttagtcgttataacaactgtgactgttgagaaatttcactgttttcctgcattcctggcgcgggactctagccagaggctccgaggactttgtagcgactgtcccaagcgtccagttcgatgcttctcagggcggcttgctttaagggcccacccctaaatttgggttgtaaaaatttttgaggcagaagctgaggaagattgtcattctgatactgtcagagcagatgatgatgaagaaaatgaaagtcctgctgaaacagatctgcaggcacaactccagatgttccgagctcagtggatgtttgaacttgctccaggtgtaagctctagcaatttagaaaatcgaccttgcagagcagcaagaggctctctccagaaaacatcggcagataccaaaggaaaacaagaacaggcaaaagaagaaaaggctcgagaactcttcctaaaagcagtagaagaagaacaaaatggagctctctatgaagccatcaagttttatcgtagggctatgcaacttgtacctgatatagagttcaagattacttatacccggtctccagatggtgatggcgttggaaacagctacattgaagataatgatgatgacagcaaaatggcagatctcttgtcctacttccagcagcaactcacatttcaggagtctgtgcttaaactgtgtcagcctgagcttgagagcagtcagattcacatatcagtgctgccaatggaggtcctgatgtacatcttccgatgggtggtgtctagtgacttggacctcagatcattggagcagttgtcgctggtgtgcagaggattctacatctgtgccagagaccctgaaatatggcgtctggcctgcttgaaagtttggggcagaagctgtattaaacttgttccgtacacgtcctggagagagatgtttttagaacggcctcgtgttcggtttgatggcgtgtatatcagtaaaaccacatatattcgtcaaggggaacagtctcttgatggtttctatagagcctggcaccaagtggaatattacaggtacataagattctttcctgatggccatgtgatgatgttgacaacccctgaagagcctcagtccattgttccacgtttaagaactaggaataccaggactgatgcaattctactgggtcactatcgcttgtcacaagacacagacaatcagaccaaagtatttgctgtaataactaagaaaaaagaagaaaaaccacttgactataaatacagatattttcgtcgtgtccctgtacaagaagcagatcagagttttcatgtggggctacagctatgttccagtggtcaccagaggttcaacaaactcatctggatacatcattcttgtcacattacttacaaatcaactggtgagactgcagtcagtgcttttgagattgacaagatgtacacccccttgttcttcgccagagtaaggagctacacagctttctcagaaaggcctctgtagagcctcaagtccagtcctctatcacttttgcatgaattaaagtatatagcgcaaaaga

SEQ ID NO: 174157 - DNA, 1344 bp, Artificial Sequence
  derived and/or modified sequence
atgccagacattatatgggttttccctccacaagccgaggccgaggaggactgccactcagacaccgtcagggccgatgacgacgaggagaatgagtccccggccgaaaccgacttacaggcccagttacagatgttccgcgcgcaatggatgttcgagctcgctcctggcgtgtcctcttcgaatctggagaaccggccctgccgagcagcccgcggcagtcttcagaagactagtgctgacacaaagggcaaacaggagcaggctaaggaggaaaaggcacgcgagctgttccttaaagcagtggaagaagaacagaacggcgccctgtatgaagccattaagttttaccgccgagccatgcagctggtccctgatatcgagttcaagataacttatacaaggtcccctgacggagacggggttgggaactcctatatcgaggataacgacgatgattccaagatggctgacctcctgtcctactttcagcagcaacttacgttccaggaatcagtgttgaagctgtgccagcctgaactggagagcagccagatacacattagcgtcctgccaatggaggtcctcatgtacatcttcagatgggtggtctcctccgacttggatctccgctccctcgaacagctgtctcttgtttgcagaggattctacatatgcgcccgggatccagaaatatggcgtcttgcatgcctcaaggtctggggccgctcttgcatcaagctggtgccttacaccagttggcgggagatgtttctcgaaaggcctcgtgtgcgcttcgatggcgtctacatttccaagactacatatattcggcaaggggagcagtcactggatgggttctaccgtgcctggcaccaggttgagtattaccggtatattaggttcttcccagatgggcacgttatgatgttgactacaccagaagagccccagagcatcgtgccccgccttcgaactcgcaacacccgaaccgacgcgatcttgcttggtcactatcgattatctcaggacactgacaaccagacgaaggtgttcgctgtgatcacgaaaaagaaggaggagaagcctcttgattacaagtatagatattttcgacgagtgcctgtgcaggaagcagaccagtcctttcacgtgggtctgcagttatgtagttcaggccaccaacgatttaacaaattaatttggatccaccactcctgtcatattacgtataaatctactggagagacagctgtgtccgccttcgagatagacaagatgtatacccccctcttttttgcacgagtcaggtcctacactgccttctccgagagacccctttag

SEQ ID NO: 174158 - DNA, 1344 bp, Artificial Sequence
  derived and/or modified sequence
atgccagacatcatctgggtgtttcctccccaggccgaggccgaggaggactgccacagcgacacagtgcgggcagatgatgatgaggagaatgaaagccctgctgagacagacctgcaggcccagctgcagatgttccgggcccagtggatgtttgagctggcccctggggtgagcagcagcaacctggagaaccggccctgccgggccgcccggggcagcctgcagaagaccagcgctgacaccaagggcaagcaggagcaggccaaggaggagaaggcccgggagctgttcctgaaggctgtggaggaggagcagaatggagccctgtatgaggccatcaagttctaccgccgggccatgcagctggtgcctgacatcgagttcaagatcacctacaccaggagcccagatggagatggagtgggcaacagctacatcgaggacaatgatgatgacagcaagatggctgacctgctgagctacttccagcagcagctgaccttccaggagagcgtgctgaagctgtgccagcctgagctggagagcagccagatccacatctctgtgctgcccatggaggtgctgatgtacatcttccgctgggtggtgtccagtgacctggacctgcggagcctggagcagctgagcctggtgtgccggggcttctacatctgtgcccgggaccctgagatctggaggctggcctgcctgaaggtgtggggccgcagctgcatcaagctggtgccctacacctcctggagggagatgttcctggagcggccccgggtgcgctttgatggagtgtacatcagcaagaccacctacatccggcagggcgagcagagcctggatggcttctaccgggcctggcaccaggtggagtactaccgctacatccgcttcttcccagatggccacgtgatgatgctgaccaccccagaggagccccagagcatcgtgccccggctgcggaccaggaacaccaggacagatgccatcctgctgggccactaccgcctgagccaggacacagacaaccagaccaaggtgtttgctgtgatcaccaagaagaaggaggagaagcccctggactacaagtaccgctacttccggcgggtgcctgtgcaggaggccgaccagagcttccacgtgggcctgcagctgtgcagcagcggccaccagcgcttcaacaagctgatctggatccaccacagctgccacatcacctacaagagcactggagaaacagctgtgtctgcctttgaaattgacaagatgtacacccccctcttctttgcccgggtgcgcagctacacagccttcagcgagcggcccctgtag

SEQ ID NO: 174159 - DNA, 1344 bp, Artificial Sequence
  derived and/or modified sequence
atgcccgacatcatctgggtgttccccccccaggccgaggccgaggaggactgccacagcgatacggtcagggccgacgatgatgaggagaacgagtcaccggccgagaccgatcttcaagcacagctgcagatgtttcgggcccagtggatgtttgagttagcccccggggtgagctcatccaatctggagaatagaccatgccgggcagcccgggggtccctgcagaagacttctgccgatactaaaggtaagcaggaacaggccaaggaagaaaaggctcgagaactctttttgaaagctgtagaggaggagcagaacggcgctctctacgaggccattaaattctatcgaagagccatgcagttggtccccgacattgagtttaagataacctacactcgtagcccggatggggacggtgtcgggaatagctatatagaagataatgatgatgattctaagatggctgacctgctgtcctacttccagcagcagctcactttccaggagagtgtgcttaagctttgccagcccgagttagaaagtagtcaaattcatatttccgttctgcccatggaagttctgatgtacattttccgctgggttgtctcatctgacctggacctgaggtcactcgagcagctcagcctagtatgcaggggtttctacatatgcgctcgggatcccgaaatctggaggttagcctgcctgaaggtgtggggacggagttgcatcaagttggtaccgtacacaagttggagggaaatgtttctcgaaaggcctagggtgcgcttcgatggcgtgtacatttccaagactacctatattcggcagggagagcagagcctggacgggttctaccgggcctggcaccaggtggaatactataggtatatcagattttttcccgacggccatgtgatgatgctgaccacaccggaagaaccgcagagtatcgtgcctcgacttagaactcgcaacaccagaaccgacgccatcttgctaggccattatagactgtcccaggacacagacaaccagacaaaagtctttgcagtgatcacaaagaagaaggaagaaaagccactggactataaatatagatactttcggcgggttcccgtgcaggaggccgatcagtcatttcacgtgggactgcagctgtgttcgagcggccaccaacggtttaacaagctgatctggatacatcatagttgccatattacgtataaatcaactggtgagactgctgtatcagctttcgagatagacaagatgtacacgcccttgttcttcgcaagggttcgctcgtacacagcattctctgagaggcccctgtag

SEQ ID NO: 174160 - DNA, 1344 bp, Artificial Sequence
  derived and/or modified sequence
atgcctgatattatttgggttttcccgccacaggccgaagctgaggaggactgccattccgacaccgtgagggccgacgatgatgaagagaacgaatcccccgctgaaaccgacctgcaagcccagctacaaatgttcagagcacagtggatgtttgagcttgctcctggggtgtcgagctctaatctcgagaacagaccgtgcagggcagcgcgtgggagcttgcagaagacaagtgccgacactaagggcaagcaggaacaggctaaggaggaaaaagcacgagaactgtttcttaaagccgttgaagaagagcaaaacggagccttatatgaggccattaaattttacagaagagctatgcagctggtaccagacatagagtttaaaatcacctacactaggtcacccgacggagacggggtaggcaattcctacatcgaggataatgacgatgactctaagatggctgacctgctgtcctactttcaacagcagctcacatttcaagaatcagtactgaagctgtgtcagccagagctggaatccagccaaatccacatcagcgttctgccgatggaggtcctgatgtatatcttccgatgggtggtgtcgagtgaccttgatttacggtcactggaacagctgagcctggtatgtaggggcttctacatatgcgcaagggatccagagatttggcggctggcttgtcttaaggtatggggacgctcctgcatcaagttggtgccctacacaagctggcgtgagatgttcttagagcgtcccagagtcagattcgacggagtgtacatcagcaaaacaacctacatccggcagggagaacagtctttggacggcttctacagagcctggcaccaagtggaatattacaggtacattcgcttttttcccgacgggcatgttatgatgttgacaacccccgaggagccacagtcaattgtcccgaggctgagaacgcgcaacacccgaaccgacgccatccttctgggacattaccgcctgtcgcaagatacagacaatcagaccaaggtgttcgccgtcatcacaaagaaaaaggaagagaagccactggactataagtacagatacttccggcgagtaccagttcaggaggctgaccagtcgttccatgtgggcctgcaattatgctcgtccgggcaccagcgttttaataagctgatctggatccaccactcatgccacattacctataaaagcacaggagagacggcagtgagcgcttttgagattgacaagatgtatacacccctcttcttcgctagggttcggtcctataccgcatttagtgagaggcccttgtag

SEQ ID NO: 174161 - DNA, 1344 bp, Artificial Sequence
  derived and/or modified sequence
atgcccgacatcatctgggtgttccccccccaggccgaggccgaggaggactgccacagcgacaccgtgagagccgacgacgacgaggagaacgagagccccgccgagaccgacctgcaggcccagctgcagatgttcagagcccagtggatgttcgagctggcccccggcgtgagcagcagcaacctggagaacagaccctgcagagccgccagaggcagcctgcagaagaccagcgccgacaccaagggcaagcaggagcaggccaaggaggagaaggccagagagctgttcctgaaggccgtggaggaggagcagaacggcgccctgtacgaggccatcaagttctacagaagagccatgcagctggtgcccgacatcgagttcaagatcacctacaccagaagccccgacggcgacggcgtgggcaacagctacatcgaggacaacgacgacgacagcaagatggccgacctgctgagctacttccagcagcagctgaccttccaggagagcgtgctgaagctgtgccagcccgagctggagagcagccagatccacatcagcgtgctgcccatggaggtgctgatgtacatcttcagatgggtggtgagcagcgacctggacctgagaagcctggagcagctgagcctggtgtgcagaggcttctacatctgcgccagagaccccgagatctggagactggcctgcctgaaggtgtggggcagaagctgcatcaagctggtgccctacaccagctggagagagatgttcctggagagacccagagtgagattcgacggcgtgtacatcagcaagaccacctacatcagacagggcgagcagagcctggacggcttctacagagcctggcaccaggtggagtactacagatacatcagattcttccccgacggccacgtgatgatgctgaccacccccgaggagccccagagcatcgtgcccagactgagaaccagaaacaccagaaccgacgccatcctgctgggccactacagactgagccaggacaccgacaaccagaccaaggtgttcgccgtgatcaccaagaagaaggaggagaagcccctggactacaagtacagatacttcagaagagtgcccgtgcaggaggccgaccagagcttccacgtgggcctgcagctgtgcagcagcggccaccagagattcaacaagctgatctggatccaccacagctgccacatcacctacaagagcaccggcgagaccgccgtgagcgccttcgagatcgacaagatgtacacccccctgttcttcgccagagtgagaagctacaccgccttcagcgagagacccctgtag

SEQ ID NO: 174162 - protein, 320 aa, Artificial Sequence
  derived and/or modified sequence
MLLCFRFGNQSMKRENFTLITDFVFQGFSSFHEQQITLFGVFLALYILTLAGNIIIVTIIRMDLHLHTPMYFFLSMLSTSETVYTLVILPRMLSSLVGMSQPISLAGCATQMFFFVTFGITNCFLLTAMGYDRYVAICNPLRYMVIMNKRLRIQLVLGACSIGLIVAITQVTSVFRLPFCARKVPHFFCDIRPVMKLSCIDTTVNEILTLIISVLVLVVPMGLVFISYVLIISTILKIASVEGRKKAFATCASHLTVVIVHYSCASIAYLKPKSENTREHDQLISVTYTVITPLLNPVVYTLRNKEVKDALCRAVGGKFS

SEQ ID NO: 174163 - DNA, 963 bp, Artificial Sequence
  derived and/or modified sequence
atgctgctgtgcttcagattcggcaaccagagcatgaagagagagaacttcaccctgatcaccgacttcgtgttccagggcttcagcagcttccacgagcagcagatcaccctgttcggcgtgttcctggccctgtacatcctgaccctggccggcaacatcatcatcgtgaccatcatcagaatggacctgcacctgcacacccccatgtacttcttcctgagcatgctgagcaccagcgagaccgtgtacaccctggtgatcctgcccagaatgctgagcagcctggtgggcatgagccagcccatcagcctggccggctgcgccacccagatgttcttcttcgtgaccttcggcatcaccaactgcttcctgctgaccgccatgggctacgacagatacgtggccatctgcaaccccctgagatacatggtgatcatgaacaagagactgagaatccagctggtgctgggcgcctgcagcatcggcctgatcgtggccatcacccaggtgaccagcgtgttcagactgcccttctgcgccagaaaggtgccccacttcttctgcgacatcagacccgtgatgaagctgagctgcatcgacaccaccgtgaacgagatcctgaccctgatcatcagcgtgctggtgctggtggtgcccatgggcctggtgttcatcagctacgtgctgatcatcagcaccatcctgaagatcgccagcgtggagggcagaaagaaggccttcgccacctgcgccagccacctgaccgtggtgatcgtgcactacagctgcgccagcatcgcctacctgaagcccaagagcgagaacaccagagagcacgaccagctgatcagcgtgacctacaccgtgatcacccccctgctgaaccccgtggtgtacaccctgagaaacaaggaggtgaaggacgccctgtgcagagccgtgggcggcaagttcagctag

SEQ ID NO: 174164 - DNA, 963 bp, Artificial Sequence
  derived and/or modified sequence
atgctcctgtgcttcagatttggaaaccaaagtatgaagcgggaaaatttcacactgatcacagacttcgtgttccaggggttcagcagcttccacgagcagcagattacccttttcggcgtgttccttgcattgtatattctgaccctagcaggtaacataattattgttactatcatcaggatggaccttcatttgcacaccccaatgtatttctttctctccatgctttcaacttctgaaacagtgtatacccttgtcattctgcctagaatgttaagcagtctagtcggtatgtctcagcccatttctctggctgggtgcgccactcaaatgttcttctttgtcacttttgggattaccaactgctttttgcttactgccatggggtacgatcggtatgtcgcgatctgcaaccccttacgctatatggtgattatgaacaagaggttacgcattcagctggtgcttggggcttgcagcatcggattgatagtcgccatcacccaggtaacctccgtgttccggctgcctttctgtgcccgcaaggtcccccatttcttttgcgatatccggcctgttatgaagctgtcatgcattgatacaaccgtgaatgaaattctgacccttattatcagtgttctggtactggttgtgcccatgggtctggtctttatctcctacgttcttataattagtactattctgaagatcgcctctgtggaagggaggaaaaaggctttcgcgacttgcgctagccatctaacagtagtcattgtacactatagctgtgcaagtattgcatacctgaaacctaagtccgaaaataccagggagcacgatcaactaatttctgtgacctataccgtgataacacccctgctcaatcccgttgtttataccctgagaaacaaagaggtcaaagatgccttatgccgagctgtgggcggcaagtttagctag

SEQ ID NO: 174165 - DNA, 963 bp, Artificial Sequence
  derived and/or modified sequence
atgctgctgtgcttccgctttggaaaccagagcatgaagcgggagaacttcaccctcatcacagactttgtgttccagggcttcagcagcttccacgagcagcagatcaccctgtttggagtcttcctggccctgtacatcctgaccctggccggcaacatcatcatcgtgaccatcatccgcatggacctgcacctgcacacccccatgtacttcttcctgtccatgctgagcaccagcgagaccgtgtacaccctggtgatcctgcccaggatgctgagcagcctggtgggcatgagccagcccatcagcctggccggctgtgccacccagatgttcttctttgtgaccttcggcatcaccaactgcttcctgctgacagccatgggctatgaccgctacgtggccatctgcaaccccctgcgctacatggtgatcatgaacaagaggctgcgcatccagctggtgctgggcgcctgcagcatcggcctgattgtggccatcacccaggtgacctctgtgttccggctgcccttctgtgccaggaaggtgccccacttcttctgtgacatccggcctgtgatgaagctgagctgcatcgacaccaccgtgaatgagatcctgaccctcatcatctctgtgctggtgctggtggtgcccatgggcctggtgttcatctcctatgtgctgatcatcagcaccatcctgaagatcgcctctgtggagggcaggaagaaggcctttgccacctgtgccagccacctgactgtggtgattgtgcactacagctgtgccagcatcgcctacctgaagcccaagtctgagaacacccgggagcatgaccagctgatctctgtgacctacaccgtcatcacccccctgctgaaccctgtggtgtacaccctgaggaacaaggaggtgaaggatgccctgtgcagagctgtgggcggcaagttctcctag

SEQ ID NO: 174166 - DNA, 1089 bp, Artificial Sequence
  derived and/or modified sequence
tgtgcttctactgctttactgggactatgtgacttttatgcttttatgtttcagatttgggaaccaatccatgaaaagagagaactttactctcatcactgactttgttttccaaggtttctctagcttccatgagcagcagatcaccctttttggcgtgttccttgcactatacatcttaaccttagcaggcaatatcatcattgtgaccatcatccgaatggatcttcatcttcacacacccatgtacttcttcctgagcatgctgtccacttcagagactgtatatacattggtcattctcccaagaatgctctccagcctcgtaggtatgagccagcccatatcattggcagggtgtgccacacagatgttcttttttgtaacctttggcatcactaactgcttcctgctcacagcaatgggatatgaccgctatgtggccatctgcaaccccctgagatacatggttattatgaacaagaggctgcgtatccaacttgtcctgggggcctgcagcattgggctgattgtagcaataacgcaagtgacatctgtattcaggttacccttctgtgctagaaaggtgccccacttcttctgtgacatccgccctgtgatgaagctctcctgcattgacaccactgtcaatgaaatcctgactttgattatcagtgtgctggtgcttgttgtacctatgggtctggttttcatttcttatgttctcattatctctacaatcctcaagattgcttcagttgagggccggaagaaggcttttgccacctgtgcatcccacctcactgtggtcattgtccactacagctgtgcctccattgcctacctcaagcccaagtcagagaacaccagagaacatgaccagctgatctcggtgacctacactgtcatcactcccctactgaaccctgtggtatacaccctgagaaataaagaggtcaaagatgctctgtgcagggctgttggtgggaagttttcctgaccatgtaggaagagttctcctgaggctgtcaacatccacactaggcaggaatatgaggtgtaaactcacaaacacttggctcctagaga

SEQ ID NO: 174167 - DNA, 963 bp, Artificial Sequence
  derived and/or modified sequence
atgctgctgtgcttccggttcggcaaccagagcatgaagcgggagaacttcacactgatcactgacttcgtattccagggcttctccagcttccacgagcaacaaatcactttgttcggcgtatttcttgcactatacatcttaaccctggctggcaatataataattgtgaccatcatccgcatggatctccatctgcatacgccaatgtacttcttcctgagcatgctaagcacttcggaaacagtctatacacttgtcatcctgcccagaatgctctcgtccttagtcggaatgagccagcccatctcattggctgggtgcgctacacaaatgttcttttttgtgacctttggtattaccaattgttttctgctaaccgcaatgggatatgacaggtacgtcgcaatctgtaacccgttgcgctatatggtgatcatgaataagagactacgtattcagctggtgttaggcgcatgttctatcggactcattgtggcaatcacacaggtcacgtcggtctttcggctgcctttttgcgcgcgcaaagtgccacatttcttctgcgacattcgccctgtgatgaaattgagttgtatcgacaccaccgtcaatgagatccttactttaatcataagcgtcctggtactggtcgtccccatgggactggtttttatcagctatgtgctgattattagcactatcttgaaaatcgctagtgttgagggtcggaagaaggcattcgcgacttgcgcgtcccatctgacggtcgtgatcgtgcactactcctgcgccagtatcgcctatcttaaacctaagagtgaaaataccagggaacacgatcagctaatctcagtcacctatacagtgatcacgccccttctcaatcctgttgtatacactttgaggaacaaagaagtaaaggatgccttatgtagagctgtaggtggtaaattctcttag

SEQ ID NO: 174168 - DNA, 963 bp, Artificial Sequence
  derived and/or modified sequence
atgctgctgtgttttagattcggaaaccagagcatgaagcgtgagaactttacattaatcacagactttgtgttccaaggcttttcaagtttccacgagcaacagatcacactgtttggggtcttcctagccctttatatccttactctggcgggtaacatcatcatcgtgacgattatccggatggatctgcacctccatacccctatgtactttttcctctctatgctgtcaacatccgagaccgtgtacactctggtgattttgcccagaatgctatcctcactggtggggatgagccaaccaatatcccttgcgggatgcgctactcagatgtttttcttcgtgacattcggaatcacgaattgctttttgttgacagctatgggttacgacaggtacgtggccatctgcaaccctctcaggtatatggtgatcatgaacaagcgccttcggatccaactggtcttaggtgcctgcagcattggcctgatagtcgctatcacccaggtgacctctgtcttccgacttccattttgcgctcgtaaagtccctcacttcttctgcgacatccgccctgtgatgaagctgtcatgcatcgatactacagtgaatgagatacttacacttatcatctctgtcctcgtcctggtcgttcccatggggcttgtcttcatttcatacgtcctgattatctcaactattctcaagattgcctctgtcgagggcagaaagaaggcctttgccacttgcgccagccacctcacagtcgtgattgtgcactattcctgcgcatccatagcgtacctgaagccaaagagtgagaacaccagagagcacgaccaactgatctccgttacctatacggtgatcactcccctcctaaatccagtcgtgtataccctgcggaataaggaagttaaggacgcactgtgccgagctgttggcggaaaatttagttag

SEQ ID NO: 174169 - protein, 314 aa, Artificial Sequence
  derived and/or modified sequence
MEKRNLTVVREFVLLGLPSSAEQQHLLSVLFLCMYLATTLGNMLIIATIGFDSHLHSPMYFFLSNLAFVDICFTSTTVPQMVVNILTGTKTISFAGCLTQLFFFVSFVNMDSLLLCVMAYDRYVAICHPLHYTARMNLCLCVQLVAGLWLVTYLHALLHTVLIAQLSFCASNIIHHFFCDLNPLLQLSCSDVSFNVMIIFAVGGLLALTPLVCILVSYGLIFSTVLKITSTQGKQRAVSTCSCHLSVVVLFYGTAIAVYFSPSSPHMPESDTLSTIMYSMVAPMLNPFIYTLRNRDMKRGLQKMLLKCTVFQQQ

SEQ ID NO: 174170 - DNA, 945 bp, Artificial Sequence
  derived and/or modified sequence
atggagaagagaaacctgaccgtggtgagagagttcgtgctgctgggcctgcccagcagcgccgagcagcagcacctgctgagcgtgctgttcctgtgcatgtacctggccaccaccctgggcaacatgctgatcatcgccaccatcggcttcgacagccacctgcacagccccatgtacttcttcctgagcaacctggccttcgtggacatctgcttcaccagcaccaccgtgccccagatggtggtgaacatcctgaccggcaccaagaccatcagcttcgccggctgcctgacccagctgttcttcttcgtgagcttcgtgaacatggacagcctgctgctgtgcgtgatggcctacgacagatacgtggccatctgccaccccctgcactacaccgccagaatgaacctgtgcctgtgcgtgcagctggtggccggcctgtggctggtgacctacctgcacgccctgctgcacaccgtgctgatcgcccagctgagcttctgcgccagcaacatcatccaccacttcttctgcgacctgaaccccctgctgcagctgagctgcagcgacgtgagcttcaacgtgatgatcatcttcgccgtgggcggcctgctggccctgacccccctggtgtgcatcctggtgagctacggcctgatcttcagcaccgtgctgaagatcaccagcacccagggcaagcagagagccgtgagcacctgcagctgccacctgagcgtggtggtgctgttctacggcaccgccatcgccgtgtacttcagccccagcagcccccacatgcccgagagcgacaccctgagcaccatcatgtacagcatggtggcccccatgctgaaccccttcatctacaccctgagaaacagagacatgaagagaggcctgcagaagatgctgctgaagtgcaccgtgttccagcagcagtag

SEQ ID NO: 174171 - DNA, 945 bp, Artificial Sequence
  derived and/or modified sequence
atggagaaacgtaacctgacagtggttcgcgagttcgtgctgctcggattgccctctagcgcggaacagcagcaccttctgtccgtactcttcctctgcatgtatctcgccacgaccttgggcaacatgctgataattgctactattggcttcgattctcatctacactctccaatgtacttttttctgtctaacctggcatttgttgacatctgcttcacaagtacaacagtccctcagatggtggtgaatattttaacaggaaccaagactatctcattcgcggggtgtctgacccagctctttttcttcgtctcttttgtgaacatggattcactgctgctgtgtgtgatggcctatgacaggtatgtggctatctgtcacccgctccactatacagcccggatgaacctgtgtctgtgtgtgcagctggtggctggtttatggttagtgacctatcttcacgcactcctgcacacagtgctcattgcacaactttccttctgcgctagcaatatcatccatcacttcttttgtgacctgaatcccctcttgcaactaagttgtagcgacgtctccttcaatgtgatgatcatattcgctgtgggaggcctcctcgcgttaaccccgctggtttgtatacttgtaagctatggcctaatatttagcactgtccttaagatcacatcaacccaggggaagcagcgtgcagtatccacgtgctcgtgccacctgtccgtcgttgttttattctacggcaccgcgatcgccgtctacttctctccgagttccccccatatgcccgagtctgacaccctttcaaccatcatgtactcgatggtggcgcccatgctgaacccatttatatacaccctcaggaatcgagacatgaaacgtggtctgcaaaagatgctcctcaagtgtacggtgtttcagcagcagtag

SEQ ID NO: 174172 - DNA, 945 bp, Artificial Sequence
  derived and/or modified sequence
atggagaagaggaacctgactgtggtgcgggagtttgtgctgctgggcctgcccagcagcgctgagcagcagcacctgctgtctgtgctcttcctgtgcatgtacctggccaccaccctgggcaacatgctgatcatcgccaccatcggctttgacagccacctgcacagccccatgtacttcttcctgagcaacctggcctttgtggacatctgcttcaccagcaccaccgtgccccagatggtggtgaacatcctgaccggcaccaagaccatcagctttgctggctgcctgacccagctgttcttctttgtgtcctttgtgaacatggacagcctgctgctgtgtgtgatggcctatgacagatatgtggccatctgccaccccctgcactacacagccaggatgaacctgtgcctgtgtgtgcagctggtggccggcctgtggctggtgacctacctgcacgccctgctgcacacagtgctgattgcccagctgtccttctgtgccagcaacatcatccaccacttcttctgtgacctgaaccccctgctgcagctgagctgcagtgatgtgtccttcaacgtgatgatcatctttgctgtgggcggcctgctggccctgacccccctggtgtgcatcctggtgtcctatggcctcatcttcagcacagtgctgaagatcaccagcacccagggcaagcagagagctgtgtccacctgcagctgccacctgtctgtggtggtgctcttctacggcacagccatcgctgtgtacttcagccccagcagcccccacatgcctgagagtgacaccctgagcaccatcatgtacagcatggtggcccccatgctgaaccccttcatctacaccctgaggaacagagacatgaagaggggcctgcagaagatgctgctgaagtgcaccgtcttccagcagcagtag

SEQ ID NO: 174173 - DNA, 1307 bp, Artificial Sequence
  derived and/or modified sequence
tttgcattttcttttgggggaagaagtcagtcttgaaagaagttgatactgacatgtccagcatgtctatgtgactatgaagacagaatatcatgaacacaagatgtcattggaaagcattcaagcaagcaagtttggatgctacttacctgcgcacgcatgcacacacacacacacacacacacacacacactgtctctctctcatgaataagagacttaacactgctggcttttacaatttaataacttatttttctagatttgttgggaatatggaaaaaagaaatctaacagttgtcagggaattcgtccttctgggacttcctagctcagcagagcagcagcacctcctgtctgtgctctttctctgtatgtatttagccaccaccttggggaacatgctcatcattgcgacgattggctttgactctcacctccattcccctatgtacttcttccttagtaacttggcctttgttgacatctgctttacgtcgactacagtcccccaaatggtagtgaatatcttgactggcaccaagactatctcttttgcaggctgcctcacccagctcttcttcttcgtttcttttgtgaatatggacagcctccttctgtgtgtgatggcgtatgatagatatgtggcgatttgccaccccttacattacaccgccagaatgaacctgtgcctttgtgtccagctagtggctggactgtggcttgttacttacctccacgccctcctgcatactgtcctaatagcacagctgtccttctgtgcctccaatatcatccatcatttcttctgtgatctcaatcctctcctgcagctctcttgctctgacgtctccttcaatgtaatgatcatttttgcagtaggaggtctattggctctcacgccccttgtctgtatcctcgtatcttatggacttatcttctccactgttctgaagatcacctctactcagggcaagcagagagctgtttccacctgcagctgccacctgtcagtggtggtgttgttttacggcacagccatcgccgtctatttcagcccttcatccccccatatgcctgagagcgacactctgtcaaccatcatgtattcaatggtggctccgatgctgaatcctttcatctataccctaaggaacagggatatgaagaggggacttcagaaaatgcttctcaagtgcacagtctttcagcagcaataatgacctcagtgactgaattaaataatactaatgtggtgataagaaagtgtgactagatgctcacaataacagtgagaagagaaaccaa

SEQ ID NO: 174174 - DNA, 945 bp, Artificial Sequence
  derived and/or modified sequence
atggagaagcggaacctgaccgtggtgcgggagttcgtgctgctggggttaccttcatctgcagaacagcaacacctcctcagcgttctgtttctgtgcatgtacctcgccaccacactcggaaatatgctgattattgcaaccattggcttcgactcacacctccatagccccatgtacttctttctcagtaacttggcgtttgtagatatctgcttcacttctaccactgtacctcagatggtcgttaacattctcaccggcacaaagacgatttctttcgctggctgtctgacacagctcttcttttttgtgagcttcgtaaacatggattcactgttactctgcgtgatggcatacgatcgttacgtggcaatttgccaccctctgcactacacagcaagaatgaatctctgcctgtgcgtgcagctcgtggcagggttgtggctcgtgacctacctgcacgcactgttgcacaccgtcctgatcgcccagctgtccttctgtgcctccaatatcattcaccattttttctgtgaccttaatccactcctgcagttaagctgcagcgacgtttcttttaacgtaatgattatttttgccgtcggaggcctcctcgcgctaacaccgctggtttgcattctggtttcctatgggttaatcttctctactgtcctgaagatcacgtcgacccagggaaagcagcgggcagttagtacttgttcatgccacttatccgtggtggtcctgttttacggcacagccatcgcggtgtacttttctccctcatcccctcacatgcccgaaagcgacacattatctaccatcatgtattcaatggtcgccccaatgctcaatcccttcatctatacattgcggaatcgtgacatgaaaaggggactgcaaaaaatgcttctgaaatgcaccgtgttccagcaacagtag

SEQ ID NO: 174175 - DNA, 945 bp, Artificial Sequence
  derived and/or modified sequence
atggagaagaggaatctcacagtagtgagggaatttgtgctgcttggattgccctctagcgctgagcagcagcacctcctaagtgtgttatttctgtgtatgtacttggccaccaccctcgggaacatgctgatcatcgccacaatcggatttgactcccacctccattcccctatgtacttctttcttagcaatcttgccttcgtcgacatttgctttacttcgactactgtcccccagatggtggtgaatatcctgactggcaccaagacaatcagcttcgctggatgcctgacccaactgtttttcttcgtgagctttgttaacatggactccttgctgctatgcgtgatggcgtacgatcggtacgtcgccatctgccacccactccattatacggctcggatgaatctctgcctctgcgttcaacttgtcgctgggctgtggctggtgacatatttgcatgctctgctccatactgtgctgatagcccagctcagtttctgcgctagtaacattatccaccacttcttctgtgacctcaatccactcttgcagctaagctgcagtgacgtatcattcaacgtcatgattatcttcgcggtggggggtttgctcgcactcacacctctcgtctgcattctggtatcatatggattgatcttcagtacagtcctaaaaatcacaagcacacagggcaagcaacgtgcagtcagtacttgcagttgccatctttccgtcgtcgtcctcttctacggaacagccatcgccgtgtactttagcccctcctctccacacatgccagagagtgacacgctttcgactattatgtatagtatggtggcccctatgcttaaccccttcatttacactcttcgaaacagagacatgaaacgcggacttcagaaaatgctccttaagtgcaccgtgtttcaacagcagtag

SEQ ID NO: 174176 - protein, 311 aa, Artificial Sequence
  derived and/or modified sequence
MENQSSISEFFLRGISAPPEQQQSLFGIFLCMYLVTLTGNLLIILAIGSDLHLHTPMYFFLANLSFVDMGLTSSTVTKMLVNIQTRHHTISYTGCLTQMYFFLMFGDLDSFFLAAMAYDRYVAICHPLCYSTVMRPQVCALMLALCWVLTNIVALTHTFLMARLSFCVTGEIAHFFCDITPVLKLSCSDTHINEMMVFVLGGTVLIVPFLCIVTSYIHIVPAILRVRTRGGVGKAFSTCSSHLCVVCVFYGTLFSAYLCPPSIASEEKDIAAAAMYTIVTPMLNPFIYSLRNKDMKGALKRLFSHRSIVSS

SEQ ID NO: 174177 - DNA, 936 bp, Artificial Sequence
  derived and/or modified sequence
atggagaaccagagcagcatcagcgagttcttcctgagaggcatcagcgccccccccgagcagcagcagagcctgttcggcatcttcctgtgcatgtacctggtgaccctgaccggcaacctgctgatcatcctggccatcggcagcgacctgcacctgcacacccccatgtacttcttcctggccaacctgagcttcgtggacatgggcctgaccagcagcaccgtgaccaagatgctggtgaacatccagaccagacaccacaccatcagctacaccggctgcctgacccagatgtacttcttcctgatgttcggcgacctggacagcttcttcctggccgccatggcctacgacagatacgtggccatctgccaccccctgtgctacagcaccgtgatgagaccccaggtgtgcgccctgatgctggccctgtgctgggtgctgaccaacatcgtggccctgacccacaccttcctgatggccagactgagcttctgcgtgaccggcgagatcgcccacttcttctgcgacatcacccccgtgctgaagctgagctgcagcgacacccacatcaacgagatgatggtgttcgtgctgggcggcaccgtgctgatcgtgcccttcctgtgcatcgtgaccagctacatccacatcgtgcccgccatcctgagagtgagaaccagaggcggcgtgggcaaggccttcagcacctgcagcagccacctgtgcgtggtgtgcgtgttctacggcaccctgttcagcgcctacctgtgcccccccagcatcgccagcgaggagaaggacatcgccgccgccgccatgtacaccatcgtgacccccatgctgaaccccttcatctacagcctgagaaacaaggacatgaagggcgccctgaagagactgttcagccacagaagcatcgtgagcagctag

SEQ ID NO: 174178 - DNA, 936 bp, Artificial Sequence
  derived and/or modified sequence
atggagaatcagtcctctatcagcgagttctttctgcgggggatttcagcccctccagaacagcagcagtctctctttggcatttttctgtgcatgtatctagtcactctgaccggaaacctgctcatcatcctcgccatcggatcagacctgcacctccacacaccgatgtatttttttcttgccaacctctctttcgtggatatgggcctaacttctagcaccgtgaccaagatgctcgtgaatatccaaacacggcatcacactatatcatacaccggctgcctgacccaaatgtatttttttctgatgttcggcgatctggacagtttttttctggccgccatggcttacgaccgatacgtcgccatctgccatcccctgtgctacagtacagtcatgcggcctcaggtctgcgcattaatgttagctttgtgttgggtgcttacaaatattgtggccctaacccacactttcctgatggcgagactgtctttctgcgtgactggggagattgctcattttttctgcgatataacgcccgttcttaagttgagctgtagcgacacacacatcaatgagatgatggttttcgttcttggcgggaccgtgctcatcgttccttttttgtgtattgttacatcctacatccatatagtcccagcaattcttagggttcggacccgaggcggtgtcggaaaggctttttccacttgctcttcccacctttgtgtggtctgcgtcttctacggtacactcttttctgcctatctgtgtcccccatcgattgcctccgaagaaaaggacatcgccgcagctgccatgtacaccatcgtgacccccatgctgaaccccttcatctacagcctgagaaataaagatatgaaaggtgctttaaaaaggctttttagtcaccgctccattgtcagctcttag

SEQ ID NO: 174179 - DNA, 936 bp, Artificial Sequence
  derived and/or modified sequence
atggagaaccagagcagcatcagcgagttcttcctgcggggcatcagcgcccctcctgagcagcagcagagcctgtttggcatcttcctgtgcatgtacctggtgaccctgaccggcaacctgctgatcatcctggccatcggcagtgacctgcacctgcacacccccatgtacttcttcctggccaacctgagctttgtggacatgggcctgaccagcagcacagtgaccaagatgctggtgaacatccagaccaggcaccacaccatctcctacacaggctgcctgacccagatgtacttcttcctgatgtttggagacctggacagcttcttcctggccgccatggcctatgacagatatgtggccatctgccaccccctgtgctacagcacagtgatgaggccccaggtgtgtgccctgatgctggccctgtgctgggtgctgaccaacatcgtggccctgacccacaccttcctgatggcccggctgtccttctgtgtgactggagagatcgcccacttcttctgtgacatcacccctgtgctgaagctgagctgcagcgacacccacatcaatgagatgatggtgtttgtgctgggcggcaccgtgctgattgtgcccttcctgtgcatcgtgaccagctacatccacatcgtgcctgccatcctgcgggtgaggacccggggcggcgtgggcaaggccttcagcacctgcagcagccacctgtgtgtggtgtgtgtgttctacggcaccctcttcagcgcctacctgtgcccccccagcatcgccagcgaggagaaggacattgctgctgctgccatgtacaccatcgtgacccccatgctgaaccccttcatctacagcctgaggaacaaggacatgaagggggccctgaagaggctcttcagccacaggagcatcgtgagcagctag

SEQ ID NO: 174180 - DNA, 936 bp, Artificial Sequence
  derived and/or modified sequence
atggaaaaccaatccagcatttctgaatttttcctccgaggaatatcagcgcctccagagcaacagcagtccctcttcggaattttcctgtgtatgtatcttgtcaccttgactgggaacctgctcatcatcctggccattggctctgacctgcacctccacacccccatgtactttttcttggccaacctgtcttttgttgacatgggtttaacgtcctccacagttaccaagatgctggtgaatatacagactcggcatcacaccatctcctatacgggttgcctcacgcaaatgtatttctttctgatgtttggtgatctagacagcttcttcctggctgccatggcgtatgaccgctatgtggccatttgccaccccctctgctactccacagtcatgaggccccaagtctgtgccctaatgcttgcattgtgctgggtcctcaccaatatcgttgccctgactcacacgttcctcatggctcggttgtccttctgtgtgactggggaaattgctcactttttctgtgacatcactcctgtcctgaagctgtcatgttctgacacccacatcaacgagatgatggtttttgtcttgggaggcaccgtactcatcgtcccctttttatgcattgtcacctcctacatccacattgtgccagctatcctgagggtccgaacccgtggtggggtgggcaaggccttttccacctgcagttcccacctctgcgttgtttgtgtgttctatgggaccctcttcagtgcctacctgtgtcctccctccattgcctctgaagagaaggacattgcagcagctgcaatgtacaccatagtgactcccatgttgaacccctttatctatagcctaaggaacaaggacatgaagggggccctaaagaggctcttcagtcacaggagtattgtttcctcttag

SEQ ID NO: 174181 - DNA, 936 bp, Artificial Sequence
  derived and/or modified sequence
atggagaaccagagcagcatcagcgagttcttcctgcggggcatctcggcccctcctgaacaacagcagagtctgtttggcattttcctttgtatgtatctggtcacactgaccgggaacctactgatcatactggctatcggttccgacctccacctgcatacccccatgtacttcttcctggccaacttgtcgtttgtggacatggggctcacttcatctacagtgacgaagatgctggtgaacatccagaccaggcaccatacaattagctatacgggctgcttgacccagatgtacttctttctcatgtttggtgacttggactccttctttttagcggccatggcttatgacaggtacgttgcaatctgtcaccccttgtgttactcaactgtgatgcggccgcaggtttgcgccctcatgctggctctttgctgggttctgacaaacatagtcgccctcactcacacatttctgatggcccgcctcagcttctgcgtgactggcgagattgcgcactttttttgtgacatcacccctgttctcaagctttcgtgctcagacacacacatcaatgaaatgatggtgtttgtgttaggaggtacagttctgatagtgccatttctttgcatcgtcacgagttatatccatatcgtccctgccattttaagagtacgcactcgggggggagtggggaaagcttttagcacttgctctagtcacctgtgtgtagtgtgtgttttttatggaacgctgttctctgcctacctgtgtcccccaagcatcgcctctgaagaaaaagacattgctgccgccgcaatgtatacgatcgtaaccccgatgctgaatccatttatatactcactgcgcaataaggacatgaagggggcgttgaaacgtttgttctctcatagatctattgtgtccagttag

SEQ ID NO: 174182 - DNA, 936 bp, Artificial Sequence
  derived and/or modified sequence
atggagaaccagagcagtatctccgagttcttcttacgtggaatctcggcccctcctgaacaacagcaatccttgttcggcatcttcttatgcatgtatcttgtgacccttaccggcaatttactcatcatactggcaatcggatcagacctccacctgcacacccctatgtactttttcctcgctaatctgagttttgtggacatgggtctgactagctccacagtcaccaagatgctagtcaacatccagactcggcatcataccatttcatacaccggctgtctaacacagatgtatttctttctaatgtttggggatttggatagcttcttcctggcagccatggcctacgaccggtacgtggccatctgtcaccctctctgctacagtactgtgatgcgccctcaggtttgcgctctcatgttggccctgtgctgggttctgacaaacattgtggccctgacccataccttcctgatggcacgactgagtttttgcgtgacaggcgagatcgctcacttcttctgtgacataacccctgtcctgaagctgtcttgctccgatacccatataaacgagatgatggtcttcgtcctagggggaactgtgctgattgttccctttctctgtatcgtcacaagttatatccatatcgtgccggctatcctgcgggtgaggactcgtgggggagtcgggaaagccttttcaacctgctctagccacctctgtgtggtttgcgtcttttatggcacactattcagtgcctatttgtgcccaccctctatcgcttctgaagaaaaggacatcgccgctgcagcaatgtacacaatcgtgacgcccatgctcaatccattcatatactccttgcgcaacaaagacatgaaaggtgctcttaagcgtcttttctcacaccggtcaatcgtttcctcctag

SEQ ID NO: 174183 - protein, 313 aa, Artificial Sequence
  derived and/or modified sequence
MNWVNDSIIQEFILLGFSDRPWLEFPLLVVFLISYTVTIFGNLTIILVSRLDTKLHTPMYFFLTNLSLLDLCYTTCTVPQMLVNLCSIRKVISYRGCVAQLFIFLALGATEYLLLAVMSFDRFVAICRPLHYSVIMHQRLCLQLAAASWVTGFSNSVWLSTLTLQLPLCDPYVIDHFLCEVPALLKLSCVETTANEAELFLVSELFHLIPLTLILISYAFIVRAVLRIQSAEGRQKAFGTCGSHLIVVSLFYSTAVSVYLQPPSPSSKDQGKMVSLFYGIIAPMLNPLIYTLRNKEVKEGFKRLVARVFLIKK

SEQ ID NO: 174184 - DNA, 942 bp, Artificial Sequence
  derived and/or modified sequence
atgaactgggtgaacgacagcatcatccaggagttcatcctgctgggcttcagcgacagaccctggctggagttccccctgctggtggtgttcctgatcagctacaccgtgaccatcttcggcaacctgaccatcatcctggtgagcagactggacaccaagctgcacacccccatgtacttcttcctgaccaacctgagcctgctggacctgtgctacaccacctgcaccgtgccccagatgctggtgaacctgtgcagcatcagaaaggtgatcagctacagaggctgcgtggcccagctgttcatcttcctggccctgggcgccaccgagtacctgctgctggccgtgatgagcttcgacagattcgtggccatctgcagacccctgcactacagcgtgatcatgcaccagagactgtgcctgcagctggccgccgccagctgggtgaccggcttcagcaacagcgtgtggctgagcaccctgaccctgcagctgcccctgtgcgacccctacgtgatcgaccacttcctgtgcgaggtgcccgccctgctgaagctgagctgcgtggagaccaccgccaacgaggccgagctgttcctggtgagcgagctgttccacctgatccccctgaccctgatcctgatcagctacgccttcatcgtgagagccgtgctgagaatccagagcgccgagggcagacagaaggccttcggcacctgcggcagccacctgatcgtggtgagcctgttctacagcaccgccgtgagcgtgtacctgcagccccccagccccagcagcaaggaccagggcaagatggtgagcctgttctacggcatcatcgcccccatgctgaaccccctgatctacaccctgagaaacaaggaggtgaaggagggcttcaagagactggtggccagagtgttcctgatcaagaagtag

SEQ ID NO: 174185 - DNA, 942 bp, Artificial Sequence
  derived and/or modified sequence
atgaattgggtcaatgacagcatcattcaggaatttattctattgggttttagtgaccgaccttggctggagttccctctgctcgttgtctttctgattagctacacggtgacaatttttggtaatctgacgattatcctggtgtctagactagataccaaactacacactccaatgtatttttttctaactaacctctctcttcttgatctctgctacactacatgcaccgttccacagatgcttgtgaatctgtgcagcattcgtaaagttatcagctatcgcgggtgcgtagcccagctgtttatcttcttagccctgggagcgacagagtatctgctccttgccgtaatgagctttgaccgattcgttgcgatatgtcgcccgttacactacagtgtcattatgcatcagagactctgccttcagctagcggctgccagttgggtgactggctttagcaactccgtctggttatctacccttacactgcaactccctttatgcgatccgtacgtgatcgatcacttcctctgcgaggtccctgcgctgctgaagctaagctgcgtggagaccactgcaaacgaggcagaactcttcctggtaagcgaactgttccacttaattccccttacattgatactcatcagttacgcgttcattgtgagggcagtgctgcgcatccagtcggcagaggggcgccagaaggcattcggaacctgcggttctcatctcatcgtggtgagcctgttttactccacggccgtgagcgtgtaccttcagccgccatcaccaagctccaaagaccaggggaagatggtgtcgctgttttatggcattatagctcccatgctgaatccccttatctacactctccgtaacaaggaagtgaaggagggattcaagaggctagttgccagggtcttcctgattaaaaagtag

SEQ ID NO: 174186 - DNA, 942 bp, Artificial Sequence
  derived and/or modified sequence
atgaactgggtgaatgacagcatcatccaggagttcatcctgctgggcttcagtgaccggccctggctggagttccccctgctggtggtgttcctgatctcctacacagtgaccatcttcggcaacctgaccatcatcctggtgtcccggctggacaccaagctgcacacccccatgtacttcttcctgaccaacctgagcctgctggacctgtgctacaccacctgcaccgtgccccagatgctggtgaacctgtgcagcatcaggaaggtgatctcctaccggggctgtgtggcccagctgttcatcttcctggccctgggcgccacagagtacctgctgctggccgtgatgagctttgacagatttgtggccatctgccggcccctgcactacagcgtcatcatgcaccagaggctgtgcctgcagctggccgccgcctcctgggtgacaggcttcagcaacagcgtgtggctgagcaccctgaccctgcagctgcccctgtgtgacccctacgtgattgaccacttcctgtgtgaggtgcctgccctgctgaagctgagctgtgtggagaccacagccaatgaagctgagctgttcctggtgtctgagctgttccacctgatccccctgaccctcatcctgatctcctatgccttcatcgtgcgggctgtgctgcgcatccagagcgctgagggccggcagaaggccttcggcacctgtggcagccacctgattgtggtgtccctcttctacagcacagctgtgtctgtgtacctgcagccccccagccccagcagcaaggaccagggcaagatggtgtccctcttctacggcatcatcgcccccatgctgaaccccctcatctacaccctgaggaacaaggaggtgaaggagggcttcaagaggctggtggcccgggtcttcctgatcaagaagtag

SEQ ID NO: 174187 - DNA, 942 bp, Artificial Sequence
  derived and/or modified sequence
atgaattgggtaaatgacagcatcatacaggagtttattctgctgggtttctcagatcgaccttggctggagtttccactccttgtggtcttcttgatttcttacactgtgaccatctttggcaatctgaccattattctagtgtcacgcctggacaccaaacttcatacccccatgtatttttttcttaccaatctatcactcctggatctttgttacaccacatgtacagtcccacaaatgctagtaaatttatgcagcatcaggaaagtaatcagttatcgtggctgtgtagcccagcttttcatatttctggccttgggggctactgaatatcttctcctggccgtcatgtcctttgataggtttgtagctatttgtcggcctctccattactcagttatcatgcaccagagactctgcctccagttggcagctgcatcctgggttactggttttagtaactcagtgtggttgtctaccctgactctccagctgccactctgtgacccctatgtgatagatcactttctctgtgaagtccctgcactgctcaagttatcttgtgttgagacaacagcaaatgaggctgaactattccttgtcagtgagctcttccatctaatacccctgacactcatccttatatcatatgcttttattgtccgagcagtattgaggatacagtctgctgaaggtcgacaaaaagcatttgggacatgtggttcccatctaattgtggtgtctcttttttatagtacagccgtctctgtgtacctgcaaccaccttcgcccagctccaaggaccaaggaaagatggtttctctcttctatggaatcattgcacccatgctgaatccccttatatatacacttaggaacaaggaggtaaaggaaggctttaaaaggttggttgcaagagtcttcttaatcaagaaataa

SEQ ID NO: 174188 - DNA, 942 bp, Artificial Sequence
  derived and/or modified sequence
atgaactgggtgaacgacagcatcatccaggagttcatcctgctgggattctctgaccgaccctggctggagttccctctactcgtggtatttttgatctcatatacagtaacgatattcgggaatctgactatcatcttagtctcccgcctagatacaaagctgcacacacccatgtacttctttctcactaacctctccctcctcgatctgtgctatacgacgtgcaccgtgccccagatgttggtgaatctgtgcagcatcagaaaggtgatctcttataggggctgtgtggctcagctattcatcttcctggccttgggagctactgaatacctgctcctggctgtgatgtctttcgatcgcttcgtggccatctgccgcccattgcattactccgtcatcatgcatcagcggctctgcctccaactagcagctgctagctgggttactggattctcaaactccgtctggctgtcaaccctcactctccagctgcctctgtgtgatccctatgtgatcgatcacttcctttgtgaggtccctgcgctgctcaagcttagttgtgtggaaacaactgccaacgaagccgagctgtttctggtttctgagttgtttcatctcatccctctgactctgattctgattagttacgcttttatcgtcagagcggtactcaggattcagtccgctgaggggaggcaaaaggcttttggtacttgtggcagccacctaatagtggtcagtttgttctatagcactgccgtaagtgtctacctgcagcctccgtctccctccagtaaggaccaggggaaaatggtgtcactgttttacggcattatagctcctatgctgaatcctctgatttacaccctaagaaacaaagaggttaaagaaggattcaagcgcctggtggcccgtgtgtttttgatcaaaaaatag

SEQ ID NO: 174189 - DNA, 942 bp, Artificial Sequence
  derived and/or modified sequence
atgaactgggtgaatgattccatcatacaggagttcattctgctgggtttcagtgatagaccctggctggaatttccactgctggtggtgttccttatctcatacaccgtgactatcttcgggaatcttactattattctggtctcccgtctcgacactaaactccatacacccatgtacttcttcctgaccaatctttccctgttggacctctgttacaccacctgtacggtgccccaaatgctggtcaatctttgctctatccgcaaggttatcagctaccgcggttgcgtggcacagctgtttatatttctggctctgggcgctacagaatacctccttctcgcagtgatgtcctttgacaggtttgtggctatttgccgcccactgcattacagcgtgatcatgcatcagagactatgtctgcaattggcggctgccagttgggtgacaggcttctccaacagcgtttggcttagcaccctgacgctgcagctcccactctgtgatccttacgtgatcgatcatttcctgtgcgaggtgccagcgcttctgaagttgagttgcgtggaaacgactgcaaacgaggcagaattgtttctggtctccgaactgttccacctcatccctttgaccctcatcctgattagctacgcattcatcgttcgcgcagtgcttagaattcaatccgctgaaggcagacaaaaagcctttggtacctgcgggtcccatttgattgtggtgagtttgttttactctaccgcagttagtgtatatcttcagcctccatctccttcatcgaaggaccagggcaagatggtgagcttgttttacggcatcattgcgccaatgctgaatccccttatctacactctgagaaataaggaagtgaaggaaggtttcaaaagacttgtggctcgcgtgtttctcataaagaaatag

SEQ ID NO: 174190 - protein, 312 aa, Artificial Sequence
  derived and/or modified sequence
MDGVNDSSLQGFVLMGISDHPQLEMIFFIAILFSYLLTLLGNSTIILLSRLEARLHTPMYFFLSNLSSLDLAFATSSVPQMLINLWGPGKTISYGGCITQLYVFLWLGATECILLVVMAFDRYVAVCRPLRYTAIMNPQLCWLLAVIACLGGLGNSVIQSTFTLQLPLCGHRRVEGFLCEVPAMIKLACGDTSLNQAVLNGVCTFFTAVPLSIIVISYCLIAQAVLKIRSAEGRRKAFNTCLSHLLVVFLFYGSASYGYLLPAKNSKQDQGKFISLFYSLVTPMVNPLIYTLRNMEVKGALRRLLGKGREVG

SEQ ID NO: 174191 - DNA, 939 bp, Artificial Sequence
  derived and/or modified sequence
atggacggcgtgaacgacagcagcctgcagggcttcgtgctgatgggcatcagcgaccacccccagctggagatgatcttcttcatcgccatcctgttcagctacctgctgaccctgctgggcaacagcaccatcatcctgctgagcagactggaggccagactgcacacccccatgtacttcttcctgagcaacctgagcagcctggacctggccttcgccaccagcagcgtgccccagatgctgatcaacctgtggggccccggcaagaccatcagctacggcggctgcatcacccagctgtacgtgttcctgtggctgggcgccaccgagtgcatcctgctggtggtgatggccttcgacagatacgtggccgtgtgcagacccctgagatacaccgccatcatgaacccccagctgtgctggctgctggccgtgatcgcctgcctgggcggcctgggcaacagcgtgatccagagcaccttcaccctgcagctgcccctgtgcggccacagaagagtggagggcttcctgtgcgaggtgcccgccatgatcaagctggcctgcggcgacaccagcctgaaccaggccgtgctgaacggcgtgtgcaccttcttcaccgccgtgcccctgagcatcatcgtgatcagctactgcctgatcgcccaggccgtgctgaagatcagaagcgccgagggcagaagaaaggccttcaacacctgcctgagccacctgctggtggtgttcctgttctacggcagcgccagctacggctacctgctgcccgccaagaacagcaagcaggaccagggcaagttcatcagcctgttctacagcctggtgacccccatggtgaaccccctgatctacaccctgagaaacatggaggtgaagggcgccctgagaagactgctgggcaagggcagagaggtgggctag

SEQ ID NO: 174192 - DNA, 939 bp, Artificial Sequence
  derived and/or modified sequence
atggacggcgtaaacgactccagtctacaaggttttgtgttgatgggtatttctgatcaccctcaactggaaatgattttttttatcgcaatcttattcagctatctgctcacactgttggggaactcaaccattatcctgttgagccgcctggaagcccgtctgcatacacccatgtacttctttctgagtaatctatccagcttggacctcgcctttgctacctcaagtgttccacagatgctgatcaacctctgggggcccggaaagaccatttcatacggtggctgcatcacacagttgtacgtgtttctgtggctgggtgcaaccgaatgcatactcctcgtggtgatggccttcgacagatacgtcgcagtgtgtaggcccctccgctacacagcaattatgaatccacagctgtgctggctgctcgcggttatcgcgtgcctggggggactggggaattccgttattcagagcaccttcaccctgcagctgccgctatgcggacatcgtcgtgtggagggatttctgtgtgaagtaccggctatgatcaagcttgcgtgcggagacacgtctctaaatcaggccgtccttaatggcgtgtgtacattctttacggccgtgcctttgagcattattgtgatctcctactgcctgattgcacaggccgtcctcaagatccgcagtgctgaaggcagacgaaaagcctttaatacctgcttatcccatttgctggtcgtcttccttttctacggcagcgcgtcatacggctatctgctgcccgcaaaaaactcaaaacaggaccaggggaaattcatctcccttttttacagcctggtgaccccaatggtaaatccactcatctataccctcaggaacatggaggtgaagggagcccttcggcgtctgctcgggaaggggcgggaggttggctag

SEQ ID NO: 174193 - DNA, 939 bp, Artificial Sequence
  derived and/or modified sequence
atggatggagtgaatgacagcagcctgcagggctttgtgctgatgggcatcagtgaccacccccagctggagatgatcttcttcatcgccatcctcttctcctacctgctgaccctgctgggcaacagcaccatcatcctgctgagccggctggaggcccggctgcacacccccatgtacttcttcctgagcaacctgagcagcctggacctggcctttgccaccagctctgtgccccagatgctgatcaacctgtggggccctgggaagaccatctcctatggaggctgcatcacccagctgtatgtgttcctgtggctgggcgccacagagtgcatcctgctggtggtgatggcctttgacagatatgtggccgtgtgccggcccctgcgctacacagccatcatgaacccccagctgtgctggctgctggccgtgattgcctgcctgggcggcctgggcaacagcgtcatccagagcaccttcaccctgcagctgcccctgtgtggccaccggcgggtggagggcttcctgtgtgaggtgcctgccatgatcaagctggcctgtggggacaccagcctgaaccaggccgtgctgaatggagtgtgcaccttcttcaccgctgtgcccctgagcatcatcgtcatctcctactgcctgattgcccaggccgtgctgaagatccgctctgctgagggccgcaggaaggccttcaacacctgcctgagccacctgctggtggtgttcctgttctacggcagcgccagctatggctacctgctgcctgccaagaacagcaagcaggaccagggcaagttcatcagcctcttctacagcctggtgacccccatggtgaaccccctcatctacaccctgaggaacatggaggtgaagggggccctgcggcggctgctgggcaagggccgggaggtgggctag

SEQ ID NO: 174194 - DNA, 1036 bp, Artificial Sequence
  derived and/or modified sequence
ttccagcagcttgcgctaaatgaattcatcaagtgactgaagacaaccagtgatggacggggtgaatgatagctccttgcagggctttgttctgatgggcatatcagaccatccccagctggagatgatcttttttatagccatcctcttctcctatttgctgaccctacttgggaactcaaccatcatcttgctttcccgcctggaggcccggctccatacacccatgtacttcttcctcagcaacctctcctccttggaccttgctttcgctactagttcagtcccccaaatgctgatcaatttatggggaccaggcaagaccatcagctatggtggctgcataacccagctctatgtcttcctttggctgggggccaccgagtgcatcctgctggtggtgatggcatttgaccgctacgtggcagtgtgccggcccctccgctacaccgccatcatgaacccccagctctgctggctgctggctgtgattgcctgcctgggtggcttgggcaactctgtgatccagtcaacattcactctgcagctcccattgtgtgggcaccggagggtggagggattcctctgcgaggtgcctgccatgatcaaactggcctgtggcgacacaagtctcaaccaggctgtgctcaatggtgtctgcaccttcttcactgcagtcccactaagcatcatcgtgatctcctactgcctcattgctcaggcagtgctgaaaatccgctctgcagaggggaggcgaaaggcgttcaatacgtgcctctcccatctgctggtggtgttcctcttctatggctcagccagctatgggtatctgcttccggccaagaacagcaaacaggaccagggcaagttcatttccctgttctactcgttggtcacacccatggtgaatcccctcatctacacgctgcggaacatggaagtgaagggcgcactgaggaggttgctggggaaaggaagagaagttggctgagagaacactccttcgttatttattgcgtcttcatctctacatgcg

SEQ ID NO: 174195 - DNA, 939 bp, Artificial Sequence
  derived and/or modified sequence
atggacggcgtgaacgacagcagcctgcagggcttcgtgctgatgggtatcagcgatcacccacagctggaaatgatctttttcatcgctatcctttttagttacctgctaaccttgctcggcaactccactattatcctattgtcacggctggaagccaggctgcacacccccatgtactttttcttgtcaaacctctctagtctcgatctggcgttcgccacctcatccgtgccccagatgctaatcaacttgtgggggccaggcaagacaatttcgtatggtggttgcataacgcagctctacgtgttcctctggctgggcgccaccgaatgcatattgctggtcgtgatggcatttgaccggtatgtggcagtgtgtaggcctctgaggtacactgctatcatgaacccgcaattgtgctggctgctggcagtcatcgcttgcctgggagggcttggtaactctgtcattcagtccacattcaccctgcagctacctttgtgcggtcaccgcagagtcgaagggttcctgtgcgaggtgcctgcaatgattaaactcgcctgtggcgatacaagcctcaatcaagctgtgttgaacggcgtgtgcaccttttttacggcggtaccattgagtatcatcgtgataagttactgcctcattgctcaggcggtgctgaagatccggtcagccgagggtcggagaaaagctttcaatacctgcctgagccacctcctcgttgtgtttctgttttatggatcggccagctatggttatctactgccggcgaagaactcaaagcaggatcagggcaagttcattagcctgttctacagtctcgtgacacccatggttaatccccttatatacacactgcgaaatatggaagtgaagggggcactgagacggctcctggggaaaggacgggaggtggggtag

SEQ ID NO: 174196 - DNA, 939 bp, Artificial Sequence
  derived and/or modified sequence
atggacggcgtaaacgattcctccttgcaaggatttgttctgatgggaatctcagaccacccccagttggaaatgatcttttttatcgccatccttttctcttacctcttaaccctcttgggcaactctacaatcatattgctaagcaggctggaagccaggctgcacacacctatgtatttctttcttagtaatctgtctagcttggacctcgctttcgctacaagtagcgtaccccagatgctcataaatttatggggccctggcaaaacaattagttacggagggtgcattacccaactctacgtctttttgtggctcggcgctacagagtgtattctgctggtggtcatggcctttgacaggtacgtagcagtctgcagacccttacgatacaccgctatcatgaacccacagctgtgctggcttctggctgtgattgcatgccttggcggactgggcaacagcgtcatccagtcaactttcacgctgcagcttccactgtgcgggcacaggcgggtagaaggtttcctgtgtgaggtcccggcaatgatcaaactagcttgcggagatactagtcttaatcaggctgtgcttaatggggtttgcacctttttcaccgctgtgcccctatctatcattgtcattagctactgccttatagcacaggccgtgttgaaaattagaagcgctgaaggaagacgcaaggccttcaacacttgtttgtcccatctgttagtggtttttttgttctatggaagtgccagctacggatacctgctgcccgctaagaattcaaagcaagatcagggaaaatttattagccttttctattccctcgtcaccccaatggtgaacccactgatttacacactgagaaatatggaagtgaagggggcactgcgcaggctcctcggaaaggggagagaagttggctag

SEQ ID NO: 174197 - protein, 711 aa, Artificial Sequence
  derived and/or modified sequence
MATSSMSKGCFVFKPNSKKRKISLPIEDYFNKGKNEPEDSKLRFETYQLIWQQMKSENERLQEELNKNLFDNLIEFLQKSHSGFQKNSRDLGGQIKLREIPTAALVLGVNVTDHDLTFGSLTEALQNNVTPYVVSLQAKDCPDMKHFLQKLISQLMDCCVDIKSKEEESVHVTQRKTHYSMDSLSSWYMTVTQKTDPKMLSKKRTTSSQWQSPPVVVILKDMESFATKVLQDFIIISSQHLHEFPLILIFGIATSPIIIHRLLPHAVSSLLCIELFQSLSCKEHLTTVLDKLLLTTQFPFKINEKVLQVLTNIFLYHDFSVQNFIKGLQLSLLEHFYSQPLSVLCCNLPEAKRRINFLSNNQCENIRRLPSFRRYVEKQASEKQVALLTNERYLKEETQLLLENLHVYHMNYFLVLRCLHKFTSSLPKYPLGRQIRELYCTCLEKNIWDSEEYASVLQLLRMLAKDELMTILEKCFKVFKSYCENHLGSTAKRIEEFLAQFQSLDETKEEEDASGSQPKGLQKTDLYHLQKSLLEMKELRRSKKQTKFEVLRENVVNFIDCLVREYLLPPETQPLHEVVYFSAAHALREHLNAAPRIALHTALNNPYYYLKNEALKSEEGCIPNIAPDICIAYKLHLECSRLINLVDWSEAFATVVTAAEKMDANSATSEEMNEIIHARFIRAVSELELLGFIKPTKQKTDHVARLTWGGC

SEQ ID NO: 174198 - protein, 568 aa, Artificial Sequence
  derived and/or modified sequence
MKHFLQKLISQLMDCCVDIKSKEEESVHVTQRKTHYSMDSLSSWYMTVTQKTDPKMLSKKRTTSSQWQSPPVVVILKDMESFATKVLQDFIIISSQHLHEFPLILIFGIATSPIIIHRLLPHAVSSLLCIELFQSLSCKEHLTTVLDKLLLTTQFPFKINEKVLQVLTNIFLYHDFSVQNFIKGLQLSLLEHFYSQPLSVLCCNLPEAKRRINFLSNNQCENIRRLPSFRRYVEKQASEKQVALLTNERYLKEETQLLLENLHVYHMNYFLVLRCLHKFTSSLPKYPLGRQIRELYCTCLEKNIWDSEEYASVLQLLRMLAKDELMTILEKCFKVFKSYCENHLGSTAKRIEEFLAQFQSLDETKEEEDASGSQPKGLQKTDLYHLQKSLLEMKELRRSKKQTKFEVLRENVVNFIDCLVREYLLPPETQPLHEVVYFSAAHALREHLNAAPRIALHTALNNPYYYLKNEALKSEEGCIPNIAPDICIAYKLHLECSRLINLVDWSEAFATVVTAAEKMDANSATSEEMNEIIHARFIRAVSELELLGFIKPTKQKTDHVARLTWGGC

SEQ ID NO: 174199 - DNA, 2136 bp, Artificial Sequence
  derived and/or modified sequence
atggcgacatcttctatgagcaaaggttgcttcgtattcaagcctaacagtaagaagagaaaaatctcccttcctattgaggattattttaacaaaggaaaaaacgaacccgaggattctaaacttaggttcgagacgtaccagcttatttggcagcagatgaaatccgaaaatgaacggctgcaagaagagctgaacaaaaacttgttcgataacctcatcgagtttctgcagaaaagccattccgggtttcagaagaactcccgggaccttggaggtcagattaaattacgagagattcctactgcggctttagtactcggagtgaacgttacagaccatgatcttacgtttggttctcttaccgaagccctccagaataatgttacaccctacgtcgtgtccctgcaggctaaggactgtccagacatgaagcattttctgcagaagctcatatcccagctgatggattgctgcgtcgacattaaaagcaaagaggaagagagtgtgcacgttacgcagaggaagacacattattccatggacagtctttcaagttggtatatgacggtaacccagaaaaccgaccccaagatgttgtccaagaagcgtacaacatcaagccaatggcagtcaccccctgttgtagtcattttgaaagacatggagagcttcgccaccaaggttttacaggactttataatcatctcgtcccagcaccttcacgaattcccactgatattaatcttcgggatcgccaccagccccatcatcatccatcgcttgctgccccatgcagtttcctctctgctgtgcattgaactgttccaaagcctttcttgcaaggagcatctgacaactgtcctggataaactcttactgactacacagtttccctttaagatcaatgagaaggtcttacaggtgttgacaaatatttttctgtatcatgactttagcgtgcagaactttatcaaagggctccagttgtctctcctcgaacatttttacagccagcccctgtctgttttgtgctgtaatctcccagaagctaaacggcgtatcaacttcttatccaataaccagtgcgaaaacattcgaaggcttcccagcttccgcagatatgtagagaaacaggcctccgagaagcaggtggcattactgacgaatgagcggtacctgaaggaggagacacagttgctgttggaaaacctgcatgtttaccacatgaactactttctggtgctccgctgtctgcacaagtttacgtcaagccttcctaaatatcctcttggcaggcagatcagggaactgtattgtacctgtctagagaagaacatctgggatagcgaggagtatgcttcagtccttcagctgttacgaatgctcgccaaagatgaactgatgactattctcgaaaagtgtttcaaagtgttcaagtcatactgtgagaatcatctcggcagcacggctaaacgcatcgaagaatttctggctcagtttcagtctttggacgagaccaaggaggaggaggacgcttctgggtcacagccaaaaggcctgcaaaagactgatttatatcaccttcagaagtccttgttagagatgaaggagcttaggaggtcaaaaaagcagacaaagttcgaggtgctgcgtgagaacgtggtgaactttattgattgtcttgtccgagagtatttgttgccacctgagacccaacctctgcatgaggtcgtgtacttttccgccgcacatgccctccgggagcacctgaacgcggctcctcgcattgctttacataccgccttaaataacccttactactacctgaagaatgaagctctgaaatcagaagaggggtgtattcctaacattgcacccgacatttgtatcgcctacaagctgcacctggagtgtagccgcctgatcaatctggtggattggtctgaggcatttgcaacggtggtcactgcagccgagaagatggacgcaaactcagcgacctctgaggagatgaatgaaattattcatgcccgctttatcagagcggtatcagagcttgagcttttgggctttattaagcccaccaagcagaagaccgaccacgtggcacggctcacatggggcggttgctag

SEQ ID NO: 174200 - DNA, 2136 bp, Artificial Sequence
  derived and/or modified sequence
atggccaccagctccatgagcaagggctgctttgtgttcaagcccaacagcaagaagaggaagatcagcctgcccatcgaggactacttcaacaagggcaagaatgaacctgaggacagcaagctgcgctttgagacctaccagctgatctggcagcagatgaagtcagaaaatgaaaggctgcaggaggagctgaacaagaacctgtttgacaacctgattgagttcctgcagaagagccacagcggcttccagaagaacagccgggacctgggcggccagatcaagctgcgggagatccccacagctgccctggtgctgggcgtgaatgtgacagaccatgacctgaccttcggcagcctgacagaggccctgcagaacaacgtgaccccctacgtggtgtccctgcaggccaaggactgcccagacatgaagcacttcctgcagaagctgatcagccagctgatggactgctgcgtggacatcaagagcaaggaggaggagagcgtgcacgtgacccagaggaagacccactacagcatggacagcctgagctcctggtacatgacagtgacccagaagacagaccccaagatgctgagcaagaagaggaccaccagcagccagtggcagagcccccctgtggtggtgatcctgaaggacatggagagctttgccaccaaggtgctgcaggacttcatcatcatcagcagccagcacctgcacgagttccccctcatcctgatcttcggcatcgccaccagccccatcatcatccaccggctgctgccccatgctgtgagcagcctgctgtgcatcgagctgttccagagcctgagctgcaaggagcacctgaccaccgtgctggacaagctgctgctgaccacccagttccccttcaagatcaatgagaaggtgctgcaggtgctgaccaacatcttcctgtaccatgacttctctgtgcagaacttcatcaagggcctgcagctgagcctgctggagcacttctacagccagcccctgtctgtgctgtgctgcaacctgcctgaggccaagaggcgcatcaacttcctgagcaacaaccagtgtgagaacatccggcggctgcccagcttcagaagatatgtggagaagcaggccagcgagaagcaggtggccctgctgaccaatgaaagatacctgaaggaggagacccagctgctgctggagaacctgcacgtgtaccacatgaactacttcctggtgctgcgctgcctgcacaagttcaccagcagcctgcccaagtaccccctgggccggcagatccgggagctgtactgcacctgcctggagaagaacatctgggacagcgaggagtatgcctctgtgctgcagctgctgaggatgctggccaaggatgagctgatgaccatcctggagaagtgcttcaaggtgttcaagagctactgtgagaaccacctgggcagcacagccaagagaattgaggagttcctggcccagttccagagcctggatgagaccaaggaggaggaggatgccagcggcagccagcccaagggcctgcagaagacagacctgtaccacctgcagaagagcctgctggagatgaaggagctgcggcgcagcaagaagcagaccaagtttgaggtgctgagagaaaatgtggtgaacttcatcgactgcctggtgcgggagtacctgctgcccccagagacccagcccctgcacgaggtggtgtacttctctgctgcccacgccctgcgggagcacctgaatgctgcccccagaattgccctgcacacagccctgaacaacccctactactacctgaagaatgaggccctgaagtctgaggagggctgcatccccaacatcgccccagacatctgcatcgcctacaagctgcacctggagtgcagccgcctcatcaacctggtggactggagcgaggcctttgccaccgtggtgacagctgctgagaagatggatgccaacagcgccaccagcgaggagatgaatgagatcatccacgcccgcttcatccgggctgtgtctgagctggagctgctgggcttcatcaagcccaccaagcagaagacagaccacgtggcccggctgacctggggcggctgctag

SEQ ID NO: 174201 - DNA, 2136 bp, Artificial Sequence
  derived and/or modified sequence
atggccaccagcagcatgagcaagggctgcttcgtgttcaagcccaacagcaaaaagcgaaaaattagtctacccatcgaggattatttcaacaaagggaaaaacgagcctgaggacagcaagctccgttttgaaacttaccagctcatttggcagcagatgaaaagcgaaaacgagagacttcaggaagaactgaataaaaatttgttcgacaatctgattgagtttcttcaaaaatctcacagcggattccagaaaaacagtcgggatttgggaggccagattaaactgagggagattccaactgcagccttagtgttaggcgtcaacgtgaccgaccacgatctgacatttggctccctcaccgaggctctacagaacaacgtgaccccgtacgtagtgtcactgcaggcaaaggattgcccagacatgaaacacttcttgcagaaactgatttctcagctaatggattgctgtgtcgatataaagagcaaggaggaggaatccgtacatgtcacgcaaaggaagactcactacagtatggattccttgagctcctggtacatgacagtaacgcagaagactgacccgaaaatgctctcgaaaaaaagaacgaccagctcccagtggcaaagccctcctgtcgtcgtcatcctgaaagatatggagagcttcgccaccaaggtcttacaggattttatcattatctcctcccagcacttacatgagtttcctttgatcctgatattcggaatcgcaacgtctccaataattatccataggctccttccgcatgctgtcagcagcctcctttgcatcgaactgttccagtctctcagctgcaaggaacatctcactactgtacttgacaaactgctccttacaacacagttcccctttaaaatcaacgaaaaggttctgcaagtactgaccaacatcttcttatatcatgacttcagcgtgcagaactttatcaaggggttgcagttgtctctgctggaacacttctatagtcagcccctgagcgttttgtgctgtaaccttccagaagcaaagcggcgaatcaacttcctcagcaataaccagtgcgagaacataaggcgactcccttccttcaggagatatgtcgagaaacaagccagtgagaagcaagtcgctttgttaactaatgaacgctatctcaaggaggaaacgcagctgctcctggagaatttgcatgtgtaccatatgaattattttttggttctgagatgtcttcacaagtttacttcttccctccccaaatatcccctggggcggcagatacgggagctctattgcacctgtctcgaaaagaatatatgggattccgaagagtatgccagcgtcctgcagctgcttcgtatgctggccaaagacgaactcatgactatcctggaaaagtgcttcaaggtctttaagtcctactgtgaaaatcacctggggtccacagcaaagcgaattgaagagtttttggctcagtttcaatctctagatgagacgaaggaagaggaagacgcttccggtagccaacccaagggcctgcaaaagaccgatttgtatcatctgcagaagtccttactagagatgaaggagctcagacgctccaagaaacagacaaagtttgaagtccttagggaaaacgtcgttaattttattgactgtctggtgcgtgagtatttgctgccacccgaaacacagcccctgcatgaagtggtctacttcagcgccgcacatgccctgagagaacacctcaatgcagcgccaaggattgcgctgcataccgcacttaataatccctattactacctgaagaatgaagccctgaagagcgaggaggggtgtattccgaacatcgcacctgatatttgtatcgcatataagctccatctggagtgttctcgtctgatcaatctggtagactggtcagaagcgttcgctacagtggtaacagccgccgaaaagatggatgctaatagcgcaacctcagaagaaatgaacgagattattcacgcccggtttatcagggcagtgtccgagctagagctcctcggatttatcaaacctaccaaacagaagaccgaccacgtagctcgcttgacctggggggggtgctag

SEQ ID NO: 174202 - DNA, 2512 bp, Artificial Sequence
  derived and/or modified sequence
gcgcgggaaatcccgagtgcatctggaatacgcagagtcagtaagaccatggctacgtcctcgatgtctaagggttgctttgtttttaagccaaactccaaaaagagaaagatctctctgccaatagaggactattttaacaaagggaaaaatgagcctgaggacagtaagcttcgattcgaaacttatcagttgatatggcagcagatgaaatctgaaaatgagcgactacaagaggaattaaataaaaacttgtttgacaatctgattgaatttctgcaaaaatcacattctggattccagaagaattcaagagacttgggcggtcaaataaaactcagagaaattccaactgctgctcttgttcttggtgtgaatgtcacagatcatgatttgacattcggaagtctaacagaggcccttcagaataatgtcacaccatatgtagtctcattgcaagctaaagattgtccagatatgaaacattttttgcaaaagttgatctcacagttgatggactgctgtgtagatataaaatccaaagaggaggaaagtgttcacgtcacccaaagaaagacacattattcaatggattcactttccagttggtatatgactgtcacacagaagacggacccaaaaatgctaagcaaaaaaaggactacttctagccaatggcagtctcctcctgttgtcgttatcttgaaggatatggaaagctttgccacaaaagtactacaagacttcataattatcagcagtcaacatctccatgaatttccactaatactcatttttggaatagccacatctcctattatcatccaccgattgcttcctcatgcagtatcatctctattgtgcatagaactgttccaatctttgtcttgtaaggagcacctgactacggtactcgataagctacttcttacaactcagtttccctttaaaataaatgaaaaagtattacaggttctgaccaacatctttttgtatcatgatttctcagttcaaaactttataaaaggacttcagctttctctattagagcatttctattcccagcccttaagtgtcctgtgctgtaatcttccagaagccaaaagaagaataaattttttatcaaataatcaatgtgaaaacatccgacgtctaccatcttttaggaggtacgtggaaaagcaagcttcagaaaagcaagttgcgctcttgaccaatgagagatatttgaaggaggaaacacaattattactagaaaacctgcatgtttatcatatgaattacttcctggttttgagatgtcttcataagttcacctcttctcttcccaagtatccactaggtcgacagatcagagagttgtactgtacatgtttagaaaagaacatatgggattcagaggagtatgcatcagtcttgcagctgctgaggatgttggcaaaggatgaactgatgaccatacttgagaaatgtttcaaggtttttaagtcttattgtgaaaaccaccttggcagcacagctaagagaatagaggagttcctggcccagtttcagagcctcgatgaaaccaaagaggaagaagatgcttctgggtcacagccaaaggggcttcagaagacagacctctatcatcttcagaagtccttattggaaatgaaggagttaagaagaagtaagaagcaaaccaaatttgaagtactcagagaaaatgttgtgaacttcattgactgtctagtgagagaataccttctgcctcctgagacacagcctctccatgaggtggtgtacttcagtgctgcccatgcccttcgtgagcatttaaatgctgctccgcgaattgccctccatactgcactcaacaatccttactattatctcaagaatgaagcactgaaaagcgaagaaggctgcattccgaatatcgccccagacatctgcatagcatacaaactgcacctagagtgtagcaggctcatcaacctcgtggactggtcagaggcttttgcaacagttgtgacagctgctgaaaaaatggatgcaaattctgcaacctcagaagaaatgaatgaaattatccatgctcggtttattagagctgtttctgaactagaacttttaggatttataaaacctaccaaacagaagactgaccatgtggcaagactaacatggggaggctgctagaaagcaaataagcaaagccagaactatcacatttagcttaagagaaaaaggtgaccagtcatatttacatatattagaggagcctgttttgttgagaagataaatgtgtaacccccattgatgtttaaccagaaaagtacattgctaaccccaaacaggcatgtatcaaaacacctgtggagtactttagactccaacaaataataatgtaactaaaactgctcacacattttactgtactttccaaagtcattactaaattgtgagtaaatcattcttgaacttagagtatgtaaatgtaataaattccgttatccaggagtataaa

SEQ ID NO: 174203 - DNA, 2106 bp, Artificial Sequence
  derived and/or modified sequence
ctggaatacgcagagtcagtaagaccatggctacgtcctcgatgtctaagggttgctttgtttttaagccaaactccaaaaagagaaagatctctctgccaatagcgactacaagaggaattaaataaaaacttgtttgacaatctgattgaatttctgcaaaaatcacattctggattccagaagaattcaagagacttgggcggtcaaataaaactcagagaaattccaactgctgctcttgttcttggtgtgaatgtcacagatcatgatttgacattcggaagtctaacagaggcccttcagaataatgtcacaccatatgtagtctcattgcaagctaaagattgtccagatatgaaacattttttgcaaaagttgatctcacagttgatggactgctgtgtagatataaaatccaaagaggaggaaagtgttcacgtcacccaaagaaagacacattattcaatggattcactttccagttggtatatgactgtcacacagaagacggacccaaaaatgctaagcaaaaaaaggactacttctagccaatggcagtctcctcctgttgtcgttatcttgaaggatatggaaagctttgccacaaaagtactacaagacttcataattatcagcagtcaacatctccatgaatttccactaatactcatttttggaatagccacatctcctattatcatccaccgattgcttcctcatgcagtatcatctctattgtgcatagaactgttccaatctttgtcttgtaaggagcacctgactacggtactcgataagctacttcttacaactcagtttccctttaaaataaatgaaaaagtattacaggttctgaccaacatctttttgtatcatgatttctcagttcaaaactttataaaaggacttcagctttctctattagagcatttctattcccagcccttaagtgtcctgtgctgtaatcttccagaagccaaaagaagaataaattttttatcaaataatcaatgtgaaaacatccgacgtctaccatcttttaggaggtacgtggaaaagcaagcttcagaaaagcaagttgcgctcttgaccaatgagagatatttgaaggaggaaacacaattattactagaaaacctgcatgtttatcatatgaattacttcctggttttgagatgtcttcataagttcacctcttctcttcccaagtatccactaggtcgacagatcagagagttgtactgtacatgtttagaaaagaacatatgggattcagaggagtatgcatcagtcttgcagctgctgaggatgttggcaaaggatgaactgatgaccatacttgagaaatgtttcaaggtttttaagtcttattgtgaaaaccaccttggcagcacagctaagagaatagaggagttcctggcccagtttcagagcctcgatgaaaccaaagaggaagaagatgcttctgggtcacagccaaaggggcttcagaagacagacctctatcatcttcagaagtccttattggaaatgaaggagttaagaagaagtaagaagcaaaccaaatttgaagtactcagagaaaatgttgtgaacttcattgactgtctagtgagagaataccttctgcctcctgagacacagcctctccatgaggtggtgtacttcagtgctgcccatgcccttcgtgagcatttaaatgctgctccgcgaattgccctccatactgcactcaacaatccttactattatctcaagaatgaagcactgaaaagcgaagaaggctgcattccgaatatcgccccagacatctgcatagcatacaaactgcacctagagtgtagcaggctcatcaacctcgtggactggtcagaggcttttgcaacagttgtgacagctgctgaaaaaatggatgcaaattctgcaacctcagaagaaatgaatgaaattatccatgctcggtttattagagctgtttctgaactagaacttttaggatttataaaacctaccaaacagaagactgaccatgtggcaagactaacatggggaggctgctagaaagcaaataagcaaagccagaactatcacatttagcttaag

SEQ ID NO: 174204 - DNA, 2136 bp, Artificial Sequence
  derived and/or modified sequence
atggcgacgtccagtatgtctaaaggatgttttgtatttaaacccaatagcaagaagagaaaaatctcactgccaatcgaggactacttcaacaagggaaaaaatgagcccgaagatagcaagttaagattcgagacctaccagctcatatggcaacaaatgaagagcgaaaacgagcgcctgcaggaagagttgaataagaacctattcgataatctgatcgaattccttcagaaatcccattccggcttccaaaagaatagccgcgatctgggtggacagatcaaactaagagagatccctactgctgcgcttgtcttgggtgtaaacgtgactgaccatgacctcacgttcggcagcctgacagaggccctgcaaaacaacgtgacgccatatgtggtgagccttcaggccaaagactgccccgatatgaagcactttctgcagaaacttataagccaactgatggattgctgcgtagatatcaagtcaaaggaggaggaaagcgtccatgtgacccagcgcaagacacattacagcatggactccctctcttcatggtatatgaccgtgacacaaaaaacagaccccaagatgctgtccaagaagcgcactaccagcagccagtggcaaagtccacccgtggttgtcatcctcaaagacatggagtcgttcgcgaccaaggtcctgcaagattttatcatcatatcatcccaacacctccacgagtttccactcattctgattttcggaattgcaactagccctataataattcacaggctgctgcctcacgccgtgagctcgctgctgtgcatagaactctttcagtccctgtcctgtaaagagcacctcactacagttctggataagctactgcttaccactcagtttccatttaagatcaacgagaaagtcttacaggtcctgacgaatattttcttatatcacgatttctctgttcagaatttcattaaggggcttcaattatcactgctcgagcacttttattctcaaccgctctccgtactgtgttgtaatctgccagaggccaaacgtcgtatcaacttcctttcgaacaatcaatgtgagaacattcgccgtctgccaagctttaggagatacgtagaaaaacaagcatctgagaaacaggtagccctgctcacaaatgagagatacctgaaagaagaaacccagctcctgcttgaaaacctgcatgtgtaccacatgaattatttcctcgttttgcgttgcttacacaagtttacttccagtctgccaaagtaccctctaggcaggcagatacgcgagctttattgtacctgcctggagaagaatatctgggatagcgaggagtatgcctcagtgcttcagctgctccgcatgctcgcaaaggatgagctgatgacgatccttgagaaatgctttaaagtgtttaagtcttattgcgagaatcaccttggatccacggccaaacgcatagaagaattcctggctcagttccagtctcttgatgaaactaaagaggaagaagacgcttctggatcccagcccaagggactccaaaaaacagatctctaccatctccaaaaaagcctgcttgagatgaaggaattgagaagatccaaaaagcaaacaaaattcgaggtccttcgagagaatgtcgtcaactttatcgattgtctggtgcgcgaatatttattgcctcctgagacgcagcctttgcacgaggtggtgtacttcagcgcagcccatgccctccgggagcacctgaacgccgctcctagaattgcacttcacacagctctcaataatccctactactatttgaaaaatgaagcccttaaatcagaggaggggtgcataccaaacatcgccccagatatttgtatcgcgtataaactacacttggagtgtagtagactgatcaatcttgtcgattggtctgaggcttttgccactgtggtgaccgcagccgagaagatggatgcgaactcagccacttctgaagaaatgaatgaaataatccatgctcgctttatccgggcagtctcagaactcgaactgttggggtttatcaagcctacaaaacagaaaacggatcatgtcgcacgactcacatgggggggatgttag

SEQ ID NO: 174205 - DNA, 2136 bp, Artificial Sequence
  derived and/or modified sequence
atggccaccagcagcatgagcaagggctgcttcgtgttcaagcccaacagcaagaagagaaagatcagcctgcccatcgaggactacttcaacaagggcaagaacgagcccgaggacagcaagctgagattcgagacctaccagctgatctggcagcagatgaagagcgagaacgagagactgcaggaggagctgaacaagaacctgttcgacaacctgatcgagttcctgcagaagagccacagcggcttccagaagaacagcagagacctgggcggccagatcaagctgagagagatccccaccgccgccctggtgctgggcgtgaacgtgaccgaccacgacctgaccttcggcagcctgaccgaggccctgcagaacaacgtgaccccctacgtggtgagcctgcaggccaaggactgccccgacatgaagcacttcctgcagaagctgatcagccagctgatggactgctgcgtggacatcaagagcaaggaggaggagagcgtgcacgtgacccagagaaagacccactacagcatggacagcctgagcagctggtacatgaccgtgacccagaagaccgaccccaagatgctgagcaagaagagaaccaccagcagccagtggcagagcccccccgtggtggtgatcctgaaggacatggagagcttcgccaccaaggtgctgcaggacttcatcatcatcagcagccagcacctgcacgagttccccctgatcctgatcttcggcatcgccaccagccccatcatcatccacagactgctgccccacgccgtgagcagcctgctgtgcatcgagctgttccagagcctgagctgcaaggagcacctgaccaccgtgctggacaagctgctgctgaccacccagttccccttcaagatcaacgagaaggtgctgcaggtgctgaccaacatcttcctgtaccacgacttcagcgtgcagaacttcatcaagggcctgcagctgagcctgctggagcacttctacagccagcccctgagcgtgctgtgctgcaacctgcccgaggccaagagaagaatcaacttcctgagcaacaaccagtgcgagaacatcagaagactgcccagcttcagaagatacgtggagaagcaggccagcgagaagcaggtggccctgctgaccaacgagagatacctgaaggaggagacccagctgctgctggagaacctgcacgtgtaccacatgaactacttcctggtgctgagatgcctgcacaagttcaccagcagcctgcccaagtaccccctgggcagacagatcagagagctgtactgcacctgcctggagaagaacatctgggacagcgaggagtacgccagcgtgctgcagctgctgagaatgctggccaaggacgagctgatgaccatcctggagaagtgcttcaaggtgttcaagagctactgcgagaaccacctgggcagcaccgccaagagaatcgaggagttcctggcccagttccagagcctggacgagaccaaggaggaggaggacgccagcggcagccagcccaagggcctgcagaagaccgacctgtaccacctgcagaagagcctgctggagatgaaggagctgagaagaagcaagaagcagaccaagttcgaggtgctgagagagaacgtggtgaacttcatcgactgcctggtgagagagtacctgctgccccccgagacccagcccctgcacgaggtggtgtacttcagcgccgcccacgccctgagagagcacctgaacgccgcccccagaatcgccctgcacaccgccctgaacaacccctactactacctgaagaacgaggccctgaagagcgaggagggctgcatccccaacatcgcccccgacatctgcatcgcctacaagctgcacctggagtgcagcagactgatcaacctggtggactggagcgaggccttcgccaccgtggtgaccgccgccgagaagatggacgccaacagcgccaccagcgaggagatgaacgagatcatccacgccagattcatcagagccgtgagcgagctggagctgctgggcttcatcaagcccaccaagcagaagaccgaccacgtggccagactgacctggggcggctgctag

SEQ ID NO: 174206 - protein, 214 aa, Artificial Sequence
  derived and/or modified sequence
MSKPPPKPVKPGQVKVFRALYTFEPRTPDELYFEEGDIIYITDMSDTNWWKGTSKGRTGLIPSNYVAEQAESIDNPLHEAAKRGNLSWLRECLDNRVGVNGLDKAGSTALYWACHGGHKDIVEMLFTQPNIELNQQNKLGDTALHAAAWKGYADIVQLLLAKGARTDLRNIEKKLAFDMATNAACASLLKKKQGTDAVRTLSNAEDYLDDEDSD

SEQ ID NO: 174207 - DNA, 645 bp, Artificial Sequence
  derived and/or modified sequence
atgtcaaaacctccaccgaaaccagtcaaaccaggccaagtcaaggtgtttagagccctgtacaccttcgagccacgaaccccagatgagctgtatttcgaagaaggcgatatcatttacattactgatatgagcgacaccaactggtggaagggcactagcaaggggagaacaggcctgattccaagtaattacgtggccgaacaggccgagagtatagataatccactgcatgaggctgctaaacgagggaatctgtcctggctgagagagtgtttggataatcgagtcggtgtcaatggcctagacaaggctggaagtacagctctgtattgggcttgtcatggcggccacaaagatattgtcgaaatgctgtttactcagccaaacattgagttgaaccaacagaataagctgggggataccgccttgcatgcggcggcatggaagggatatgctgacatagtacagctcctgctggccaagggggcgagaacagatctccggaatattgaaaagaagctcgccttcgacatggctacaaacgccgcttgtgcgtccttactgaagaagaaacagggaactgacgccgtcaggacactgtcaaacgccgaagactatctggacgatgaggacagtgattag

SEQ ID NO: 174208 - DNA, 645 bp, Artificial Sequence
  derived and/or modified sequence
atgagcaagcccccacccaagcctgtgaagccaggccaggtgaaggtgttccgggccctgtacacctttgagcccaggaccccagatgagctgtactttgaggagggggacatcatctacatcacagacatgtctgacaccaactggtggaagggcaccagcaaaggaagaacaggcctcatccccagcaactacgtggccgagcaggccgagagcattgacaaccccctgcacgaggccgccaagaggggcaacctgtcctggctgagagaatgtctggacaacagagtgggcgtgaatggcctggacaaggccggcagcacagccctgtactgggcctgccacggcggccacaaggacatcgtggagatgctgttcacccagcccaacatcgagctgaaccagcagaacaagctgggggacacagccctgcacgccgccgcctggaagggctatgctgacatcgtgcagctgctgctggccaagggggccaggacagacctgagaaatattgagaagaagctggcctttgacatggccaccaatgctgcctgtgccagcctgctgaagaagaagcagggcacagatgctgtgaggaccctgagcaatgctgaggactacctggatgatgaagattctgactag

SEQ ID NO: 174209 - DNA, 645 bp, Artificial Sequence
  derived and/or modified sequence
atgagcaagcccccccccaagcccgtgaagcccggccaggtgaaggtgttccgggccctgtatacatttgagccaagaacacccgacgaactttactttgaagaaggagatatcatatacataactgacatgtccgacacaaattggtggaaaggcacatcaaagggtaggaccggtttgattccttctaattatgtggctgagcaggccgaaagcatcgataacccactgcacgaggcggccaagagggggaatctctcttggcttagggaatgcctcgataacagagtaggggtcaatggacttgataaggcaggatcaactgccctctactgggcctgccacggagggcacaaggatattgtggaaatgttattcactcagccaaacatcgagttgaaccaacagaacaagctgggagacactgctttgcacgcggccgcttggaagggctatgctgatattgtgcaactcctgctcgctaagggcgctagaaccgatctgcggaatattgagaagaaactggcctttgatatggccaccaatgccgcttgcgcgtcgctgctgaaaaagaaacaaggaacagacgctgtgcggacattaagtaatgctgaagactacctggacgacgaggacagcgactag

SEQ ID NO: 174210 - DNA, 1319 bp, Artificial Sequence
  derived and/or modified sequence
ctcttcccgcagccaagggtgggcgccggtcctaggaggcgcacggttgtaagccagacaaaaagaactggggtgcccggagtgccaggtggcgggcaagcggtgggcttttcggcggggtctttaggatttgcagctccaggaagcgagatgtcgaagccgccacccaaaccagtcaaaccagggcaagttaaagtcttcagagccctgtatacgtttgaacccagaactccagatgaattatactttgaggaaggtgatattatctacattactgacatgagcgataccaattggtggaaaggcacctccaaaggcaggactggactaattccaagcaactatgtggctgagcaggcagaatccattgacaatccattgcatgaagcagcaaaaagaggcaacttgagctggttgagagagtgtttggacaacagagtgggtgttaatggcttagacaaagctggaagcactgccttatactgggcttgccacgggggccacaaagatatagtggaaatgctatttactcaaccaaatattgaactgaaccagcagaacaagttgggagatacagctttgcatgctgctgcctggaagggttatgcagatatcgtccagttgcttctggcaaaaggtgctagaacagacttaagaaacattgagaagaagctggccttcgacatggctaccaatgctgcctgtgcatctctcctgaaaaagaaacagggaacagatgcagttcgaacattaagcaatgccgaggactatctcgatgatgaagactcagattaattcctttctggagctttgagatctaaaacttctgttgcttttgccattccaaaactttgtctttgccagaaaagtgttggtaactataaagaaaattatatatgaacacggcagtgttgcactgtgtttgagtagaacgtgtaaatgaattgttcccacctttggtttgccagtaagtgactggattcttggcacatttatgttcaccaaagtagaacaagaagatattatttctatttatcaagcaaaaggaattttaagatttttttttttctttaaaaacaaattaggattttttttttttttttttttttagttaaaatgctttacctcaatggttgagatattttgaatggatttttcaagggggggaaatgcttattataataataaaccaaaatacttaacagaaaattgtcagctattctgacaaaaataaacattttgagagactttatttcttttgtccgtttctgtggtatcactcattgtcgttaagtaagtaaagctttttatatttaggt

SEQ ID NO: 174211 - DNA, 645 bp, Artificial Sequence
  derived and/or modified sequence
atgagtaagcctcctcccaagccagtaaagccaggccaagttaaggtgtttcgggctttgtataccttcgagccgcgaactcccgacgagctgtacttcgaagaaggcgacattatatacatcacagacatgagcgacactaactggtggaaaggcaccagcaaaggtagaaccgggctaatcccttctaactacgtagctgaacaagctgaaagtatcgacaatcctctccatgaagccgcaaagcgaggtaacctgtcatggttacgagagtgccttgacaatagagtaggggttaatgggttagataaggccggtagcaccgccctgtattgggcttgtcacggaggtcataaagatatagtggaaatgctgttcactcagccaaacattgaacttaatcagcaaaacaaactcggagacaccgccttacatgctgccgcatggaagggatacgctgatatcgtccagctcttgctcgctaagggggcaaggacggaccttcgtaatattgagaagaaacttgctttcgatatggctactaatgctgcatgtgcaagcttactcaagaagaagcagggcaccgatgctgtcagaacgctgagtaacgctgaggactacctggacgacgaggactccgactag

SEQ ID NO: 174212 - DNA, 645 bp, Artificial Sequence
  derived and/or modified sequence
atgagcaagcccccccccaagcccgtgaagcccggccaggtgaaggtgttcagagccctgtacaccttcgagcccagaacccccgacgagctgtacttcgaggagggcgacatcatctacatcaccgacatgagcgacaccaactggtggaagggcaccagcaagggcagaaccggcctgatccccagcaactacgtggccgagcaggccgagagcatcgacaaccccctgcacgaggccgccaagagaggcaacctgagctggctgagagagtgcctggacaacagagtgggcgtgaacggcctggacaaggccggcagcaccgccctgtactgggcctgccacggcggccacaaggacatcgtggagatgctgttcacccagcccaacatcgagctgaaccagcagaacaagctgggcgacaccgccctgcacgccgccgcctggaagggctacgccgacatcgtgcagctgctgctggccaagggcgccagaaccgacctgagaaacatcgagaagaagctggccttcgacatggccaccaacgccgcctgcgccagcctgctgaagaagaagcagggcaccgacgccgtgagaaccctgagcaacgccgaggactacctggacgacgaggacagcgactag

SEQ ID NO: 174213 - protein, 82 aa, Artificial Sequence
  derived and/or modified sequence
MATFPPATSAPQQPPGPEDEDSSLDESDLYSLAHSYLGGGGRKGRTKREAAANTNRPSPGGHERKLVTKLQNSERKKRGARR

SEQ ID NO: 174214 - DNA, 249 bp, Artificial Sequence
  derived and/or modified sequence
atggcgactttcccacctgccaccagtgcccctcagcagccacccggtcccgaagacgaagacagtagtcttgacgaatctgacctctactccctggctcacagttatcttggaggcggggggaggaaaggcagaacaaagagagaagcagccgctaatactaaccggcccagtccgggcggacatgagcgcaaactcgtgactaaactccagaattccgagaggaagaaacgaggcgcacgcagatag

SEQ ID NO: 174215 - DNA, 873 bp, Artificial Sequence
  derived and/or modified sequence
gactcagggaccgactcttcccgtctcatgactgtgtttactgggctggattttgggaaggggccagattgcatcagacagggcctgatgggctggagccagactgtggtctgaggaggagacacagccttataagctgagggagtggagaggcccggggccaggaaagcagagacagacaaagcgttaggagaagaagagaggcagggaagacaagccaggcacgatggccaccttcccaccagcaaccagcgccccccagcagcccccaggcccggaggacgaggactccagcctggatgaatctgacctctatagcctggcccattcctacctcggaggtggaggccggaaaggtcgcaccaagagagaagctgctgccaacaccaaccgccccagccctggcgggcacgagaggaaactggtgaccaagctgcagaattcagagaggaagaagcgaggggcacggcgctgagacagagctggagatgaggccagaccatggacactacacccagcaatagagacgggactgcggaggaaggaggacccaggacaggatccaggccggcttgccacaccccccacccctaggacttattcccgctgactgagtctctgaggggctaccaggaaagcgcctccaaccctagcaaaagtgcaagatggggagtgagaggctgggaatggaggggcagagccaggaagatcccccagaaaagaaagctacagaagaaactggggctcctccagggtggcagcaacaataaatagacacgcacggcagccacagcttgggtgtgtgttcatccttgttctttgtgtgtttttgttcgggcatgtgtgtgcttgcctgtgcctgcacattcatga

SEQ ID NO: 174216 - DNA, 249 bp, Artificial Sequence
  derived and/or modified sequence
atggccaccttccccccagccaccagcgccccccagcagcccccaggcccagaagatgaggacagcagcctggatgaaagtgacctgtacagcctggcccacagctacctgggcggcggcggcaggaaaggaagaaccaagcgggaggccgccgccaacaccaaccggcccagccctgggggccacgagaggaagctggtgaccaagctgcagaacagcgagaggaagaagagaggagcccggaggtag

SEQ ID NO: 174217 - DNA, 249 bp, Artificial Sequence
  derived and/or modified sequence
atggccaccttcccccccgccaccagcgccccccagcagccccccggaccggaggatgaggacagttcactagacgagtcagatttatactccctcgctcacagttacctcgggggtggagggagaaaggggagaacgaagagggaggccgccgccaacactaatcgcccctctcctggtggccatgaacgcaagctggtaacgaagctgcagaattctgaaagaaagaagcgaggggctagaagatag

SEQ ID NO: 174218 - DNA, 249 bp, Artificial Sequence
  derived and/or modified sequence
atggccacttttccccctgcaacaagcgcccctcagcaaccgccagggcctgaggatgaggactcctcgttggatgaatccgacctgtattccctcgcacacagttacctcggcggaggcggacgaaaaggaagaacaaaacgcgaggcagccgcaaataccaacaggccctctccaggcggacatgagagaaagttagtaacaaagcttcagaacagcgaacggaagaaacgcggagcccgaaggtag

SEQ ID NO: 174219 - DNA, 249 bp, Artificial Sequence
  derived and/or modified sequence
atggccaccttcccccccgccaccagcgccccccagcagccccccggccccgaggacgaggacagcagcctggacgagagcgacctgtacagcctggcccacagctacctgggcggcggcggcagaaagggcagaaccaagagagaggccgccgccaacaccaacagacccagccccggcggccacgagagaaagctggtgaccaagctgcagaacagcgagagaaagaagagaggcgccagaagatag

SEQ ID NO: 174220 - protein, 172 aa, Artificial Sequence
  derived and/or modified sequence
MSVPGPSSPDGALTRPPYCLEAGEPTPGLSDTSPDEGLIEDLTIEDKAVEQLAEGLLSHYLPDLQRSKQALQELTQNQVVLLDTLEQEISKFKECHSMLDINALFAEAKHYHAKLVNIRKEMLMLHEKTSKLKKRALKLQQKRQKEELEREQQREKEFEREKQLTARPAKRM

SEQ ID NO: 174221 - DNA, 519 bp, Artificial Sequence
  derived and/or modified sequence
atgagcgtgcccggtccttcaagcccggatggagccctcacccgtccaccatattgcctcgaggccggcgaacccaccccagggctgagtgacaccagcccagatgaggggctgattgaagacctgacgatcgaggacaaggcagtagagcagctcgccgaggggctcctctctcattatctaccagatctgcagcgcagcaagcaggccctgcaggagcttacgcagaaccaggtggtgctgctagataccttggagcaggagatcagcaagttcaaagagtgccactcgatgctggatatcaatgccttgttcgcagaggctaaacattatcatgccaagcttgtcaatatccgcaaagagatgctcatgctccatgagaaaacatcaaaactaaaaaaacgggcattaaaactccaacagaagaggcagaaagaagagttggagcgcgaacagcagagggagaaagagttcgagagggaaaaacaactgactgctcgccccgccaagaggatgtag

SEQ ID NO: 174222 - DNA, 519 bp, Artificial Sequence
  derived and/or modified sequence
atgtctgtgcccggccccagcagcccagatggagccctgacccggcccccctactgcctggaggccggggagcccaccccaggcctgagtgacaccagcccagatgagggcctgattgaggacctgaccatcgaggacaaggctgtggagcagctggccgagggcctgctgagccactacctgcctgacctgcagaggagcaagcaggccctgcaggagctgacccagaaccaggtggtgctgctggacaccctggagcaggagatcagcaagttcaaggagtgccacagcatgctggacatcaatgccctgtttgctgaggccaagcactaccacgccaagctggtgaacatcaggaaggagatgctgatgctgcacgagaagaccagcaagctgaagaagagggccctgaagctgcagcagaagaggcagaaggaggagctggagcgggagcagcagcgggagaaggagtttgagcgggagaagcagctgacagcccggcctgccaagaggatgtag

SEQ ID NO: 174223 - DNA, 519 bp, Artificial Sequence
  derived and/or modified sequence
atgagcgtgcccggccccagcagccccgacggcgccctgacccggcccccctattgccttgaggctggggagcccacccctggcttgtctgacacctctcccgacgaaggccttattgaagaccttaccattgaggacaaggctgtcgagcaattagccgaaggactgctatcacactatctcccagacctgcagagaagcaagcaggccttacaggagctcacccagaatcaagtcgtgcttttagataccctggagcaggagatatctaaatttaaagagtgtcactccatgctcgacattaacgcactcttcgccgaagctaaacactatcacgcaaagctcgtgaacatacgcaaggaaatgctgatgctgcacgagaagactagcaaactgaagaaaagagccttaaaacttcagcagaagaggcaaaaggaggaactcgaaagagaacagcagcgggagaaggaattcgagcgagagaagcaactcaccgccaggcctgcaaagcgaatgtag

SEQ ID NO: 174224 - DNA, 3941 bp, Artificial Sequence
  derived and/or modified sequence
acactgcgtccggggccagacgacgatatcagcgcggggtccccacaacgccatggggcagagccaactctcgagcgcgtgatcgaagcccgcagttttttcgcccccgtcacttccgggtgcgacaatctcttctgtccggccagccgctggagtcgttaggtgccgccttgcttctgacgagccacacgtttgcttcttccctgtgttcccagctggagggacatgagtgtccctgggccgtcgtctccggacggggccctgacacggccaccctactgcctggaggccggggagccgacgcctggtttaagtgacacttctccagatgaagggttaatagaggacttgactatagaagacaaagcagtggagcaactggcagaaggattgctttctcattatttgccagatctgcagagatcaaaacaagccctccaggaactcacacagaaccaagttgtattgttagacacactggaacaagagatttcaaaatttaaagaatgtcattctatgttggatattaatgctttgtttgctgaggctaaacactatcatgccaagttggtgaatataagaaaagagatgctgatgcttcatgaaaaaacatcaaagttaaaaaaaagagcacttaaactgcagcagaagaggcaaaaagaagagttggaaagggagcagcaacgagagaaggagtttgaaagagaaaagcagttaactgccagaccagccaaaaggatgtgaaaagttgtgtttgtgtgttttcttctcctgtcccatatttgggttatgatgactcaagtgtagactgaagttgaggtagtgccttatgccattatgtcatatgttgaaatccttattccggtattactgtgtctccatgccttttttccaagtagcagacgtcatgttgcatggtttttgatatttatatgtaagtttttcaaattttgcttaattttaaaatttattattttgatcttgaattatttataaactggaaagtggtttgattattgtgagtcaaaactctaagtggttaaaaattagtatgaattttttagcttcttaatgaatatggatttaaaactctccagttcttattttatgaaatgacttgcctttctggtaatacaatgctgattttttagtaattgccttttcattactttgttaagaagaaatgccagctgtttaatcacacctacccctggaaaagaggtaaaccttttgaacagttgaatttcatcagaagctctatagctttttggtgagaggaagtgatactctttattacaagaaacaaggaattaacaaaaataaggaacttgttgctacctttcttttctgttgaacattaaaaataatttggtttgtggactgggcatggtggcttatggaaaagaggtgagcctttgtgaagaacataatggaaaagtgcatgtacgggaaataacagcactttaggtgtagttcaggtgagcaagatgccagatagtttctactaaccatatactctttctgcttcttagcgtcgttgtcactgcttctgtggcttttgggttcaaagtagattatatatattcctaaagcttggtggaggtagtggagctatcacacactcaaatgagcttgtatatttataatacaatatagtattatagtaacagttatcatacactgagatatagtttctgtgcttgtaaaaaattcttgaagtgaggccgggtgcggtggctcatgcctgtaatcccaacgctttgggacgccgaggcgggtggatcatgaggtcaaaagattgagaccatcctggccaacatggtgaaaccccgtctctactagaaatacaaaaattagctgggtgtgggggcgtgcgcctgtagtcccagctacttgggaggctgaggcaggagaattgcttgaacccaggaggcagaggttgcagtaagccaagatcgtgccactgcactccagccttggtgacagagcaagactccgtctccaaaaaaaagaaaaaaaaatttcttgaagtggaatgatgtacaccaaatacccactttatagataattacagggatggtgaaaaattagtaaatagcttcacaaaagaggcagcgtgatacctttagtgttttctagaatttttttctggatattatatgtaagaatttattgtttgagggaaatacgaggtttcattgtttaaaatcaagagtgtattgtttactgttttacagtattatttaatatccaactggtctccaatctccattacatagggactgtacagagcctgtgaagatgtatgaatggtatcttttataatccacaatacatttctggtaagatggaatcactacctctgatcacatatcaggctaacgatagagaaagcattaggtttaagttgagggctaagaactggtttgtttaaaggtttaaattgttggaaaagagcatttgccttctttaatgaatgatggtctcacaattcagttgactttgacctaatatttaagaatataaatatattttatttgaaaggctgagtgttgccctcaaacacttgctaaaactgcctagggcaggattcattagggcttgcagacaatgtcacctaaattgctgaatgtactcattataatatgatatctgacaaaggtagtacagcgtttctgagtcatttgggaccaactgcagtggttgtttaaaatgctggttcctgcacacaattctctatctactgaagcacatctgttttctttgtttgttttgctttgctttttgtttttaaagtttcccccagtgattccagtgcacctgaaaagttgagaaccacaggcttagtggtacgttggggtttcccacgctaggctgcatagcattataacctgggaacgttaaaaaaaatacagacattcttgattcttagtgtagttatgatgtggatcctacgtattttttaaaaaactctccagataattttgatgtcacgagtcactagtatagactatctatctagtgagttgtattataagcgatgaaatactttaaaagctacccagtaactcttgggattaattttatgaaataaattctgagctgctgcttttgatatagtcagacttaagactgaaccccagtagacaggcaatagatatagaattctggttagctaattgaacttttgtgacctgtttaaaaacaaatcaaatttattgaacaaatgacaaggcacaaatactttcagaattgtatttcagttttgaagatttaaaaaaaatgtgaaaataaatatatattagtatcctttattttaaagtcaattgtaaaccagaagtactgttattttggtgattaaaatccaaaactttagctgtatttcagtaacaaaaacataccttactagactgtgatggctcacacctgtaatcccagtgctttgggaggctgaggtgggaagattctttgagcccaggagttcaaggctgcagtgaattctgatcgcaccactgaactccagcccgtatgacagagtgagaccctgtttctaaaaacaaaacaaacaaacaaacaaacaacgtatcttactgactaaactggaatggaaatcttataattagtgttgtatttttctgcaaaatagtgaattggtacttgggagacttctgttctttgttgaaaaaaattgcctttgttttgaaattatatcacctgtgttctgaactaaaatgatgggagttcattttgtatttactttgcagtaagtatcatgtaaatatgcaaatgttgaatgtaatatagattgtgtcctcattgagtttttgggtgatacagtttataaatataacaattatacaccctcatacattcgtctgattttgagcttgtaagatgagaactgctttttacacatttaataaaaaaaggtctctgaatta

SEQ ID NO: 174225 - DNA, 519 bp, Artificial Sequence
  derived and/or modified sequence
atgtcagtacctggaccctccagccctgacggggctttgactcgtcctccttattgtcttgaggccggagaacccacaccagggctgtccgacacatctcccgatgagggcctaatcgaggatctcaccattgaggacaaagcagttgaacagctggccgaaggcttgctgtcgcactacttacctgacttacagagatcaaaacaggctcttcaagaactgacacagaatcaggtggtgttgctcgacaccctggaacaagagataagcaaattcaaagagtgccactctatgcttgatatcaacgccttattcgcagaagccaaacactatcacgccaaactggtgaacatccgaaaggagatgcttatgctccatgaaaagacctccaaattgaaaaagagggccctaaaactgcagcagaaacggcaaaaagaagaactcgagcgcgagcagcagcgggaaaaggaattcgagagggaaaagcaactgacagccaggcctgcaaagcgaatgtag

SEQ ID NO: 174226 - DNA, 519 bp, Artificial Sequence
  derived and/or modified sequence
atgagcgtgcccggccccagcagccccgacggcgccctgaccagacccccctactgcctggaggccggcgagcccacccccggcctgagcgacaccagccccgacgagggcctgatcgaggacctgaccatcgaggacaaggccgtggagcagctggccgagggcctgctgagccactacctgcccgacctgcagagaagcaagcaggccctgcaggagctgacccagaaccaggtggtgctgctggacaccctggagcaggagatcagcaagttcaaggagtgccacagcatgctggacatcaacgccctgttcgccgaggccaagcactaccacgccaagctggtgaacatcagaaaggagatgctgatgctgcacgagaagaccagcaagctgaagaagagagccctgaagctgcagcagaagagacagaaggaggagctggagagagagcagcagagagagaaggagttcgagagagagaagcagctgaccgccagacccgccaagagaatgtag

SEQ ID NO: 174227 - DNA, 1008 bp, Artificial Sequence
  derived and/or modified sequence
atgggtagtgcgagccctggactttcgagtgtgtctccctctcacctgctgttgcccccagacacagtcagtcgtacgggactcgagaaagctgcagccggggctgtcggcctcgaacgcagagactggtcgccgtccccccccgccacacctgaacagggtctaagcgctttctatctctcatacttcgacatgttgtacccggaggatagcagctgggccgcaaaagcccccggcgcctctagccgggaggaacccccagaggagcccgagcaatgtccagtgattgactcccaggccccagccggtagcctcgatttggtgcccggcggccttacactcgaggagcacagtctggagcaggtccagtctatggtagtaggtgaagtacttaaagatattgagaccgcctgtaaactgcttaacatcacagccgaccctatggattggagtcccagcaatgtgcagaagtggcttctctggacagagcaccaatataggctgcccccaatgggtaaagcctttcaagaactcgcaggcaaagagctctgcgccatgagcgaggagcagttcagacagcgttcacctctggggggggacgttctgcacgcccacttggacatttggaaatccgctgcctggatgaaagagaggacgtctcctggtgccatccactattgtgcatctactagcgaggaatcgtggaccgactcagaagtcgatagtagctgcagcggacagcccatccatctgtggcagtttctgaaagagctgcttctgaagccacacagctatggcagattcatccggtggcttaataaggagaaggggatatttaaaatagaggacagcgcacaggtcgctcgtctgtggggcattcggaagaacagacccgcaatgaactacgacaaactgagtcggtctattagacagtactacaaaaaagggatcattaggaagccggatatttcccaaaggctggtgtaccagtttgtccaccccatctag

SEQ ID NO: 174228 - DNA, 1008 bp, Artificial Sequence
  derived and/or modified sequence
atgggcagcgccagccctggcctgagctctgtgagccccagccacctgctgctgcccccagacacagtgtccaggacaggcctggagaaggctgctgctggagctgtgggcctggagcggcgggactggagccccagccccccagccaccccagagcagggcctgagcgccttctacctgagctactttgacatgctgtacccagaggacagctcctgggccgccaaggcccctggggccagcagccgggaggagcccccagaggagcctgagcagtgccctgtgattgacagccaggccccagctggcagcctggacctggtgcctgggggcctgaccctggaggagcacagcctggagcaggtgcagagcatggtggtgggggaggtgctgaaggacatcgagacagcctgcaagctgctgaacatcacagctgaccccatggactggagccccagcaatgtgcagaagtggctgctgtggacagagcaccagtaccgcctgccccccatgggcaaggccttccaggagctggccggcaaggagctgtgtgccatgtctgaggagcagttccggcagaggagccccctgggcggagatgtgctgcacgcccacctggacatctggaagtctgctgcctggatgaaggagaggaccagccctggggccatccactactgtgccagcaccagcgaggagagctggacagacagcgaggtggacagcagctgcagcggccagcccatccacctgtggcagttcctgaaggagctgctgctgaagccccacagctatggccgcttcatccgctggctgaacaaggagaagggcatcttcaagattgaggacagcgcccaggtggcccggctgtggggcatcaggaagaacagacctgccatgaactatgacaagctgagccgcagcatccggcagtactacaagaagggcatcatcaggaagccagacatcagccagaggctggtgtaccagtttgtgcaccccatctag

SEQ ID NO: 174229 - DNA, 1008 bp, Artificial Sequence
  derived and/or modified sequence
atgggcagcgccagccccggcctgagcagcgtgagccccagccacctcttgctgcctccagacaccgtgtcacgtacaggtttggaaaaagctgctgccggagcagtcggtctcgagaggagggattggagccccagtcctcccgccacgccggagcagggactgagcgctttctaccttagctattttgatatgttatatccggaagatagctcctgggcagcaaaggctccgggcgccagcagtcgggaggaaccgccagaggagccagaacagtgtcctgtcatagacagtcaggcccccgcagggtcccttgacctggtgcctggcggtcttaccctcgaggagcatagcctcgagcaggtccagtcgatggtggtcggggaggttctaaaagacattgaaactgcgtgtaagcttctgaacatcaccgcagatcccatggactggtctccttcaaacgtgcaaaagtggctcttatggaccgagcatcaatatagacttcctccgatggggaaagcctttcaagaactggccggaaaagaactgtgcgctatgtctgaagagcaatttcggcagcggtcacccctaggcggcgacgtgttgcacgcccaccttgacatatggaagtctgcagcctggatgaaagaaaggacgagcccaggcgccatccattactgcgcatccacttcagaggagtcctggaccgattctgaagtggactcctcttgctccgggcagcctattcacttatggcagttcctgaaggaactcctgctgaagccgcattcctacggcaggttcattaggtggcttaacaaggaaaagggcatcttcaaaatcgaggatagcgcacaggtcgcccgactctggggaattcgtaaaaacaggcctgctatgaactatgacaaactgtcacgatctatcaggcagtactataagaagggaatcataaggaaacctgacatttcgcagcggctggtgtaccaattcgttcacccaatctag

SEQ ID NO: 174230 - DNA, 1008 bp, Artificial Sequence
  derived and/or modified sequence
atgggctcagccagtcctggattatcctcagtgagtccttcccacttactgctcccaccagatacggtgagcaggactggcttggagaaggccgcagcgggagcagtgggcctggagcggagggactggagcccatcacccccagcaacacccgagcagggtcttagcgccttctatctttcgtacttcgacatgctttatcccgaagacagctcttgggccgcaaaggccccaggtgcaagcagccgcgaggagccgccagaggaacctgagcagtgcccagtgatcgacagtcaggctcccgcaggctcactggatctggtgcctggaggtctcacactcgaggaacattcactcgagcaggttcagtccatggttgtgggtgaagtcctcaaagacatagagaccgcatgcaaactactaaatattactgccgaccccatggactggagtccatcaaatgtgcagaaatggctcctatggacagagcatcaatacagactgcctcctatgggaaaagcattccaggagttagcaggaaaagagctctgtgctatgagtgaagaacagtttagacagcgaagtcccctgggcggagatgtgcttcacgcccacctggacatttggaaatccgcggcatggatgaaagagagaacatctcccggtgccattcattattgcgctagtacttcggaagagtcatggactgattccgaagtagattcctcatgtagcgggcagcccatccacctgtggcagttcttgaaggaattgctgcttaaaccacacagctatgggcgatttattagatggctaaataaggagaagggcatattcaagatcgaagacagcgcacaagtggccaggctctggggaattaggaagaatcgacccgctatgaattacgataaattgagccgctcaatccggcagtactacaaaaaaggaatcattaggaaacctgacattagccaacggttggtgtaccagttcgtgcacccaatctag

SEQ ID NO: 174231 - DNA, 1008 bp, Artificial Sequence
  derived and/or modified sequence
atgggcagcgccagccccggcctgagcagcgtgagccccagccacctgctgctgccccccgacaccgtgagcagaaccggcctggagaaggccgccgccggcgccgtgggcctggagagaagagactggagccccagcccccccgccacccccgagcagggcctgagcgccttctacctgagctacttcgacatgctgtaccccgaggacagcagctgggccgccaaggcccccggcgccagcagcagagaggagccccccgaggagcccgagcagtgccccgtgatcgacagccaggcccccgccggcagcctggacctggtgcccggcggcctgaccctggaggagcacagcctggagcaggtgcagagcatggtggtgggcgaggtgctgaaggacatcgagaccgcctgcaagctgctgaacatcaccgccgaccccatggactggagccccagcaacgtgcagaagtggctgctgtggaccgagcaccagtacagactgccccccatgggcaaggccttccaggagctggccggcaaggagctgtgcgccatgagcgaggagcagttcagacagagaagccccctgggcggcgacgtgctgcacgcccacctggacatctggaagagcgccgcctggatgaaggagagaaccagccccggcgccatccactactgcgccagcaccagcgaggagagctggaccgacagcgaggtggacagcagctgcagcggccagcccatccacctgtggcagttcctgaaggagctgctgctgaagccccacagctacggcagattcatcagatggctgaacaaggagaagggcatcttcaagatcgaggacagcgcccaggtggccagactgtggggcatcagaaagaacagacccgccatgaactacgacaagctgagcagaagcatcagacagtactacaagaagggcatcatcagaaagcccgacatcagccagagactggtgtaccagttcgtgcaccccatctag

SEQ ID NO: 174232 - protein, 451 aa, Artificial Sequence
  derived and/or modified sequence
MHGYFGCNAAAEPGYSAFVGTPQICVTKMSTRNCQGMDSVIKPLDTIPEDKKVRVQRTQSTFDPFEKPANQVKRVHSENNACINFKTSSTGKESPKVRRHSSPSSPTSPKFGKADSYEKLEKLGEGSYATVYKGKSKVNGKLVALKVIRLQEEEGTPFTAIREASLLKGLKHANIVLLHDIIHTKETLTLVFEYVHTDLCQYMDKHPGGLHPDNVKLFLFQLLRGLSYIHQRYILHRDLKPQNLLISDTGELKLADFGLARAKSVPSHTYSNEVVTLWYRPPDVLLGSTEYSTCLDMWGVGCIFVEMIQGVAAFPGMKDIQDQLERIFLVLGTPNEDTWPGVHSLPHFKPERFTLYSSKNLRQAWNKLSYVNHAEDLASKLLQCSPKNRLSAQAALSHEYFSDLPPRLWELTDMSSIFTVPNVRLQPEAGESMRAFGKNNSYGKSLSNSKH

SEQ ID NO: 174233 - DNA, 4953 bp, Artificial Sequence
  derived and/or modified sequence
gcatccccttgattaaatgtttttcctcctatgcaatcaccattagctgtttggctcccattctgtattcttctgaagcagccctgcattgcaaatcaatatctttctgaaaagacagtgtgttgtgaattgccttgacagcatatgcacggttactttggctgcaatgctgctgcagagcccggttactctgccttcgtgggaactccacagatatgtgtcacaaagatgtctacacggaactgccagggaatggactcagtgatcaaacccctggacacaattcctgaggataaaaaagtcagagttcagaggacacagagcacttttgacccatttgagaaaccagctaatcaagtaaagagggtgcattctgagaacaatgcttgcattaactttaagacctcctccactggcaaagagtcacctaaagttaggcggcactccagccccagctcgccaacaagtcccaaatttggaaaagctgactcatatgaaaagctggaaaaactaggggaaggatcttatgctacagtatacaaagggaaaagcaaggtaaatgggaagttggtagctctgaaggtgatcaggctgcaggaagaagaagggacacctttcacagctatcagggaagcttctcttttaaaaggactaaaacatgctaacatagtgctacttcatgacatcatccataccaaggagacgctgacacttgtgtttgaatatgtgcacactgatttatgtcagtacatggacaagcaccctggggggctgcatccagataatgtgaagttgtttttatttcagttgctgcgaggtctgtcttacatccaccagcgttatattttgcacagagacctgaaaccacagaaccttctgatcagtgacacgggggagttaaagctggcagatttcggtcttgcaagagcaaaatccgtccctagccacacatactccaacgaagtggttaccttgtggtacagacctccagatgtccttctaggctcaacagaatattccacctgccttgacatgtggggagtaggttgcatctttgttgaaatgatccaaggagttgctgcttttccaggaatgaaagacattcaggatcaacttgaacgaatatttctggttcttggaacaccaaatgaggacacatggcctggagttcattctttaccacattttaagccagaacgctttaccctgtacagctctaaaaaccttagacaagcatggaataagctcagctatgtgaaccatgcagaggacctggcctccaagctcctacaatgttccccaaagaacagactgtcggcacaggctgccttgagccacgagtattttagtgacctgccgccacggctatgggaactcaccgacatgtcttctatttttactgtcccaaatgtgagattgcaaccagaagctggagaaagcatgcgggcctttgggaaaaacaatagttatggcaaaagtctatcaaacagcaagcactgacaagcagcacattctcaagagcacacaggattaagttgtcatcattctgggaagaaaaaaaaaacattaatgaagaggccaataatatgaagggaatcatggatcagttttctttcgctccctgtggtggatttcacttacaagaaaattgaagctggcaagaccctgttttctctgcaatttatttaaaaccttgcacgcatttggataccttgtgatttccaagaactacgtgaagattaagctttgcttactgatacatggcatgtattcttttcagtcttttgtgtttgattttgtttgatttccctctgcagcacagcgtctctgtaaaggtttttatgctttcaccagccatgtcttaaatacattaagacaacacatttggtgttcacacttcttcagtaatgtctgaacttgaaagccacagagtggcataaaacaatgtgtgttttctttgagagcagtgcacattttgcaaccactaggaaggaaattttctgctaaagcaaacccctgttctctgacttgacaacttggccccggactgtggggccccacctgttgcttaccttttgaggtaattttgcaaatgtggtttttttacttggaaataactgcacatttatatataggatattggactctgcttagcattttcaagccacatagcatgactgttttttgaataggttggaattgaaaaaacaattatcaaacgttaagaacaaagacagggataaattgcttacatttcaacctctggagattgaggtaactttttgtgtctgggtcttgtcaacatctaatttttttccatccattctgttacactttgtattttctaactggagaaaagagtgaggaacagaatgttttaaatctggtgcaaaagaactatatctgctggatgagccttgaaagcagtcttggcctgttagggcttacaaagtaaattacaaagtgatccagttcaaagtttgcttagttacaacaaagcacctttaaaaaaaatacattttaaaaaaacattccaagccaattggaagacatcattgggttcttactttaagacatctcctggaataactgttcaaatgcaggttttagaaacaatgcaggaatcttgctttaaagatgaaaaagggaatgggccagcttcccttactcaaggagttgagggaccttggaggatgaaggcgagtatgtgacactggagaaaagtggaccaggcatgtcttttgctttgatctggagggagggctgcctgatgcaggccggctcccagtggggcaggcctcgctgcagaatgcccagtagtactgcggccaaggggacagttaggagacttcatctaaagcatgaaacctagctcctctacacacaaattcctatggaaatacctttgtgtacagtgtcttacattttcctattagtcagaaagaaggagagaatgagtgagtgcttgaaatgtgtcatactgttttaggatcaagactaggaattaggagccaggttgacaaggactttttctgagagttgggtgagggtaaagcttttctataatcaagctcaatacaccaaggaaactggatccagaattcctaaactttaaaatggtactgtctgcggagtggagtatggatggttatgtcaaagtcatagttcatcctatccagatgtagcattcatggtaaacttttaagtgctaagcaaggaattatttactgattggttttaaagagagcagaaaacacccaagtgtagaatgtctactgtttgctacctagaaatcttttccattcctctttcatacattccaacccactggaagtctttagaggtattttgatttaaagtatacttaaattaggatttcttaaagaaaacatagggagaaaactttacatgcaattaaaaatggactttcctgtgatttgtttttaatcattcatttggagaagaggcatgacctttgtatttcactaagtttaaagcaagagcaactgatgattaaatgttgctttttaataaggtttttaacttgaaaatttgaaaatatttaatgttgaaagacttcaattagggctattagagttatatctccctgtcgtaggcagcttcttcggagaagtgaaatataacattactcagtggacggagaaatctgttttgttacagagacatgcctctcagaaggtcaggaggttttgagtacctatccttgccacccatacaggaaatccaaagtttggtgtctctctctctctgtctctttctttctctttctccccccaaacccctctcactccctccctccctctctccttcccctatttgcaatcatattctccctctgcttcttttctcttctgccctccttgtgggcagtcatgaaaatcaattcagactgtgttgattagcagatttattattctattgagaaagcactggaatgttttgtgagattatttttatatgaaggaatagcctgaactcaaacagatggtaagaatagtacaaacaccttagcacatcactgcacacacagtattctgaaaggagatttgacacttaattcccattttcttaaaataacagttttgttgacttaaaaatatgagatacataggatgtgaaaaaaaatgtttgcagtactcagcaaaaaatagggtacataaagcagggtggctgtccatccactgattctggggtgagaagcgatttctacctcgcaagagtgactagaaagtttctaggagcacctccaggcttgcaaagaaagtgaggcctcttggtatcctttcctcagtgtgtatatgacagccagtataatcaataccctaggttatgcgtctatatgatactcatctgtgaatattattggttttgtaatctttgttatataagaggatgtttaggctgtatatactggggtagattattgcctgccccttatacataggaatatgctgcataattgcgcataacttccatctcccttactggcttgtaggcagaggaaactgtatatgttactgccttgtacttttctcatacaccaaaaacacaccaaaaaaatcaataaaataagcaatcttctattctcattccttttcccacagcagcatattttagaggcacatacaaaacctacattctctagttgggagtggatttttaaagttttccttttatcttttatttttttttgtatgatgcactgagatgtgtactttctaacaggggattggtacctaagaaatgtggtagcattattcagaaaactattatactttcaaatgacacatagtaaggagaatggaataatacatgttgcatatttgttaccagttgtaatttgtctgtattatgaaagatgtaatggtttgtcagctgtcactgttgttttcttgtaacatgatatggaataaagtatagcagaatctccgt

SEQ ID NO: 174234 - DNA, 1356 bp, Artificial Sequence
  derived and/or modified sequence
atgcacggctacttcggctgcaacgccgccgccgagcccggctacagcgccttcgtgggcaccccccagatctgcgtgaccaagatgagcaccagaaactgccagggcatggacagcgtgatcaagcccctggacaccatccccgaggacaagaaggtgagagtgcagagaacccagagcaccttcgaccccttcgagaagcccgccaaccaggtgaagagagtgcacagcgagaacaacgcctgcatcaacttcaagaccagcagcaccggcaaggagagccccaaggtgagaagacacagcagccccagcagccccaccagccccaagttcggcaaggccgacagctacgagaagctggagaagctgggcgagggcagctacgccaccgtgtacaagggcaagagcaaggtgaacggcaagctggtggccctgaaggtgatcagactgcaggaggaggagggcacccccttcaccgccatcagagaggccagcctgctgaagggcctgaagcacgccaacatcgtgctgctgcacgacatcatccacaccaaggagaccctgaccctggtgttcgagtacgtgcacaccgacctgtgccagtacatggacaagcaccccggcggcctgcaccccgacaacgtgaagctgttcctgttccagctgctgagaggcctgagctacatccaccagagatacatcctgcacagagacctgaagccccagaacctgctgatcagcgacaccggcgagctgaagctggccgacttcggcctggccagagccaagagcgtgcccagccacacctacagcaacgaggtggtgaccctgtggtacagaccccccgacgtgctgctgggcagcaccgagtacagcacctgcctggacatgtggggcgtgggctgcatcttcgtggagatgatccagggcgtggccgccttccccggcatgaaggacatccaggaccagctggagagaatcttcctggtgctgggcacccccaacgaggacacctggcccggcgtgcacagcctgccccacttcaagcccgagagattcaccctgtacagcagcaagaacctgagacaggcctggaacaagctgagctacgtgaaccacgccgaggacctggccagcaagctgctgcagtgcagccccaagaacagactgagcgcccaggccgccctgagccacgagtacttcagcgacctgccccccagactgtgggagctgaccgacatgagcagcatcttcaccgtgcccaacgtgagactgcagcccgaggccggcgagagcatgagagccttcggcaagaacaacagctacggcaagagcctgagcaacagcaagcactag

SEQ ID NO: 174235 - DNA, 1356 bp, Artificial Sequence
  derived and/or modified sequence
atgcacggatacttcgggtgtaatgccgctgccgaacccgggtacagtgcattcgtagggactccacagatatgcgtgaccaaaatgtccacaaggaactgccaaggaatggacagtgtgattaagcctcttgataccattccagaagacaaaaaagtccgagtgcagagaacacaatctactttcgatccctttgaaaagcctgccaatcaggtcaaacgggtgcactctgagaacaacgcttgcataaacttcaagacatcctctaccgggaaagaatcccctaaggtgcggaggcattctagcccttcttcccccacatctcccaagttcggcaaggccgatagttacgagaaactggagaagttgggagagggttcatatgccaccgtgtataagggtaagtccaaggtgaacggaaaattagtcgctcttaaggttatcagactgcaggaggaagagggtactccgttcacagcgatcagggaggcatctctccttaaaggtctgaagcatgcaaatatcgtcctgttgcatgatattatccatacaaaggagaccttgactctcgtgtttgagtacgtccatactgacctgtgtcagtatatggacaagcaccctggtggcctccaccccgataatgtgaagttgttcttgtttcagctgctgcgaggtctcagttacatccatcaacgatatattcttcaccgggacctgaagccgcagaacctgctgatctcagacactggggaactcaagcttgccgactttggcctcgccagggccaagagtgtgccctctcatacatactcgaacgaggtggtgaccctgtggtaccgtccgcccgatgtgcttcttggctccaccgagtattctacgtgcctggacatgtggggagtgggctgtatcttcgttgaaatgattcagggggtggcggccttcccgggtatgaaggacattcaggatcagcttgagcggatctttctagtgctgggtaccccaaatgaagacacctggccaggggtgcatagtctcccccacttcaaaccagagaggttcaccctgtattctagcaaaaacttaaggcaagcctggaacaaactgagctatgtgaatcatgccgaggacctggcgtcaaagctgctgcagtgttcccccaaaaatcggcttagcgcacaggccgctttatcccacgagtattttagcgacctgccaccccgcctgtgggaattgaccgatatgtcttccatctttactgttcctaatgtaaggctgcaaccagaagccggcgaatccatgagagcttttgggaagaacaattcatatgggaaatctctcagcaattcgaaacactag

SEQ ID NO: 174236 - DNA, 1356 bp, Artificial Sequence
  derived and/or modified sequence
atgcacggctacttcggctgcaatgctgctgctgagcccggctacagcgcctttgtgggcaccccccagatctgtgtgaccaagatgagcaccaggaactgccagggcatggattctgtcatcaagcccctggacaccatccctgaggacaagaaggtgcgggtgcagaggacccagagcacctttgacccctttgagaagccagccaaccaggtgaagagggtgcacagcgagaacaatgcctgcatcaacttcaagaccagcagcacaggcaaggagagccccaaggtgcggcggcacagcagccccagcagccccaccagccccaagtttgggaaggctgacagctatgagaagctggagaagctgggggagggcagctatgccaccgtgtacaagggcaagagcaaggtgaatggcaagctggtggccctgaaggtgatccggctgcaggaggaggagggcacccccttcaccgccatccgggaggccagcctgctgaagggcctgaagcacgccaacatcgtgctgctgcatgacatcatccacaccaaggagaccctgaccctggtgtttgaatatgtgcacacagacctgtgccagtacatggacaagcaccctgggggcctgcacccagacaacgtgaagctgttcctgttccagctgctgcggggcctgagctacatccaccagcgctacatcctgcaccgggacctgaagccccagaacctgctgatcagtgacacaggagagctgaagctggccgactttggcctggcccgggccaagtctgtgcccagccacacctacagcaatgaggtggtgaccctgtggtacagacctccagatgtgctgctgggcagcacagagtacagcacctgcctggacatgtggggcgtgggctgcatctttgtggagatgatccagggcgtggccgccttccctggcatgaaggacatccaggaccagctggagcgcatcttcctggtgctgggcaccccaaatgaagacacctggccaggagtgcacagcctgccccacttcaagccagagcgcttcaccctgtacagcagcaagaacctgcggcaggcctggaacaagctgtcctatgtgaaccacgccgaggacctggccagcaagctgctgcagtgcagccccaagaaccggctgagcgcccaggccgccctgagccatgagtacttcagtgacctgcccccccggctgtgggagctgacagacatgagcagcatcttcaccgtgcccaacgtgcggctgcagcctgaggccggggagagcatgagggccttcggcaagaacaacagctatggcaagagcctgagcaacagcaagcactag

SEQ ID NO: 174237 - DNA, 1356 bp, Artificial Sequence
  derived and/or modified sequence
atgcacggctacttcggctgcaacgccgccgccgagcccggctactcagcgtttgtgggaacaccacaaatctgtgtcactaaaatgtcgacgcggaattgtcaaggcatggactccgtcattaagccactggatactattccagaagacaagaaggtacgagtacagcgcactcaaagcacttttgatcctttcgagaagcccgccaaccaagtcaaacgggtgcactcagagaacaatgcttgcattaattttaagacaagcagtacgggaaaggaaagtccaaaggtgcggcgacatagttcacctagtagccctacctcccctaaattcggcaaggccgatagttatgagaagctggaaaagctgggggaaggaagctacgctaccgtgtacaagggtaagtctaaggtgaacggaaaacttgtagccttaaaagtgatacgcctgcaggaagaagaggggactccattcacagcaatccgggaggcatctctactgaagggcttaaaacacgctaacattgtcttgttgcacgatatcatacacactaaggagacccttactctcgtgtttgaatatgttcacaccgatttatgtcaatacatggataagcaccctggcggacttcatccagacaacgtcaagctctttctcttccaattgctccgcgggctgtcttatatccaccagaggtatattctgcaccgggacctgaaaccccagaatctgctaatatctgacactggcgagctgaagctcgctgactttggtctggcgagagccaagagcgtcccttcgcacacttacagcaacgaagtggtgactctatggtaccgtccccctgacgtcctcctgggctctacagaatatagcacgtgcttggacatgtggggcgtggggtgcatctttgtggaaatgatccagggcgtggccgcctttcccggcatgaaggatattcaggaccagctcgagcggatctttctggtactcgggaccccaaacgaggacacgtggcccggcgtgcatagtttgccgcacttcaagccagaacgttttacgctctactccagcaagaatctacgccaagcctggaacaagctgagttatgtgaaccacgctgaggacctggccagcaaactgttacagtgctccccaaaaaatagactctctgcacaggccgccctttcccacgaatatttctcagacttgccccctcgactttgggagctgactgacatgtcttcgatttttacagtgcctaacgtgaggctgcagcctgaagccggagaatcaatgagagccttcggcaagaacaactcttatggaaagtcactatcaaactctaaacattag

SEQ ID NO: 174238 - DNA, 1356 bp, Artificial Sequence
  derived and/or modified sequence
atgcacggctattttgggtgtaatgccgcagccgagcccggatactccgcattcgtgggcacaccacagatctgcgttactaagatgagtacgcgaaattgtcaggggatggattccgtgattaagcctctagatactattccagaggacaaaaaggtcagagtgcagcggacacagagtaccttcgacccctttgaaaaacccgcaaatcaggtgaaacgggtccacagcgagaacaatgcatgcattaatttcaagaccagttcgacgggcaaagaatccccgaaagtgcggaggcatagttcccccagctctccaacctcaccgaaattcggcaaggccgatagttatgagaagctggaaaagctgggagaaggatcatatgccacggtctacaagggtaaaagtaaggttaacggcaagcttgtggcactaaaagtgatcaggctgcaagaagaggaaggaacacccttcaccgccataagggaagcatccctgcttaaaggcctgaagcatgccaacatcgtgctgctgcacgatatcatacacacgaaagagaccctgaccctggtttttgaatacgtgcataccgatttatgtcagtacatggacaaacatcctgggggactccacccggataatgtgaagctgtttctgttccagctgttgcggggtctatcttacatacatcagcgctatatcctccatagggaccttaagcctcaaaatttgctcatcagcgatacaggagaactgaaactggcagacttcggccttgctcgggcaaagtccgtgcccagccacacctacagcaatgaagtggtgaccttgtggtacagacctccagatgtgctattaggctccacagagtactctacctgtctggatatgtggggcgtgggatgcatctttgttgaaatgattcagggggtggccgcattcccgggaatgaaggatattcaggatcagctggaacgaattttcttagttctgggtacccctaatgaagacacttggccgggagtgcattccttgcctcactttaaacccgagcgcttcacgctctattcttccaaaaatctgcgccaagcttggaacaagttgtcgtatgttaatcatgccgaggacctggcttctaaacttttgcagtgttctccaaagaatcggctgtccgcccaggccgcactatcacacgagtatttctccgatcttccgcctcggttgtgggagctgaccgacatgagctcaattttcactgtccccaatgtcaggctgcagccagaggcaggggagtccatgcgcgcattcggcaagaacaacagctatggaaaaagcctgagcaattcgaagcactag

SEQ ID NO: 174239 - protein, 127 aa, Artificial Sequence
  derived and/or modified sequence
MTAAATATVLKEGVLEKRSGGLLQLWKRKRCVLTERGLQLFEAKGTGGRPKELSFARIKAVECVESTGRHIYFTLVTEGGGEIDFRCPLEDPGWNAQITLGLVKFKNQQAIQTVRARQSLGTGTLVS

SEQ ID NO: 174240 - DNA, 384 bp, Artificial Sequence
  derived and/or modified sequence
atgaccgccgccgccaccgccaccgtgctgaaggagggcgtgctggagaagagaagcggcggcctgctgcagctgtggaagagaaagagatgcgtgctgaccgagagaggcctgcagctgttcgaggccaagggcaccggcggcagacccaaggagctgagcttcgccagaatcaaggccgtggagtgcgtggagagcaccggcagacacatctacttcaccctggtgaccgagggcggcggcgagatcgacttcagatgccccctggaggaccccggctggaacgcccagatcaccctgggcctggtgaagttcaagaaccagcaggccatccagaccgtgagagccagacagagcctgggcaccggcaccctggtgagctag

SEQ ID NO: 174241 - DNA, 384 bp, Artificial Sequence
  derived and/or modified sequence
atgaccgcagcagcaaccgcaaccgtgctgaaggaaggggtgttggagaagcgctcaggcgggcttctgcagctctggaagaggaagcggtgcgtgctcactgaaaggggtctccagctcttcgaagctaagggcacaggggggaggcctaaagagctgtcttttgcgcgaatcaaagcagtcgagtgcgtagaatcaactggccgccatatctactttaccctggtgacggaggggggcggcgagattgatttccgttgtcccctagaggaccccgggtggaatgcacagatcacactgggcctggtgaagttcaagaatcagcaggcgatccagacggtgcgggcccgccagtcactcggtacaggtacactggttagttag

SEQ ID NO: 174242 - DNA, 384 bp, Artificial Sequence
  derived and/or modified sequence
atgacggcagccgcaactgccactgttcttaaggaaggagtcttggagaagcgatcgggaggcctgctccagctctggaaaagaaaacgctgtgtgctcacagaacggggtctccaactgtttgaggcaaaaggaaccggaggtcgtccaaaggagctgtcttttgcaaggatcaaggccgtggagtgtgtggagtctactggaagacacatttattttacactggttacggaaggcgggggtgaaatagactttcggtgccctctagaggatcccgggtggaacgcacagatcaccctgggcctggtcaagtttaagaatcagcaggcgatccaaactgtgcgggcccggcagtccttgggaaccggaaccctagtttcttag

SEQ ID NO: 174243 - DNA, 384 bp, Artificial Sequence
  derived and/or modified sequence
atgacagctgctgccacagccaccgtgctgaaggagggcgtgctggagaagaggtctgggggcctgctgcagctgtggaagaggaagagatgtgtgctgacagagcggggcctgcagctgtttgaggccaagggcaccggcggccggcccaaggagctgagctttgcccgcatcaaggctgtggagtgtgtggagagcacaggccgccacatctacttcaccctggtgacagaaggaggaggagaaattgacttccgctgccccctggaggaccccggctggaatgcccagatcaccctgggcctggtgaagttcaagaaccagcaggccatccagacagtgcgggcccggcagagcctgggcaccggcaccctggtgtcctag

SEQ ID NO: 174244 - DNA, 384 bp, Artificial Sequence
  derived and/or modified sequence
atgaccgccgccgccaccgccaccgtgctgaaggagggcgtgctggaaaagagatcaggtggcttactgcagctctggaagcgtaagcgctgcgttctcacagagagaggacttcagctgttcgaggccaaaggtacgggcggacgcccaaaggagctcagtttcgccagaattaaagcagtggagtgtgtggaaagtactggaagacatatttatttcactttggtcacagaagggggaggagaaatcgacttccggtgtccactggaggaccctggctggaacgctcagatcacgctgggtctggtcaagttcaaaaaccagcaagctatccagacagtgagggcgcgccagtctctcggcactgggaccttggtctcctag

SEQ ID NO: 174245 - DNA, 384 bp, Artificial Sequence
  derived and/or modified sequence
atgaccgccgccgccaccgccaccgtgctgaaggagggcgtgctggagaaacgcagcggggggttgctccagctgtggaaaagaaagcgttgtgtgctgactgaacgtggattacagctcttcgaggcgaagggcacaggtggtaggccaaaggaactgagctttgcacggatcaaggctgttgagtgtgtcgagagcacaggcaggcatatctacttcacacttgtgacggaaggagggggcgagatcgacttccgatgcccactcgaagatcctggttggaacgcacagatcactctgggtctcgttaaatttaaaaaccagcaggctattcagactgtgcgggcccggcagtcactcggcaccggaaccctggtgagctag

SEQ ID NO: 174246 - DNA, 384 bp, Artificial Sequence
  derived and/or modified sequence
atgactgcagcggcaacagccactgtcctgaaggagggcgtgttggagaagcggagcggaggcctgcttcagctctggaagaggaaacgatgcgtgctcaccgaaaggggtctccaactctttgaagccaagggcactgggggtcgcccaaaggaattgtcctttgcgcgaatcaaagcggttgaatgtgtggagagtacagggaggcacatttactttactctcgttaccgagggaggcggagaaatagacttcagatgcccgttagaagaccccggatggaacgcacagatcacccttggcctggtcaaattcaagaaccagcaggctatccagacggtacgcgctcggcagtctctgggcactgggaccctcgtcagctag

SEQ ID NO: 174247 - DNA, 384 bp, Artificial Sequence
  derived and/or modified sequence
atgacggcagctgccaccgccactgtgctgaaagagggagtcctcgagaagagatcaggtggcctgctccagctatggaaaaggaaacgttgcgttctcaccgaacgcggactccagttatttgaagcgaaaggcacaggcggacggccaaaggaactgtcattcgcccgaatcaaggcagttgagtgtgtggaaagtaccgggaggcatatatactttaccttagtcacagaaggcggaggggaaatagacttccggtgccctctcgaagaccctggctggaatgcgcaaataaccctcggccttgtcaaatttaaaaatcagcaagccatccagaccgtgagggcacgccagtccctgggaacaggcaccttggtcagttag

SEQ ID NO: 174248 - DNA, 896 bp, Artificial Sequence
  derived and/or modified sequence
aggggagggccggccagggtaggaatgcgctgcgggcgggcggcgcaggaggcgagcggcggaacatccgggtgctgagggccgcggtgtgggtgcgcggagcagtcagggcgcaggtgggcagcgcgcacggcctgccagcccggggcgccagaatcctgcgctgcggggccgagaggggcgccgcgcccgccgcagcctggagctttccgcgaacctcggggcgcccatgacggcggcggcgacggctaccgtgctcaaggagggcgtgctggagaagcgcagcggcgggctgctgcagctgtggaagcggaagcgctgcgtcctcaccgaacgcgggctgcagctcttcgaggccaagggcacgggcggccggcccaaggagctcagcttcgcccgcatcaaggccgtggagtgcgtggagagcaccgggcgccacatctacttcacgctggtgaccgaagggggcggcgagatcgacttccgctgccccctggaagatcccggctggaacgcccagatcaccctaggcctggtcaagttcaagaaccagcaggccatccagacagtgcgggcccggcagagcctcgggaccgggaccctcgtgtcctaaaccaccgggcgcaccatctttccttcatgctacccaccacctcagtgctgaggtcaaggcagcttcgttgttccctctggcttgtgggggcacggctgtgctccatgtggcaaggtggaaggcatggacgtgtggaggaggcgctggagctgaaggaatggacgagccctgggaggagggcagaaggctacgcagggctgaggatgaagatgcagcccctggatggtcccagactctcaggacatgcccagctcaggggcttcgagccacaggcctggcctca

SEQ ID NO: 174249 - DNA, 1531 bp, Artificial Sequence
  derived and/or modified sequence
gagcggcggaacatgtaagggcacatcccgcgagctgccgcccagcgcgcagacagagcccaggggagcaagagaacgggcgggcggtggggctcacggcctagggaggcgcggaggcatctggcagaggcgggtcgggctgggccagctggggtagagcggaggagcgggtgccggctgaagcggggcggtgggcgcggagcgcgctgggggcaccgacaccacctcaccggcagccgggtgctgagggccgcggtgtgggtgcgcggagcagtcagggcgcaggtgggcagcgcgcacggcctgccagcccggggcgccagaatcctgcgctgcggggccgagaggggcgccgcgcccgccgcagcctggagctttccgcgaacctcggggcgcccatgacggcggcggcgacggctaccgtgctcaaggagggcgtgctggagaagcgcagcggcgggctgctgcagctgtggaagcggaagcgctgcgtcctcaccgaacgcgggctgcagctcttcgaggccaagggcacgggcggccggcccaaggagctcagcttcgcccgcatcaaggccgtggagtgcgtggagagcaccgggcgccacatctacttcacgctggtgaccgaagggggcggcgagatcgacttccgctgccccctggaagatcccggctggaacgcccagatcaccctaggcctggtcaagttcaagaaccagcaggccatccagacagtgcgggcccggcagagcctcgggaccgggaccctcgtgtcctaaaccaccgggcgcaccatctttccttcatgctacccaccacctcagtgctgaggtcaaggcagcttcgttgttccctctggcttgtgggggcacggctgtgctccatgtggcaaggtggaaggcatggacgtgtggaggaggcgctggagctgaaggaatggacgagccctgggaggagggcagaaggctacgcagggctgaggatgaagatgcagcccctggatggtcccagactctcaggacatgcccagctcaggggcttcgagccacaggcctggcctcatatggcatgagggggagctggcataggagccccctccctgctgtggtcctgccctctgtcctgcagactgctcttagccccctggctttgtgccaggcctggaggagggcagtcccccatggggtgccgagccaacgcctcaggaatcaggaggccagcctggtaccaaaaggagtacccagggcctggtacccaggcccactccagaatggcctctggactcaccttgagaagggggagctgctgggcctaaagcccactcctgggggtctcctgctgcttaggtccttttgggacccccacccatccaggccctttctttgcacacttcttcccccacctctacgcatcttccccccactgcggtgttcggcctgaaggtggtgggggtgagggggggtttggccattagcatttcatgtctttccccaaatgaagatgccctgcaaagggcagtaaccacaca

SEQ ID NO: 174250 - protein, 339 aa, Artificial Sequence
  derived and/or modified sequence
MDSLGAVSTRLGFDLFKELKKTNDGNIFFSPVGILTAIGMVLLGTRGATASQLEEVFHSEKETKSSRIKAEEKEVIENTEAVHQQFQKFLTEISKLTNDYELNITNRLFGEKTYLFLQKYLDYVEKYYHASLEPVDFVNAADESRKKINSWVESKTNEKIKDLFPDGSISSSTKLVLVNMVYFKGQWDREFKKENTKEEKFWMNKIIDKISPEKLVEWTSPGHMEERKVNLHLPRFEVEDGYDLEAVLAAMGMGDAFSEHKADYSGMSSGSGLYAQKFLHSSFVAVTEEGTEAAAATGIGFTVTSAPGHENVHCNHPFLFFIRHNESNSILFFGRFSSP

SEQ ID NO: 174251 - protein, 391 aa, Artificial Sequence
  derived and/or modified sequence
MDSLGAVSTRLGFDLFKELKKTNDGNIFFSPVGILTAIGMVLLGTRGATASQLEEVFHSEKETKSSRIKAEEKEVIENTEAVHQQFQKFLTEISKLTNDYELNITNRLFGEKTYLFLQKYLDYVEKYYHASLEPVDFVNAADESRKKINSWVESKTNEKIKDLFPDGSISSSTKLVLVNMVYFKGQWDREFKKENTKEEKFWMNKSTSKSVQMMTQSHSFSFTFLEDLQAKILGIPYKNNDLSMFVLLPNDIDGLEKIIDKISPEKLVEWTSPGHMEERKVNLHLPRFEVEDGYDLEAVLAAMGMGDAFSEHKADYSGMSSGSGLYAQKFLHSSFVAVTEEGTEAAAATGIGFTVTSAPGHENVHCNHPFLFFIRHNESNSILFFGRFSSP

SEQ ID NO: 174252 - DNA, 1020 bp, Artificial Sequence
  derived and/or modified sequence
atggatagtttgggggccgtctctaccaggttggggttcgatctctttaaagagttgaagaagactaacgacggcaatatcttcttcagtcctgtgggcatactgaccgctatcggaatggtcctattgggtactcgaggggctactgcatcccagcttgaagaggtattccattcagaaaaagaaaccaagtcctcaaggatcaaggccgaggaaaaggaggtcatcgagaatacggaggctgtgcaccagcagttccagaagtttttgacggagatcagcaaactgacaaatgactatgaattgaatattactaacaggttgttcggcgagaagacctatctctttctgcagaagtacctggattatgttgagaagtattaccacgcttcactcgagcctgttgatttcgtcaatgccgctgatgaatccaggaaaaagatcaatagctgggttgagtccaaaacaaacgagaaaatcaaggacctgttcccagacgggtcaatcagcagcagtaccaagctggttctggttaatatggtttatttcaaaggccagtgggacagggagttcaaaaaagaaaacacaaaagaggagaagttctggatgaataagattattgataagattagtcccgagaaactagtggagtggacatcccctggacacatggaggagcgcaaagttaacctccacctacctaggttcgaggtggaggacggctatgacttagaagcagtccttgctgcaatgggcatgggcgatgcatttagcgaacacaaagcagattacagcggtatgtccagtgggtccgggttatacgcacaaaagtttcttcactcctcctttgtagcagtgacagaagaaggaactgaggctgctgccgctaccggaattggatttaccgtgacatccgcaccggggcatgagaatgtacactgcaatcacccctttctattcttcatccggcataatgagtccaattctatactctttttcggaaggttcagttcaccgtag

SEQ ID NO: 174253 - DNA, 1176 bp, Artificial Sequence
  derived and/or modified sequence
atggactccctcggggccgtaagcaccaggctcgggtttgatctgtttaaagagctgaagaagactaacgacggaaacattttcttcagccctgtgggtatcttgaccgccattgggatggttttgctcggaaccaggggcgctaccgcttcccaactcgaggaggtattccatagcgaaaaagagaccaagtcctctcgcatcaaagcagaggagaaggaggttattgagaatactgaggctgtgcaccaacagtttcagaagtttttgacggagatctctaaactaacaaatgactatgaacttaatattacgaatcggttgttcggcgaaaagacttacttattccttcaaaaatacctcgattacgttgaaaaatattaccacgctagtctggaaccagtcgacttcgtcaacgccgcggatgagtcccggaagaagatcaatagctgggttgagagcaaaactaacgaaaagatcaaggacctgttccctgacggaagcatatcgagcagtaccaaattggtcctcgttaacatggtgtactttaagggtcagtgggatcgtgagtttaagaaggaaaacacaaaagaagagaaattttggatgaataagtccacctctaaatccgtacagatgatgacccaatctcactccttctcttttacgttccttgaggacctgcaggccaaaattctgggcatcccatataagaataatgacttatctatgttcgtgctacttcctaacgacatcgatggtctcgagaaaattatcgacaaaatctcacccgagaagctggtcgagtggacgagtcccggccacatggaagagcgtaaggtgaacttgcacctccccaggttcgaggtggaagacggatatgacctggaagccgtgctggctgctatggggatgggcgatgccttcagtgaacataaggccgattactccgggatgtcatcggggtcaggtctgtatgcccagaagttcctgcacagctcctttgtcgccgtcaccgaggagggcaccgaagccgcagcagccacaggaatcggatttaccgtgacgtctgcgccgggtcacgagaacgtgcactgcaaccacccctttctcttttttatcagacataatgagtccaatagcattctgttcttcggcagatttagctctccttag

SEQ ID NO: 174254 - DNA, 1020 bp, Artificial Sequence
  derived and/or modified sequence
atggacagcctgggcgctgtgtccacccggctgggctttgacctcttcaaggagctgaagaagaccaatgatggcaacatcttcttcagccctgtgggcatcctgacagccatcggcatggtgctgctgggcaccaggggggccacagccagccagctggaggaggtgttccacagcgagaaggagaccaagagcagccgcatcaaggccgaggagaaggaggtgattgaaaatacagaagctgtgcaccagcagttccagaagttcctgacagagatcagcaagctgaccaatgactatgagctgaacatcaccaaccggctgtttggagagaagacctacctgttcctgcagaagtacctggactatgtggagaagtactaccacgccagcctggagcctgtggactttgtgaatgctgctgatgagagcaggaagaagatcaacagctgggtggagagcaagaccaatgagaagatcaaggacctcttcccagatggcagcatcagcagcagcaccaagctggtgctggtgaacatggtgtacttcaagggccagtgggaccgggagttcaagaaggagaacaccaaggaggagaagttctggatgaacaagatcatcgacaagatcagccctgagaagctggtggagtggaccagccctggccacatggaggagaggaaggtgaacctgcacctgcccaggtttgaggtggaggatggctatgacctggaggccgtgctggccgccatgggcatgggagatgccttcagcgagcacaaggctgactacagcggcatgagcagcggcagcggcctgtatgcccagaagttcctgcacagcagctttgtggccgtgacagaggagggcacagaagctgctgctgccactggaattggcttcaccgtgaccagcgcccctggccatgaaaatgtgcactgcaaccaccccttcctgttcttcatccgccacaatgaaagcaacagcatcctcttcttcggccgcttcagcagcccctag

SEQ ID NO: 174255 - DNA, 1176 bp, Artificial Sequence
  derived and/or modified sequence
atggacagcctgggcgctgtgtccacccggctgggctttgacctcttcaaggagctgaagaagaccaatgatggcaacatcttcttcagccctgtgggcatcctgacagccatcggcatggtgctgctgggcaccaggggggccacagccagccagctggaggaggtgttccacagcgagaaggagaccaagagcagccgcatcaaggccgaggagaaggaggtgattgaaaatacagaagctgtgcaccagcagttccagaagttcctgacagagatcagcaagctgaccaatgactatgagctgaacatcaccaaccggctgtttggagagaagacctacctgttcctgcagaagtacctggactatgtggagaagtactaccacgccagcctggagcctgtggactttgtgaatgctgctgatgagagcaggaagaagatcaacagctgggtggagagcaagaccaatgagaagatcaaggacctcttcccagatggcagcatcagcagcagcaccaagctggtgctggtgaacatggtgtacttcaagggccagtgggaccgggagttcaagaaggagaacaccaaggaggagaagttctggatgaacaagagcaccagcaagtctgtgcagatgatgacccagagccacagcttctccttcaccttcctggaggacctgcaggccaagatcctgggcatcccctacaagaacaatgacctgtccatgtttgtgctgctgcccaatgacattgatggcctggagaagatcatcgacaagatcagccctgagaagctggtggagtggaccagccctggccacatggaggagaggaaggtgaacctgcacctgcccaggtttgaggtggaggatggctatgacctggaggccgtgctggccgccatgggcatgggagatgccttcagcgagcacaaggctgactacagcggcatgagcagcggcagcggcctgtatgcccagaagttcctgcacagcagctttgtggccgtgacagaggagggcacagaagctgctgctgccactggaattggcttcaccgtgaccagcgcccctggccatgaaaatgtgcactgcaaccaccccttcctgttcttcatccgccacaatgaaagcaacagcatcctcttcttcggccgcttcagcagcccctag

SEQ ID NO: 174256 - DNA, 1020 bp, Artificial Sequence
  derived and/or modified sequence
atggacagcctgggcgccgtgagcacccggctgggcttcgacctgtttaaggagctcaaaaagacgaatgatggcaatatcttcttcagccctgtgggtatcttgaccgctataggcatggttctgctcggcacaagaggtgctacggcctcacaacttgaagaggtgtttcactctgagaaggaaacaaagagctctcgcattaaggcggaagaaaaagaggtgatcgaaaacaccgaggctgtgcaccagcagtttcaaaaatttctgaccgaaatcagtaagctgactaacgattatgagctgaacatcactaaccggctatttggggagaaaacatacttgttcctgcaaaagtacctggattatgtggaaaaatattaccacgctagcctggaacccgtggatttcgtgaatgcggccgacgaaagtaggaagaaaatcaacagctgggtagagtcaaagaccaacgagaaaattaaagacctctttcctgacggaagtattagctctagtacgaaactcgtgctggtgaatatggtgtatttcaaagggcaatgggatagggagtttaagaaggaaaacacgaaagaggagaagttttggatgaacaaaattattgataagattagcccagaaaaactggttgagtggacctctcctgggcacatggaggaacggaaggtgaacttgcacctccccagatttgaagtcgaagacggatacgacttggaggctgtcttggcggctatgggaatgggcgacgccttttctgagcacaaagcggactactccgggatgtctagcggctccggtttatacgcacaaaagtttttacactctagcttcgtggcggtaacggaggagggtaccgaagcagcagcggctacgggcatcggtttcaccgtgacatctgcgcccgggcacgaaaacgtccactgtaaccacccgtttctgtttttcatcagacataacgagtcaaatagcattctgttctttgggcgcttcagttctccttag

SEQ ID NO: 174257 - DNA, 1176 bp, Artificial Sequence
  derived and/or modified sequence
atggacagcctgggcgccgtgagcacccggctgggcttcgacctgttcaaagagctgaagaaaactaacgacggcaatatctttttttcccccgttggaattctgactgccattggcatggtactcttgggaacacggggggccacagctagtcagctggaagaggtctttcacagcgaaaaggaaaccaaatcaagccgcattaaggctgaggagaaagaggtgattgaaaacaccgaggctgtacaccagcaatttcaaaaatttctgaccgagatctccaagctgaccaacgactacgagttaaatatcactaatagactgttcggggaaaaaacatacctgttcctccagaagtatttggattacgtggaaaagtactatcacgcatctctggagcctgtggactttgttaacgctgccgatgagtccagaaaaaagattaactcctgggttgagtcaaagacaaacgagaagatcaaggacctgttccccgacggatctatcagctctagcacgaaactggtcctggttaacatggtgtactttaagggccagtgggaccgagagtttaagaaagaaaatacgaaagaagagaaattctggatgaataagtcaacgagcaagtctgtccaaatgatgacacagagtcatagcttctcattcaccttcttggaggacttacaggcgaaaattctgggtatcccctacaaaaacaatgatctgagcatgtttgtgcttttgcctaatgacatagacgggcttgagaaaattatagataagataagcccagaaaagctggtggagtggacctctccaggccacatggaagaaaggaaggtgaaccttcacttaccgaggtttgaagtggaggatggttacgatctggaggcagtgcttgcagccatgggaatgggtgacgcgttctccgagcacaaagcagattattcgggcatgtctagtggaagtggactgtatgcacagaagttcctgcacagcagttttgtggcagtgaccgaagaggggacggaggccgctgctgctaccggcattgggttcacagtgacatccgcccccggccatgaaaatgtgcactgcaatcaccccttcctgttcttcattaggcataatgagagcaacagcattctgttttttggcaggtttagctccccatag

SEQ ID NO: 174258 - DNA, 1020 bp, Artificial Sequence
  derived and/or modified sequence
atggactccctcggagctgtatctacacgcctgggattcgatctgttcaaggaacttaagaagactaacgacggcaatatctttttttcacccgttggcatcctgacggctatcggcatggtgctcctgggcacacggggagcaacggcatctcagctggaggaggtgttccattcggaaaaggagacaaagtcaagccgtattaaggctgaggagaaagaggtgatcgagaacactgaggccgtgcatcagcagttccagaaattcctgacggaaatcagcaaacttacgaatgactacgagctgaacattactaataggttgttcggcgaaaaaacatacctgttcttacagaagtatttggattacgtggaaaagtactatcacgcctccttggagcccgtggactttgtcaacgccgcagatgaatcccgaaagaagataaattcctgggttgaaagcaaaactaatgaaaaaattaaagatctgttccccgacggatctatctccagctctacgaagttagtgctggtgaacatggtgtacttcaaaggacaatgggatcgggagttcaaaaaagaaaacaccaaggaggaaaagttctggatgaacaaaattattgataaaatctctcccgagaagctggtcgagtggacttcaccagggcatatggaagaaaggaaagtgaacctgcatctgccgcgattcgaagtggaggatggctacgatctggaggccgttctggccgctatgggaatgggcgacgccttctccgaacataaggccgattacagcggtatgtcttctggatccgggctgtacgcacagaagtttctccactcttctttcgttgcagttacagaagagggaacagaggccgctgcagctaccggaatcggatttacagtgacctctgcgcctggtcatgagaatgtgcattgtaatcacccgtttctctttttcatccgacataacgagtcaaattctatcctgttctttgggaggttctcctccccctag

SEQ ID NO: 174259 - DNA, 1176 bp, Artificial Sequence
  derived and/or modified sequence
atggattcactgggtgccgtgtccacccgcctcgggttcgatctgtttaaagagctcaagaagacgaatgatggaaacatcttcttctctccagttggaatcttgaccgcaatcggcatggtactcctcggaacgcgcggagctactgctagccagttggaggaggtttttcacagcgaaaaagagacaaagagcagtaggattaaagccgaggaaaaagaggtcattgaaaacacggaggcggtgcaccaacagtttcagaagtttctgacagagatctccaagctgacgaacgactacgaactaaacataactaataggctcttcggcgaaaaaacctatctgtttttgcagaaataccttgattatgtggagaaatattaccacgcaagcctggaacctgtggatttcgtgaacgcagcggatgaatcacgtaaaaagattaacagttgggtggagtcaaagacaaacgaaaagataaaggatctcttccccgacggttctatctccagcagcactaagctagtgctggttaacatggtatatttcaaagggcagtgggatagagaatttaagaaggaaaacacaaaggaagagaagttttggatgaataagtcaaccagcaagagtgtgcaaatgatgacccagtcccactccttctcatttacattcctggaggatctacaggctaaaatattaggaatcccctacaaaaacaatgatctctccatgttcgttctcttacctaacgatatcgatggccttgagaaaatcatcgataagatctccccagaaaaactagttgagtggaccagcccagggcacatggaagagcggaaagtgaacttgcacctgccccgatttgaagtagaagatggatacgatctcgaggccgtcctagcagccatgggtatgggcgatgcctttagcgaacacaaggccgactactcaggaatgagtagtggatccggactgtacgcccaaaaatttttacactcctcatttgtagccgtgactgaagaaggcacagaggcagcggctgccacaggtattggattcaccgtgacttccgcaccgggacacgagaacgtgcactgcaatcatccgttcctgttcttcattaggcataacgaaagcaattccatactcttttttggaagattcagttctccatag

SEQ ID NO: 174260 - DNA, 3021 bp, Artificial Sequence
  derived and/or modified sequence
aaagttccaaggagattttaaggtgcacgcaaggtggaaaaccactgctgaagcagatgtggagaactataaattaaggatcccagctacttaattgacttatgcttcctagttcgttgcccagccaccaccgtctctccaaaaacccgaggtctcgctaaaatcatcatggattcacttggcgccgtcagcactcgacttgggtttgatcttttcaaagagctgaagaaaacaaatgatggcaacatcttcttttcccctgtgggcatcttgactgcaattggcatggtcctcctggggacccgaggagccaccgcttcccagttggaggaggtgtttcactctgaaaaagagacgaagagctcaagaataaaggctgaagaaaaagaggtgattgagaacacagaagcagtacatcaacaattccaaaagtttttgactgaaataagcaaactcactaatgattatgaactgaacataaccaacaggctgtttggagaaaaaacatacctcttccttcaaaaatacttagattatgttgaaaaatattatcatgcatctctggaacctgttgattttgtaaatgcagccgatgaaagtcgaaagaagattaattcctgggttgaaagcaaaacaaatgaaaaaatcaaggacttgttcccagatggctctattagtagctctaccaagctggtgctggtgaacatggtttattttaaagggcaatgggacagggagtttaagaaagaaaatactaaggaagagaaattttggatgaataagataatagataaaataagtcctgagaaattggtagagtggactagtccagggcatatggaagaaagaaaggtgaatctgcacttgccccggtttgaggtggaggacggttacgatctagaggcggtcctggctgccatggggatgggcgatgccttcagtgagcacaaagccgactactcgggaatgtcgtcaggctccgggttgtacgcccagaagttcctgcacagttcctttgtggcagtaactgaggaaggcaccgaggctgcagctgccaccggcataggctttactgtcacatccgccccaggtcatgaaaatgttcactgcaatcatcccttcctgttcttcatcaggcacaatgaatccaacagcatcctcttcttcggcagattttcttctccttaagatgatcgttgccatggcattgctgcttttagcaaaaaacaactaccagtgttactcatatgattatgaaaatcgtccattcttttaaatgttgtctcacttgcatttccagtcttggccatcaaatcaatgatttaatgactccaataatgtgtgtgtttataaccatcctcgaaagtgaaatgtccttttctttgtgccatgcgtaaggtgagtcaaaccaaacctcattgataatctccctttggtttcctttgaaagtaaattggtatcttgtagttttgtgcacacgaaaggagagaaagtctctccagtaaagagtacgaactagtaattttggggggtctctctaattctggtattttgacatgttataatacgcaagtaaaataaaacaatagtttactcagctcatgttactattccccaacagatattgtggcaaatcacacataggaaagagaatttgggaatacagtagcaaaacataaattaaaactcaaatgccaggacaaaataaaacaatataccagatggagaggatgcccgtattttcatcttccattctaacattatccattgttagatgcataagcattttgatattgtgtaataaatgtggtatttgagaagataaatgatgtagttgatcagtattcctcctctatcacctttttagactttgtaaggtaaatatttggactaacttttagaaaagtttccctttttttctccatttacatttttctggtttttttttttttttgagtgaggtacgagtattaccaaatgatattttctgaagatgctttttggaaagctctgaatctatacctaatgctcttaattattggcttgtttcatttttttcctccagtttttaacaagatcacataactggcttatttttaacagctttgtcaaactacaatttacatgccgtaaaatgtacacactgtaattttataattcattgacttttagtaaatttctagcgttatgcatcgccacaatccagttttagaatatttccatgaccctaagaagtttcctcatgtctattaatattcccaatcctaggcaccactgagttgttttctgtctttataagtttttctttctacatcttatataaatggaatcataatacatgtagtattttgtgtctggcgtcttgcacttagcatggtgttcttgaggttcatctgttgtagtatgtattgatacttaatttttttattgccgaatactattccattgcatggaaaagacctattttatttctaggttcaccagttgagggacatttggattgttcccacttcttggctgttaggaataatgttgctctgaacatgtaaataaagatctttgtgttcacatatgttttcatttctgttggggagattcctaggctagaaattgctgggccatatgaaaaatcaatagttagctttgtaagaaacagtcaaactgttttccaacgtgacattttatattcccaccaggaatgtttaaaactagtgtcttcaaatcctcaccaacatccaggattgtgtctttatgattatagccatttttgtaggtacaaagtggcatctcatggtggttttaatttgcatttccataatatctaattaggttgagctttttttatgtgcttattggccatttgtttgactttgtttggtgaaatgtatacaaatcatttgctcatttttaatttgggttgtctgtcttgtcttctcattttattgagttaaatgagttcttaataatctctggcttacaagtccttaatttatcaaatatatgatacgtggacatttcctc

SEQ ID NO: 174261 - DNA, 3114 bp, Artificial Sequence
  derived and/or modified sequence
ctataaattaaggatcccagctacttaattgacttatgcttcctagttcgttgcccagccaccaccgtctctccaaaaacccgaggtctcgctaaaatcatcatggattcacttggcgccgtcagcactcgacttgggtttgatcttttcaaagagctgaagaaaacaaatgatggcaacatcttcttttcccctgtgggcatcttgactgcaattggcatggtcctcctggggacccgaggagccaccgcttcccagttggaggaggtgtttcactctgaaaaagagacgaagagctcaagaataaaggctgaagaaaaagaggtgattgagaacacagaagcagtacatcaacaattccaaaagtttttgactgaaataagcaaactcactaatgattatgaactgaacataaccaacaggctgtttggagaaaaaacatacctcttccttcaaaaatacttagattatgttgaaaaatattatcatgcatctctggaacctgttgattttgtaaatgcagccgatgaaagtcgaaagaagattaattcctgggttgaaagcaaaacaaatgaaaaaatcaaggacttgttcccagatggctctattagtagctctaccaagctggtgctggtgaacatggtttattttaaagggcaatgggacagggagtttaagaaagaaaatactaaggaagagaaattttggatgaataagagcacaagtaaatctgtacagatgatgacacagagccattcctttagcttcactttcctggaggacttgcaggccaaaattctagggattccatataaaaacaacgacctaagcatgtttgtgcttctgcccaacgacatcgatggcctggagaagataatagataaaataagtcctgagaaattggtagagtggactagtccagggcatatggaagaaagaaaggtgaatctgcacttgccccggtttgaggtggaggacggttacgatctagaggcggtcctggctgccatggggatgggcgatgccttcagtgagcacaaagccgactactcgggaatgtcgtcaggctccgggttgtacgcccagaagttcctgcacagttcctttgtggcagtaactgaggaaggcaccgaggctgcagctgccaccggcataggctttactgtcacatccgccccaggtcatgaaaatgttcactgcaatcatcccttcctgttcttcatcaggcacaatgaatccaacagcatcctcttcttcggcagattttcttctccttaagatgatcgttgccatggcattgctgcttttagcaaaaaacaactaccagtgttactcatatgattatgaaaatcgtccattcttttaaatgttgtctcacttgcatttccagtcttggccatcaaatcaatgatttaatgactccaataatgtgtgtgtttataaccatcctcgaaagtgaaatgtccttttctttgtgccatgcgtaaggtgagtcaaaccaaacctcattgataatctccctttggtttcctttgaaagtaaattggtatcttgtagttttgtgcacacgaaaggagagaaagtctctccagtaaagagtacgaactagtaattttggggggtctctctaattctggtattttgacatgttataatacgcaagtaaaataaaacaatagtttactcagctcatgttactattccccaacagatattgtggcaaatcacacataggaaagagaatttgggaatacagtagcaaaacataaattaaaactcaaatgccaggacaaaataaaacaatataccagatggagaggatgcccgtattttcatcttccattctaacattatccattgttagatgcataagcattttgatattgtgtaataaatgtggtatttgagaagataaatgatgtagttgatcagtattcctcctctatcacctttttagactttgtaaggtaaatatttggactaacttttagaaaagtttccctttttttctccatttacatttttctggtttttttttttttttgagtgaggtacgagtattaccaaatgatattttctgaagatgctttttggaaagctctgaatctatacctaatgctcttaattattggcttgtttcatttttttcctccagtttttaacaagatcacataactggcttatttttaacagctttgtcaaactacaatttacatgccgtaaaatgtacacactgtaattttataattcattgacttttagtaaatttctagcgttatgcatcgccacaatccagttttagaatatttccatgaccctaagaagtttcctcatgtctattaatattcccaatcctaggcaccactgagttgttttctgtctttataagtttttctttctacatcttatataaatggaatcataatacatgtagtattttgtgtctggcgtcttgcacttagcatggtgttcttgaggttcatctgttgtagtatgtattgatacttaatttttttattgccgaatactattccattgcatggaaaagacctattttatttctaggttcaccagttgagggacatttggattgttcccacttcttggctgttaggaataatgttgctctgaacatgtaaataaagatctttgtgttcacatatgttttcatttctgttggggagattcctaggctagaaattgctgggccatatgaaaaatcaatagttagctttgtaagaaacagtcaaactgttttccaacgtgacattttatattcccaccaggaatgtttaaaactagtgtcttcaaatcctcaccaacatccaggattgtgtctttatgattatagccatttttgtaggtacaaagtggcatctcatggtggttttaatttgcatttccataatatctaattaggttgagctttttttatgtgcttattggccatttgtttgactttgtttggtgaaatgtatacaaatcatttgctcatttttaatttgggttgtctgtcttgtcttctcattttattgagttaaatgagttcttaataatctctggcttacaagtccttaatttatcaaatatatgatacgtggacatttcctcata

SEQ ID NO: 174262 - DNA, 1020 bp, Artificial Sequence
  derived and/or modified sequence
atggacagcctgggcgccgtgagcaccagactgggcttcgacctgttcaaggagctgaagaagaccaacgacggcaacatcttcttcagccccgtgggcatcctgaccgccatcggcatggtgctgctgggcaccagaggcgccaccgccagccagctggaggaggtgttccacagcgagaaggagaccaagagcagcagaatcaaggccgaggagaaggaggtgatcgagaacaccgaggccgtgcaccagcagttccagaagttcctgaccgagatcagcaagctgaccaacgactacgagctgaacatcaccaacagactgttcggcgagaagacctacctgttcctgcagaagtacctggactacgtggagaagtactaccacgccagcctggagcccgtggacttcgtgaacgccgccgacgagagcagaaagaagatcaacagctgggtggagagcaagaccaacgagaagatcaaggacctgttccccgacggcagcatcagcagcagcaccaagctggtgctggtgaacatggtgtacttcaagggccagtgggacagagagttcaagaaggagaacaccaaggaggagaagttctggatgaacaagatcatcgacaagatcagccccgagaagctggtggagtggaccagccccggccacatggaggagagaaaggtgaacctgcacctgcccagattcgaggtggaggacggctacgacctggaggccgtgctggccgccatgggcatgggcgacgccttcagcgagcacaaggccgactacagcggcatgagcagcggcagcggcctgtacgcccagaagttcctgcacagcagcttcgtggccgtgaccgaggagggcaccgaggccgccgccgccaccggcatcggcttcaccgtgaccagcgcccccggccacgagaacgtgcactgcaaccaccccttcctgttcttcatcagacacaacgagagcaacagcatcctgttcttcggcagattcagcagcccctag

SEQ ID NO: 174263 - DNA, 1176 bp, Artificial Sequence
  derived and/or modified sequence
atggacagcctgggcgccgtgagcaccagactgggcttcgacctgttcaaggagctgaagaagaccaacgacggcaacatcttcttcagccccgtgggcatcctgaccgccatcggcatggtgctgctgggcaccagaggcgccaccgccagccagctggaggaggtgttccacagcgagaaggagaccaagagcagcagaatcaaggccgaggagaaggaggtgatcgagaacaccgaggccgtgcaccagcagttccagaagttcctgaccgagatcagcaagctgaccaacgactacgagctgaacatcaccaacagactgttcggcgagaagacctacctgttcctgcagaagtacctggactacgtggagaagtactaccacgccagcctggagcccgtggacttcgtgaacgccgccgacgagagcagaaagaagatcaacagctgggtggagagcaagaccaacgagaagatcaaggacctgttccccgacggcagcatcagcagcagcaccaagctggtgctggtgaacatggtgtacttcaagggccagtgggacagagagttcaagaaggagaacaccaaggaggagaagttctggatgaacaagagcaccagcaagagcgtgcagatgatgacccagagccacagcttcagcttcaccttcctggaggacctgcaggccaagatcctgggcatcccctacaagaacaacgacctgagcatgttcgtgctgctgcccaacgacatcgacggcctggagaagatcatcgacaagatcagccccgagaagctggtggagtggaccagccccggccacatggaggagagaaaggtgaacctgcacctgcccagattcgaggtggaggacggctacgacctggaggccgtgctggccgccatgggcatgggcgacgccttcagcgagcacaaggccgactacagcggcatgagcagcggcagcggcctgtacgcccagaagttcctgcacagcagcttcgtggccgtgaccgaggagggcaccgaggccgccgccgccaccggcatcggcttcaccgtgaccagcgcccccggccacgagaacgtgcactgcaaccaccccttcctgttcttcatcagacacaacgagagcaacagcatcctgttcttcggcagattcagcagcccctag

SEQ ID NO: 174264 - protein, 668 aa, Artificial Sequence
  derived and/or modified sequence
MELEVPDEAESAEAGAVPSEAAWAAESGAAAGLAQKKAAPTEVLSMTAQPGPGHGKKLGHRGVDASGETTYKKTTSSTLKGAIQLGIGYTVGHLSSKPERDVLMQDFYVVESIFFPSEGSNLTPAHHFQDFRFKTYAPVAFRYFRELFGIRPDDYLYSLCNEPLIELSNPGASGSLFYVTSDDEFIIKTVMHKEAEFLQKLLPGYYMNLNQNPRTLLPKFYGLYCVQSGGKNIRVVVMNNILPRVVKMHLKFDLKGSTYKRRASKKEKEKSFPTYKDLDFMQDMPEGLLLDADTFSALVKTLQRDCLVLESFKIMDYSLLLGVHNIDQHERERQAQGAQSTSDEKRPVGQKALYSTAMESIQGGAARGEAIESDDTMGGIPAVNGRGERLLLHIGIIDILQSYRFIKKLEHTWKALVHDGDTVSVHRPSFYAERFFKFMSNTVFRKNSSLKSSPSKKGRGGALLAVKPLGPTAAFSASQIPSEREEAQYDLRGARSYPTLEDEGRPDLLPCTPPSFEEATTASIATTLSSTSLSIPERSPSETSEQPRYRRRTQSSGQDGRPQEEPPAEEDLQQITVQVEPACSVEIVVPKEEDAGVEASPAGASAAVEVETASQASDEEGAPASQASDEEDAPATDIYFPTDERSWVYSPLHYSAQAPPASDGESDT

SEQ ID NO: 174265 - DNA, 2007 bp, Artificial Sequence
  derived and/or modified sequence
atggagcttgaggttcctgatgaggcagagagcgcagaggccggcgccgtgccatctgaagcagcatgggctgctgagagtggcgccgcagccggccttgcacaaaaaaaagccgctcccaccgaggtgctctctatgacagcacagcccggacccggtcatggcaaaaaactgggacatcgaggagtggatgcttcaggcgaaaccacatataagaagaccacgagttcgactctgaagggggcgatccagctaggcattggatatactgtcggacatttgtcaagcaaacctgaaagggatgtgcttatgcaggatttttacgtagtggaatccatttttttcccaagtgagggaagcaacttaaccccagcacaccactttcaagatttccgctttaaaacctacgctcccgtggcctttaggtacttccgagagctgttcgggatccgaccagacgattacctttatagcttatgcaatgagcctttgatagagcttagcaatcccggcgccagtggaagcctattctacgtcacctccgatgacgagtttattatcaaaaccgtaatgcacaaggaggctgaattcctgcagaaactgcttcctggatactacatgaaccttaaccaaaaccctaggaccctcctaccaaagttctatggcctgtactgcgtgcagtccggagggaagaatattagagttgtcgtgatgaataacattctcccccgagtagtcaaaatgcacctgaagttcgacttgaaaggctctacttacaagcggcgggccagcaagaaggaaaaggaaaaatcttttccgacttataaagacctggactttatgcaggacatgcccgagggtttgctgctcgacgccgatacattcagtgccctggtaaaaactcttcagcgcgactgcttggtcctggaaagctttaaaattatggactatagtctcctgctcggtgtgcacaatattgaccagcacgagcgggaacgccaggcacagggggcccaatcgacctccgatgagaaacgccctgtgggccagaaagccctgtattccactgctatggagtccatacagggcggtgccgcgcgcggagaagctatcgagagcgatgatactatgggaggaatcccagccgtgaacggaagaggagagcggctgctcctgcacataggaatcattgacattctgcagagctacaggtttatcaagaagctggaacacacctggaaggcccttgtgcacgatggtgatactgtctctgtccatcggccatcattttacgcagagcgattttttaagttcatgtcgaatacggtgttccgcaagaactcttccctcaaaagtagcccatcaaagaaagggaggggaggggcccttcttgctgttaagcctctaggccctaccgccgccttttccgcatcccagattccctctgaacgcgaagaagctcaatacgacctgagaggagcacggagttacccaaccctggaagatgaagggcgtccagatttactgccgtgtacaccgccctccttcgaggaggccacaacagccagtatcgccaccaccttgtcgtccacctccctgagcatacctgaacgatcccccagtgagacttccgaacagccacgctaccgtagaagaacacaatcatcgggccaggacggcaggccgcaggaagagccaccggccgaagaagacctgcagcaaatcaccgttcaggtggagccagcatgttcagtagagatagttgtgccgaaggaggaagacgcgggcgtggaggctagtccagctggggcgtctgccgcagtcgaagtggagacggcaagccaagcttcagatgaggagggggcacctgcctctcaagcctctgacgaggaggacgcacccgctactgatatttactttcccacagacgagagatcttgggtctattcccctctgcattattctgcgcaggctcctcccgctagcgacggagagagcgacacgtag

SEQ ID NO: 174266 - DNA, 2007 bp, Artificial Sequence
  derived and/or modified sequence
atggagctggaggtgcctgatgaagctgagagcgctgaggccggggctgtgcccagcgaggccgcctgggccgctgagagcggggctgctgctggcctggcccagaagaaggccgcccccacagaggtgctgtccatgacagcccagcccggccctggccacggcaagaagctgggccaccggggcgtggatgccagcggggagaccacctacaagaagaccaccagcagcaccctgaagggggccatccagctgggcatcggctacacagtgggccacctgagcagcaagccagagagagatgtgctgatgcaggacttctacgtggtggagagcatcttcttccccagcgagggcagcaacctgaccccagcccaccacttccaggacttccgcttcaagacctacgcccctgtggccttccgctacttccgggagctgtttggcatccggccagatgactacctgtacagcctgtgcaatgagcccctgattgagctgagcaaccctggggccagcggcagcctcttctacgtgaccagtgatgatgagttcatcatcaagacagtgatgcacaaggaggccgagttcctgcagaagctgctgcccggctactacatgaacctgaaccagaaccccaggaccctgctgcccaagttctacggcctgtactgtgtgcagagcggcggcaagaacatccgggtggtggtgatgaacaacatcctgccccgggtggtgaagatgcacctgaagtttgacctgaagggcagcacctacaagagaagagccagcaagaaggagaaggagaagagcttccccacctacaaggacctggacttcatgcaggacatgcctgagggcctgctgctggatgctgacaccttcagcgccctggtgaagaccctgcagagggactgcctggtgctggagagcttcaagatcatggactacagcctgctgctgggcgtgcacaacatcgaccagcacgagcgggagcggcaggcccagggcgcccagagcaccagtgatgagaagaggcctgtgggccagaaggccctgtacagcacagccatggagagcatccagggcggggccgcccggggggaggccattgaaagtgatgacaccatgggcggcatcccagctgtgaatggccgcggggagcggctgctgctgcacatcggcatcatcgacatcctgcagagctaccgcttcatcaagaagctggagcacacctggaaggccctggtgcatgatggagacacagtgtctgtgcaccggcccagcttctacgccgagcgcttcttcaagttcatgagcaacacagtgttcaggaagaacagcagcctgaagagcagccccagcaagaagggccggggcggggccctgctggccgtgaagcccctgggccccacagctgccttcagcgccagccagatccccagcgagcgggaggaggcccagtatgacctgcggggggcccggagctaccccaccctggaggatgagggccgcccagacctgctgccctgcaccccacccagctttgaggaggccaccacagccagcatcgccaccaccctgagcagcaccagcctgagcatccctgagaggagccccagcgagaccagcgagcagccccgctacagaagaaggacccagagcagcggccaggacggccggccccaggaggagcccccagctgaggaggacctgcagcagatcaccgtgcaggtggagcccgcctgcagcgtggagatcgtggtgcccaaggaggaggatgctggggtggaggccagccctgctggggccagcgctgctgtggaggtggagacagccagccaggccagtgatgaggagggcgccccagccagccaggccagtgatgaagaagatgccccagccacagacatctacttccccacagatgagaggtcctgggtgtacagccccctgcactacagcgcccaggcccccccagccagtgatggagagagtgacacctag

SEQ ID NO: 174267 - DNA, 2007 bp, Artificial Sequence
  derived and/or modified sequence
atggagctggaggtgcccgacgaggccgagagcgccgaggccggcgccgtcccctcagaggccgcctgggctgcagagtccggagcagctgcagggttagcccagaagaaggccgccccaaccgaggtgctgagtatgaccgcacaaccaggccccgggcatggcaagaaactggggcatcgcggcgtggacgcctccggagaaactacatataagaaaaccacgagtagcaccttgaagggcgccatccagctgggcataggatacacggttggacacctgagctctaagcccgaacgagatgtgctaatgcaggatttttacgtagtcgagtccatcttcttccccagcgaaggctccaatctcacacctgctcaccactttcaggacttccgcttcaagacttacgcaccagtggcctttcgctatttccgcgaactcttcggcatcagaccggatgactacttatattccctgtgtaatgagcccctgatcgagctctcaaatcccggtgcaagcggctcattgttctacgtgacctcagacgacgaatttatcatcaaaactgttatgcataaggaggctgaattcttgcagaagcttctgcccgggtattatatgaacctgaaccagaacccacgcaccttattgccaaagttttatggactgtactgtgtccagagcggggggaaaaacatcagggttgtggtgatgaataacatcctacctcgagtagtgaagatgcatttgaagtttgatctcaagggctcaacatataaacgcagggcatctaagaaggaaaaagaaaaatcctttcctacttacaaggacctggactttatgcaggatatgccagagggcctcttgctggatgcggacaccttctccgctctcgtgaaaaccctgcagagagactgtctggtgctggagagttttaagatcatggattactctctcctcctaggcgtgcacaatattgaccagcacgagcgcgagaggcaggcgcagggagctcagtccacatcggatgagaagcggcccgtgggccaaaaggcactttactcaactgcaatggagagtatccaaggcggtgccgcgcgcggggaggcaatcgagagcgacgacacaatgggaggtatcccagctgttaatggacgtggggaacggctccttttacacatcgggataatcgacatcctgcagtcctaccgtttcatcaagaaattggaacacacatggaaggccttggttcatgacggggacacagtgtctgttcatagaccttcgttttacgccgagagattttttaaattcatgtcgaacaccgtattcaggaaaaattcctcattgaagagctctccttccaagaaaggcagaggcggtgcccttctggccgtgaagcccctggggccaacagcagcgttctccgcttctcaaattccctcagagcgggaagaagctcaatacgatctaaggggagctaggtcatatcccacactggaagacgagggccgacctgatttgttgccttgcactccacccagcttcgaggaggccacaacggcctcaatcgctacaacgctcagtagcacgtctctgagtatcccggaacgctcaccctccgaaaccagcgaacagcccaggtatcgcaggcgaactcaatcgtccggacaggacggacgcccccaggaagaaccgcctgcagaggaagatttgcagcagatcacggttcaggtcgagccagcttgtagtgtcgagatcgtcgtacctaaggaagaagacgcaggggttgaggcctcccccgccggcgcctccgctgcggtcgaagtcgaaaccgcatcccaggcgagcgatgaggaaggagctccagctagtcaagcttcagatgaggaagatgccccggcgaccgacatctacttcccaacagacgagcgtagctgggtttactcaccactccactactccgcccaagctcctcccgccagcgatggcgagagcgacacctag

SEQ ID NO: 174268 - DNA, 5047 bp, Artificial Sequence
  derived and/or modified sequence
gcggcggtcgcagctcgggtccccctcgggcgcccccgccgccgtccgcgcgcggccatggagctggaggtaccggacgaggcggagagcgctgaggcgggggccgtgccctcggaggcggcgtgggcggcagagagcggggcggcggcaggtttggctcagaagaaggcggccccaacagaggttctgtccatgacggcacagccgggccctggccatgggaagaagttgggccatcgaggtgtggacgcatccggcgaaaccacctacaagaagaccacctcctccaccctgaagggtgccatccagctgggcatcggctacaccgtgggccacctgagctccaagcccgaacgcgacgtgctcatgcaggacttctacgtggtggagagcatcttcttccccagcgaaggcagcaacctcacccccgcccaccacttccaggacttccgcttcaagacctatgcacctgtcgccttccgctacttccgggagctctttgggatccggccagatgattacttgtactccctgtgcaatgagccgctgatcgagctgtccaacccgggcgccagtggctccctcttctacgtcaccagcgacgacgagttcatcatcaagaccgtcatgcacaaggaggccgagttcctgcagaagctgctccctggctactacatgaacctcaaccagaacccgcggacgctgctgcccaagttctatgggctgtactgcgtgcagtcggggggcaagaacatccgcgtcgtggtcatgaacaacatcctgccccgcgtggtcaagatgcacctcaagttcgacctcaagggctccacctacaagcggcgcgccagcaagaaggagaaggagaagagcttccccacctacaaggacctggacttcatgcaggacatgcccgaggggctcctgctggacgccgacaccttcagcgccctggtcaagacgctgcagcgggactgcctggtcctggaaagtttcaagatcatggactacagcctgctgctgggcgtgcacaacatcgaccagcacgagcgcgagcggcaggcgcagggcgcccagagcacctcagatgagaagcggcctgtgggccagaaggcgctctactccacggccatggagtccatccagggtggcgccgcgcgcggggaggccatcgaatcggatgacacgatgggcgggatccccgctgtgaacggccgcggggagcggctgctgctgcacattggcatcatcgacatcctgcagtcctacaggttcatcaagaaactggagcacacctggaaggccctcgtccacgatggggacacggtgtccgtccaccgccccagcttctatgccgagcgctttttcaagttcatgagcaacacggtctttcggaagaactcctccctgaagtcctcgccctccaagaaggggcgcggcggagccttgctagctgtgaaaccgctggggcccaccgctgccttctcggccagccagatccctagcgagcgggaggaggcccagtacgacctgcggggggcccgcagctaccccacgctggaggacgaaggccggcccgacctcctgccctgcacgccaccttctttcgaagaagccactacagcctccattgccacgactctgtcatccacatccctctccattcctgagcggtccccctcggagacgtcggagcagccgcggtacaggcggcgcacacagtcgtctggacaggatggcaggccgcaggaggagccacccgcggaagaggatctgcagcagattacagtgcaggtggagcctgcgtgcagcgtggagattgtggtccccaaagaggaggacgcaggggtggaggcttccccggccggtgcctctgctgctgttgaagtagaaactgccagccaggcctcagacgaggagggcgcacctgccagccaggcctcggacgaggaggacgcgcccgccaccgacatctactttcccaccgatgagaggagctgggtgtactccccgctccactatagcgcccaggcccccccggcctccgacggcgagagcgacacataatttctatgcagcccccgacccagagccgagctccacttctgctccggctgcccccgaaggcgctgcccaccccgctgaggcccagagctcgggagatgcccgcctcgccgccccaccggacctcgtcctccccctgcacggatgccgacggccgggcccctccccgacaagcctcccagggccccggcaccccggtcggcagcctgcccctgtgagacccaccctcccgagcggccaatcgcatttgagtccttatttggcacagagacggaagcacgtgtgtgccgttttaggaaaagaacaaaaaagacacaaacaaaccaaccagagggagaagagcccctgcccactgcactctttggttctctgctgtgcctgcctgtgtcctgaggaagaagccaggctgttcgcggtggcctctggggacctgagccccgggggccccatcggcctgcagaggggacggctggggtcccgagcaactctgcctccatccacgtgggaagcggaccctcctgccctcagcttgggtttgggggcctcagtgcaggacatctggcctgaacatcgactgtggggacagccctcgccctgccaagcactgcggccactcagcagctatgttcccgccgcagtggggccctgacgcccacctcccaggtgcccctcgagcaaaaacctctggcgcctccaatccagacccaccacagctggagggccaggcctcctcttccccaggctgccacccacgctggcggagctcagggctggggacttgtccttctcttccaacgtaggccactcagcaactggcatggagggcccaggcaacggagacgttttctccatggcaggacagagcgggaggccgggccttgggccacaggagaccagctcagggcggaaggtcaggctccccgccccctccacgtggagacatggcctagggggccaggcccggctccacaggagtctccttcaggactggtgtggatgtccgccgcctctttcttgtttaagtgatgtgatgtctccgaggaggggagagaagactttgtttccgactcatcaccctccaagagggcagcgctcccagtggtgggactcagcccagactgccctggggcagcttcctgggcccgctgcgctcagagggtgctggttggaggccagagctcggcagagtcacccaccctgcccttccccaggacccctgagaggggcttattggtgatggctgtgggaatcccccacttccaagatgtgcccaggatgtgaggagctggagtggaagctgcacctttgggaagaattcctctccagacctggcagagcctggtgtggggtctgagacggccggagaacctcccaggcagggctctgtgttttgtctgttacaacctccgtatgacgccacgccacccgctgttcacgtcccgtcggcctcctgcacagcccacacgctgcgcccggaaggcccctgctgtggagaagccggacccatccccgaggtccccagcgaggacacacactccacgagagcagcccctccactctgcccaggagaggggccgaccctcctcgggaaccggccagccgcgtggctcccagcatccatcaggacaagcccacgtggggtcctccctgcgtgctcagagggtctgtccagccctgggaagcgaccttggcctcagttcacagcctggtgctcatctgctggcaccgggcatccacccatcagcccccgccctgtccctccgaaggacacccagcaggcaccccccggggaggcaggggcagaggtcagaaggggtgtctgggacctggatggccagcagggacaggggcattgtcatctcaaaggcccaacccccagaggccacaccagtcctcccagggagtcctcgagtcgccctgcccagagccctggcaccagagacgccaagagcctgtggggtgactcggagcagcaggtgtggccccgggcgggcggcaccgcgtccagggcagcctccctccgctgagtgacacgggacaccagtgcccggccgacgcgcctttgcaggagaaatgtgcaaacctctgtggataccatttcatttccattcttgtgttgtctccaaggcccttttggagatatacttggtgttggttgtgttttttggttccttttcagagaactgtaaaccgaggctgacgtgctccactgactgtgccgaggggcgggggcaggaggacggcaagacctatttataatatttagcgaactcggtctccctcagatcccccgcgagggaggctgctggacccaccccgctgtcccccatgatagaagtctgtaaataccttggtgaccaatgcccacttcccctcctgggtcacctctgatggctgctgtccactgagaacgtgggcagtgtccaaattcctgtactgtaaagactaaaaggcgtttgctctgagactgacaaggcggaaacttccatgtgtctcctgccaggctctgtccccctacgccatcccgacacgtccccgttcccccgaaacctggctcagtgcaatactcccattgccatggggtccttcaccatggtactgtctccacagccctcagtccccaccccaggagaggcgcctgccacctcctcctcatctccggtggttcaatcgctccgcctgtccccaacccagtcccatttttatggccaaactgattctgaaacaaaatgaaactgcaaacctcgtgtgtcttaactccccccagggatgccactccattcctccgccccgtggtctggtgcgtgacaatccaaagcgccgagacgagggtgctgtgtccctcaaacccagagtggtgggcgcctctgaaaccatacagccactcctggccccaaacactggtttgcatcccaggttcctcgcccacctacccccgccacaccccgtctttttagagatctctctaataaatcgggtaataagc

SEQ ID NO: 174269 - DNA, 2007 bp, Artificial Sequence
  derived and/or modified sequence
atggagctcgaagtgcctgatgaagccgaaagcgcagaagccggagctgtgccgagcgaagccgcttgggcagcagagtctggagcagccgctggcctggcccaaaaaaaagcggcaccgacagaggtcctgagtatgaccgcccagcccggaccagggcatggaaagaaactgggccacagaggggtcgatgcctcgggggaaacgacctacaaaaagactacatcgagcactctgaagggcgcaattcagctgggcattggctacacggtgggccacctgagttccaaacccgaaagggacgtgctgatgcaagatttctacgttgtagagagcatcttttttccttctgaaggctccaacctcacaccagctcaccatttccaggacttccggttcaaaacctacgcccctgtggcttttagatacttcagagaactttttggcattaggcccgacgattatctttattccctgtgcaatgaaccgctcatagaactttcaaacccgggagcaagtggctcactattctacgtgactagtgacgacgaattcataataaagaccgtgatgcataaggaagcagaattcctacagaagttgctaccagggtattacatgaatctgaaccagaacccgaggacgctcctccccaagttctatgggttgtactgcgttcaatccggcggaaaaaatatccgagtggtggtgatgaacaacattctgcccagagtggttaaaatgcacctgaagttcgacctgaagggatctacttacaagcgtagggcttcaaaaaaagagaaggagaagagtttccctacctataaggacctggattttatgcaggacatgccagaaggtctcctccttgatgccgataccttttcagccctggttaagacgttgcagcgcgactgtctggtgctcgagtccttcaaaataatggactactccctgttgttaggcgtccacaatatagaccagcatgagcgagaaaggcaggcccaaggtgctcagagcaccagcgatgaaaagaggcccgttggccagaaagcactgtatagcactgccatggaatctatacaaggcggtgctgcgcgtggggaagccatagagtctgacgacacaatgggagggattccggctgtgaacgggagaggcgagcggctcctgctccatattggcattattgatattctacagagttacagatttataaagaaattggagcacacctggaaggctctggttcatgacggagatacagttagcgtccaccggcctagcttctacgcggaaagattcttcaagttcatgtctaacactgtgttccggaagaactccagcttgaaaagcagcccttctaaaaagggtagaggcggagcgcttcttgccgtcaagcccctgggacctactgccgcattctccgcttcccagattccgtccgagagagaggaggcccagtatgacttgcgtggagccaggagctaccccaccctggaagacgaagggcgaccagacctactgccctgcactccgccatcattcgaagaggcaacaaccgcctcaattgctacgactttgtcttccacctccctaagtattccagagcgcagtcccagcgagacctccgaacagccaaggtatcgacgacgaactcagagcagcggccaggacggacgcccacaggaggaacctcctgcggaggaggatcttcaacagataaccgtgcaggtcgagcctgcctgtagtgtggagatagtggtgccaaaagaggaggatgccggagtcgaagctagcccggcaggcgcatcagccgctgtggaggtggagaccgcctcacaggccagtgacgaagagggagcccctgcctcccaagcctctgacgaagaggatgcgcctgccacggatatatattttccgacagacgaacggtcctgggtgtattcacctctccactattccgctcaggcccctcccgcaagcgatggagaatccgatacatag

SEQ ID NO: 174270 - DNA, 2007 bp, Artificial Sequence
  derived and/or modified sequence
atggagctggaggtgcccgacgaggccgagagcgccgaggccggcgccgtgcccagcgaggccgcctgggccgccgagagcggcgccgccgccggcctggcccagaagaaggccgcccccaccgaggtgctgagcatgaccgcccagcccggccccggccacggcaagaagctgggccacagaggcgtggacgccagcggcgagaccacctacaagaagaccaccagcagcaccctgaagggcgccatccagctgggcatcggctacaccgtgggccacctgagcagcaagcccgagagagacgtgctgatgcaggacttctacgtggtggagagcatcttcttccccagcgagggcagcaacctgacccccgcccaccacttccaggacttcagattcaagacctacgcccccgtggccttcagatacttcagagagctgttcggcatcagacccgacgactacctgtacagcctgtgcaacgagcccctgatcgagctgagcaaccccggcgccagcggcagcctgttctacgtgaccagcgacgacgagttcatcatcaagaccgtgatgcacaaggaggccgagttcctgcagaagctgctgcccggctactacatgaacctgaaccagaaccccagaaccctgctgcccaagttctacggcctgtactgcgtgcagagcggcggcaagaacatcagagtggtggtgatgaacaacatcctgcccagagtggtgaagatgcacctgaagttcgacctgaagggcagcacctacaagagaagagccagcaagaaggagaaggagaagagcttccccacctacaaggacctggacttcatgcaggacatgcccgagggcctgctgctggacgccgacaccttcagcgccctggtgaagaccctgcagagagactgcctggtgctggagagcttcaagatcatggactacagcctgctgctgggcgtgcacaacatcgaccagcacgagagagagagacaggcccagggcgcccagagcaccagcgacgagaagagacccgtgggccagaaggccctgtacagcaccgccatggagagcatccagggcggcgccgccagaggcgaggccatcgagagcgacgacaccatgggcggcatccccgccgtgaacggcagaggcgagagactgctgctgcacatcggcatcatcgacatcctgcagagctacagattcatcaagaagctggagcacacctggaaggccctggtgcacgacggcgacaccgtgagcgtgcacagacccagcttctacgccgagagattcttcaagttcatgagcaacaccgtgttcagaaagaacagcagcctgaagagcagccccagcaagaagggcagaggcggcgccctgctggccgtgaagcccctgggccccaccgccgccttcagcgccagccagatccccagcgagagagaggaggcccagtacgacctgagaggcgccagaagctaccccaccctggaggacgagggcagacccgacctgctgccctgcaccccccccagcttcgaggaggccaccaccgccagcatcgccaccaccctgagcagcaccagcctgagcatccccgagagaagccccagcgagaccagcgagcagcccagatacagaagaagaacccagagcagcggccaggacggcagaccccaggaggagccccccgccgaggaggacctgcagcagatcaccgtgcaggtggagcccgcctgcagcgtggagatcgtggtgcccaaggaggaggacgccggcgtggaggccagccccgccggcgccagcgccgccgtggaggtggagaccgccagccaggccagcgacgaggagggcgcccccgccagccaggccagcgacgaggaggacgcccccgccaccgacatctacttccccaccgacgagagaagctgggtgtacagccccctgcactacagcgcccaggccccccccgccagcgacggcgagagcgacacctag

SEQ ID NO: 174271 - protein, 131 aa, Artificial Sequence
  derived and/or modified sequence
MEMGKWIHLELRNRTPSDVKELFLDNSQSNEGKLEGLTDEFEELELLNTINIGLTSIANLPKLNKLKKLELSSNRASVGLEVLAEKCPNLIHLNLSGNKIKDLSTIEPLKKLENLESLDLFTCEVTNLNNY

SEQ ID NO: 174272 - DNA, 396 bp, Artificial Sequence
  derived and/or modified sequence
atggagatgggtaagtggatccatctggagcttaggaaccggacccctagcgacgttaaggagctcttccttgacaacagccagagcaacgagggtaaactcgagggcctcaccgatgaatttgaggagttggagctcctcaacaccatcaatattggcctgacttccatagccaatctgccaaagctgaacaaacttaaaaaactggaactgagcagcaacagagcctcagtcggactggaagtgctagcagagaaatgccctaatcttattcacctgaacctctccgggaacaagatcaaggacctcagtacaatcgagccactgaagaaactggaaaacctggaatcccttgatctctttacctgtgaagttacaaatcttaacaattactag

SEQ ID NO: 174273 - DNA, 396 bp, Artificial Sequence
  derived and/or modified sequence
atggagatgggcaagtggatccacctggagctgaggaacagaacacccagtgatgtgaaggagctgttcctggacaacagccagagcaatgaaggcaagctggagggcctgacagatgaatttgaggagctggagctgctgaacaccatcaacatcggcctgaccagcatcgccaacctgcccaagctgaacaagctgaagaagctggagctgagcagcaacagagcctctgtgggcctggaggtgctggccgagaagtgccccaacctgatccacctgaacctgagcggcaacaagatcaaggacctgagcaccatcgagcccctgaagaagctggagaacctggagagcctggacctcttcacctgtgaggtgaccaacctgaacaactactag

SEQ ID NO: 174274 - DNA, 396 bp, Artificial Sequence
  derived and/or modified sequence
atggagatgggcaagtggatccacctggagctgcggaaccggaccccatcagatgtgaaagagctttttcttgacaacagtcagagtaatgagggcaaactcgagggactgacggacgagttcgaagagctggaactgctcaatacgattaacatcggactcaccagtatagccaacctgcctaaattgaacaaacttaagaaattagagttatcgagtaatcgggcttcagtggggctggaagtgctggccgagaaatgccccaatctgattcatcttaacctgtctggtaataagattaaggacctatccaccatcgagcctcttaagaagctagagaatctggagtctctggacttgtttacctgcgaagtgacaaatcttaataattattag

SEQ ID NO: 174275 - DNA, 396 bp, Artificial Sequence
  derived and/or modified sequence
atggagatggggaaatggattcacctggagttacgcaaccgtaccccctcagatgtgaaagagctcttcttagataactcccagtccaatgagggcaaactggaaggattaactgatgagtttgaggaactcgagttgcttaacacaatcaatatcggtttgacaagtatcgccaacctgcctaagctgaacaaactcaaaaagttagagctctcatcaaacagagccagcgtgggcctggaggtcctggcagaaaagtgtcccaatctaatccacctcaacctgtccgggaataagattaaagacctatctaccatcgaacctctgaaaaagctggaaaatctcgagtcactggatttgtttacctgtgaagtgactaatcttaacaactattag

SEQ ID NO: 174276 - DNA, 396 bp, Artificial Sequence
  derived and/or modified sequence
atggagatgggcaaatggattcatttagagctgcggaacaggacgccctccgatgtgaaagaacttttcctggacaacagtcagtcaaatgaaggcaaattggaaggcctcacagatgaatttgaagaactggaattattaaatacaatcaacataggcctcacctcaattgcaaacttgccaaagttaaacaaacttaagaagcttgaactaagcagtaacagagcctcagtgggcctagaagtattggcagaaaagtgtccaaacctcatacatctaaatttaagtggcaacaaaattaaagacctcagcacaatagagcccctgaaaaagttagaaaacctcgagagcttagaccttttcacttgcgaggtaaccaacctgaacaactactga

SEQ ID NO: 174277 - DNA, 396 bp, Artificial Sequence
  derived and/or modified sequence
atggagatgggcaagtggatccacctggagctgagaaacagaacccccagcgacgtgaaggagctgttcctggacaacagccagagcaacgagggcaagctggagggcctgaccgacgagttcgaggagctggagctgctgaacaccatcaacatcggcctgaccagcatcgccaacctgcccaagctgaacaagctgaagaagctggagctgagcagcaacagagccagcgtgggcctggaggtgctggccgagaagtgccccaacctgatccacctgaacctgagcggcaacaagatcaaggacctgagcaccatcgagcccctgaagaagctggagaacctggagagcctggacctgttcacctgcgaggtgaccaacctgaacaactactag

SEQ ID NO: 174278 - protein, 801 aa, Artificial Sequence
  derived and/or modified sequence
MHHRMNEMNLSPVGMEQLTSSSVSNALPVSGSHLGLAASPTHSAIPAPGLPVAIPNLGPSLSSLPSALSLMLPMGIGDRGVMCGLPERNYTLPPPPYPHLESSYFRTILPGILSYLADRPPPQYIHPNSINVDGNTALSITNNPSALDPYQSNGNVGLEPGIVSIDSRSVNTHGAQSLHPSDGHEVALDTAITMENVSRVTSPISTDGMAEELTMDGVAGEHSQIPNGSRSHEPLSVDSVSNNLAADAVGHGGVIPMHGNGLELPVVMETDHIASRVNGMSDSALSDSIHTVAMSTNSVSVALSTSHNLASLESVSLHEVGLSLEPVAVSSITQEVAMGTGHVDVSSDSLSFVSPSLQMEDSNSNKENMATLFTIWCTLCDRAYPSDCPEHGPVTFVPDTPIESRARLSLPKQLVLRQSIVGAEVGVWTGETIPVRTCFGPLIGQQSHSMEVAEWTDKAVNHIWKIYHNGVLEFCIITTDENECNWMMFVRKARNREEQNLVAYPHDGKIFFCTSQDIPPENELLFYYSRDYAQQIGVPEHPDVHLCNCGKECNSYTEFKAHLTSHIHNHLPTQGHSGSHGPSHSKERKWKCSMCPQAFISPSKLHVHFMGHMGMKPHKCDFCSKAFSDPSNLRTHLKIHTGQKNYRCTLCDKSFTQKAHLESHMVIHTGEKNLKCDYCDKLFMRRQDLKQHVLIHTQERQIKCPKCDKLFLRTNHLKKHLNSHEGKRDYVCEKCTKAYLTKYHLTRHLKTCKGPTSSSSAPEEEEEDDSEEEDLADSVGTEDCRINSAVYSADESLSAHK

SEQ ID NO: 174279 - protein, 75 aa, Artificial Sequence
  derived and/or modified sequence
MHHRMNEMNLSPVGMEQLTSSSVSNALPVSGSHLGLAASPTHSAIPAPGLPVAIPNLGPSLSSLPSALSLMLPMG

SEQ ID NO: 174280 - DNA, 4225 bp, Artificial Sequence
  derived and/or modified sequence
gcagagggtgcggcccagaggaggccgcgggccgggaagggccgggcgggacgggaaacgttagggcagcggcccccggggtgagggggccgagcggacgggcagggccccgaggcgaactctgcccggatgaggaacaaagcagtggggcaggcgcgtgcgcccccagcgcagctggcaggttgggcagcccccttcccgaagcttctggacggaaggccccaggtgttccccgagatgccccaacccgtggcggggtgcacggccaccggccctcgggagaagttgggcggccccgggcgaccccggggacgagtggccgcgtcggtgcagcggttgtgagcaagatgtggtagcacgtgaccctggaacgcaaaccctgatgcctgttccccaccacccgagcgctcctttctctgatatttggccccaagccgatgcatcacaggatgaatgaaatgaacctgagtccagtggggatggagcagctgacttcatcctctgtgagcaatgccttgccagtctcaggaagtcacctgggattggctgcctcacccactcacagtgccatccctgccccaggcctcccagtggcaattccaaacctgggtccctccctgagctctctgccttctgctctgtctttaatgctaccaatgggtattggggatcgaggggtgatgtgtgggttacctgaaagaaactacaccctacctccaccaccttaccctcacctggagagcagttatttcagaaccattctacctggcattttatcttatttagctgacagaccacctccacagtacatccaccctaactctataaatgttgatggtaatacagcattatctatcaccaataacccttcagcactagatccctatcagtccaatggaaatgttggattagaaccaggcattgtttcaatagactctcgctctgtgaacacacatggtgcccaaagtcttcatcccagtgatggccatgaggtggccttggacacagcaatcactatggagaacgtttctagggttaccagcccaatttcgacagatggaatggcagaggagcttacgatggacggtgttgcaggcgagcattcccaaatcccaaatggctccagaagtcatgaacctctgtctgtggattctgtgagcaacaaccttgcagcagacgctgtaggacatggtggtgtgatacccatgcatgggaatggcctggagctccctgtggtcatggagacagaccacattgcaagtcgggtcaatggcatgtctgacagtgccctcagtgactccattcacactgtggccatgagcaccaactctgtaagcgtggcactctctacctcacacaaccttgcctccctagaatctgtttccctccatgaagttggcctcagcctagaacctgtggctgtctcctccatcacccaggaggttgctatggggacaggtcatgtagatgtatcttcagacagtctttcttttgtatcaccttcactgcaaatggaagactccaattcaaacaaggagaacatggcaaccttgtttacaatttggtgtactctgtgtgaccgcgcctatccctcggactgtcccgaacatggaccagtgacttttgttcctgacactccaatagagagcagagcaaggctttctctcccaaagcagcttgttctccgtcagtcaattgtgggagcagaagttggtgtatggactggagaaaccattcctgtgcggacttgctttggacctctaattggccagcagagtcactccatggaagtagcagaatggacagacaaggcagttaaccatatctggaagatataccacaatggtgtcctagaattctgcatcattacaactgatgaaaatgaatgtaattggatgatgtttgtgcgcaaagccaggaaccgggaagagcagaatttggtggcttatcctcatgatggaaaaatctttttctgcacctcacaagatatccctcctgaaaatgaactgcttttttattatagccgagattatgctcaacagattggtgttcctgaacacccagatgtgcatctctgtaactgtggcaaggagtgcaattcttacacagagttcaaagcccatctgaccagccacatccataaccatcttcctacccagggacatagcggcagccatgggccaagtcacagcaaagaaaggaagtggaagtgctcaatgtgcccccaagcttttatctctccttccaaacttcatgtccactttatgggtcacatgggtatgaagccccacaagtgtgatttctgtagcaaggcttttagtgatcccagcaacctgcggacccacctcaagatacatacaggtcagaagaactacaggtgtaccttgtgtgacaagtctttcacccagaaggctcacctggagtcccacatggttatccacactggggagaagaatcttaagtgtgattactgtgacaagttgtttatgcggaggcaggacctcaagcagcacgtgctcatccacactcaagaacgccagatcaagtgtcccaagtgtgataagctgttcttgagaacaaatcacttaaagaagcatctcaattctcatgaaggaaaacgggattatgtctgtgaaaaatgtacaaaggcttatctaaccaaataccatctcacccgccacctgaaaacctgcaaagggcccacctccagttcgtcagcaccagaggaggaagaagaggatgactcagaagaggaagatctagcagactctgtggggacagaagactgtaggattaacagtgctgtgtattcagcggatgagtctctttctgcacataaataaaaggaaaagaaacaagcaattttggatgaaaatgcaaatggaaaaatacacataaccagttatctactataatggtttttatataaaatggttcctgatttattttcagccagtaatcaaaacagactgggaatgaataaagcacttacagaagagtatcctaatgaaaacactttaaaacagattgggaaaactgagcatgtgtcctgttttaagtggtggactgggagggaagtgtcaacttctgaggtctttatttacatgataatctgggagatgcatttatgcctgaatcaaagctgccttctgctcaaacaaatcagatttatttcacattcttccattattccattttcctgctggtcctgtgacttggtaacattctaaacggtccttgccccatagccatcctgattgctgatagtgttttatgcagactcttgtgacttatactcaccacagaatggattgggacacagcagcataagtgtgctacttggcagctagtaagtttaaagcaggacctgccttaactgctcctggccacttggaagtttagggtagatcttgttttccaaagtttcggcaggtgcctggagggcaaataaaaaagcagcagtcagtcagtagtcagtgatggagagaacaagaggagagatgcctggcctctgcccaagaaattagctttgatggaagcctgagcaagtcacctggttattgtaacgtggagatctttgtaggtttagacatggctccctgtctccagtaaacatccagccattcagacaaagggggcctggagatacagagagcccaaataatgcctgctggattgtctcctgatgagtacatgtggactcacctgaggaagggaaggaagggaataatcttttatgtttcatttaccttatgaaaagtgttaaaacattgccaactcaaaataacattatttaatgcatgtgcaaagttaggtcttcccagttgtctcagtgctgaggaacctcatcagagaagcatggaagatgccaaaggatttttggaaggtaaagaaggctgaatagtgaccacatgggcctgttttcagggtcccagcttagttaagtcacccatgcacctggtcattgtgtctcccatgcacatccagcgtttctcagaagcagacccacccttaagttgacaggattgatggaacatgctctcctgctcaaggcacaacctctgggctggagtagaggactctggtgggaaggttttgctgctaatgtatttatggaatgaatgtatttcattcaaatctgtattcctctaggaaggattaaaattaaacttttttaaaatacaggaaaaaaaaaaaaaaaaaaaaaaaaaaaaaaaaaaaaaaa

SEQ ID NO: 174281 - DNA, 2406 bp, Artificial Sequence
  derived and/or modified sequence
atgcatcacaggatgaacgagatgaatctgagtcccgttggaatggaacaactgactagtagcagcgtttccaatgcccttcctgtttctgggagccatctcgggttggcggcaagtccaacacattccgccatccctgccccggggctgccagtggcgattcctaacttggggccctccttgtctagcctgcccagcgctctgtcactcatgctgccaatgggaataggtgaccggggagtgatgtgcggccttcccgagagaaattatacgctgcctccaccaccctatccccacttggagagtagctattttcgaaccatcctccccggaattctttcttatctggccgatagacctccacctcagtatatccaccctaactcaattaatgtggacggaaatactgccctcagtattacaaacaatcccagcgcactggacccttatcaatcaaatggaaatgtggggttggagccaggaattgtgtctatcgattcccgcagcgtgaatacacatggggcacagtcccttcatccatctgacggacatgaggtcgctctggacacagcgatcactatggagaatgtcagtagggttacatctcctatctcaacggatggcatggcagaagaacttaccatggacggtgtggcgggagagcactcacagatcccaaatggaagcagaagtcatgagccactgagcgtggacagtgtgtccaataatctggctgccgacgcggtgggtcacggtggggttatcccgatgcatggaaatggcctcgaactgcccgttgttatggagacagatcacattgcctctagggtcaacggtatgtccgattctgccctgtctgacagcatccacacagtggccatgtcaacaaacagtgtgagcgtggcgttgtccacatcccacaaccttgccagtctggagtctgtttctctgcatgaagtgggcctttcccttgagcctgtagctgtgtcatctatcacccaggaggtcgcaatgggcaccggccatgtggatgtcagttccgatagtctgtctttcgtgtccccttcattacaaatggaggactccaatagtaataaggaaaatatggctacacttttcacaatctggtgtactctttgtgatcgcgcttacccctccgactgtcctgagcatggccccgtgaccttcgtccccgatacacccattgaaagtcgggcacgtctgtctcttccaaaacagctggtattgcgccagtctatcgtgggcgcggaagtgggtgtctggacgggcgaaaccatcccagttcggacatgcttcggtccattaatcggccagcagtcccatagcatggaggtggccgaatggacagacaaagccgtcaatcatatctggaagatttaccataatggtgtgctcgagttttgcataatcacaacggacgagaacgagtgcaactggatgatgtttgtcagaaaggcgcgcaacagggaggaacagaatttagttgcgtacccgcacgatggcaagattttcttctgtactagccaggatataccacccgaaaatgagctgctgttctactactctcgcgattatgcccaacagatcggcgtacccgaacaccccgacgtccacctgtgtaactgcggaaaagagtgcaactcttacaccgagtttaaagcacatttaacttcccacatacacaaccacttgccgactcagggccacagcggatcacatgggccatctcattccaaagagcgcaagtggaagtgttccatgtgccctcaggcttttatctctcccagtaaattgcatgttcatttcatgggacacatggggatgaagccacataagtgtgatttctgtagtaaggcgttttcagatccttccaatctgagaacccacctgaagatccataccggacaaaaaaattatcgatgtaccctctgtgacaaatcttttacccagaaagcgcatctggagtctcatatggtaatccatactggggagaagaatctcaaatgtgactattgtgataagctgtttatgcggcggcaggacctgaaacagcacgtactgatccatacccaagagaggcagattaagtgcccgaagtgcgataaactgtttctgcgaaccaatcatttgaaaaagcacctgaactctcacgaagggaagagggactacgtctgcgagaaatgtactaaggcctacctgacaaaataccacctgacgcggcatctaaagacatgcaagggaccaacctcttcatcgtcagccccagaggaggaagaagaagacgacagcgaagaggaggatcttgccgacagtgtaggcactgaggattgtcggattaattcagctgtgtacagcgcggatgagtccctgtcggcccacaaatag

SEQ ID NO: 174282 - DNA, 228 bp, Artificial Sequence
  derived and/or modified sequence
atgcaccaccggatgaatgaaatgaatcttagtcccgtgggaatggaacaattaacaagcagcagtgtctcaaacgcattgcccgttagcggctcacacttaggcctggccgctagccccacgcatagcgccattcccgctcccggcttgcccgtcgccatccccaatctgggccccagcctgagcagtctgccctctgccctctcgctgatgctcccgatgggatag

SEQ ID NO: 174283 - DNA, 2406 bp, Artificial Sequence
  derived and/or modified sequence
atgcaccacaggatgaatgagatgaacctgagccctgtgggcatggagcagctgaccagcagctctgtgtccaatgccctgcctgtgtctggcagccacctgggcctggccgccagccccacccacagcgccatcccagcccctggcctgcctgtggccatccccaacctgggccccagcctgagcagcctgcccagcgccctgagcctgatgctgcccatgggcatcggggaccggggcgtgatgtgtggcctgcctgagaggaactacaccctgcccccaccaccctacccccacctggagagcagctacttccgcaccatcctgcccggcatcctgagctacctggccgaccggcccccaccccagtacatccaccccaacagcatcaacgtggatggcaacacagccctgagcatcaccaacaaccccagcgccctggacccctaccagagcaatggaaatgtgggcctggagcccggcatcgtgtccattgacagccgctctgtgaacacccatggagcccagagcctgcaccccagtgatggccacgaggtggccctggacacagccatcaccatggagaatgtgtcccgggtgaccagccccatcagcacagatggcatggccgaggagctgaccatggatggagtggccggggagcacagccagatccccaacggcagccgcagccatgagcccctgtctgtggacagcgtgagcaacaacctggccgcagatgctgtgggccatggaggagtcatccccatgcacggcaatggcctggagctgcctgtggtgatggagacagaccacatcgccagccgggtgaatggcatgtctgattctgccctgagtgacagcatccacacagtggccatgagcaccaacagcgtgtctgtggccctgagcaccagccacaacctggccagcctggagagcgtgtccctgcacgaggtgggcctgagcctggagcctgtggccgtgagcagcatcacccaggaggtggccatgggcaccggccacgtggatgtgtccagtgacagcctgagctttgtgagccccagcctgcagatggaggacagcaacagcaacaaggagaacatggccaccctcttcaccatctggtgcaccctgtgtgaccgggcctaccccagcgactgcccagagcacggccctgtgacctttgtgcctgacacccccatcgagagccgggcccggctgagcctgcccaagcagctggtgctgcggcagagcatcgtgggcgctgaggtgggcgtgtggacaggagagaccatccctgtgaggacctgcttcggccccctgattggccagcagagccacagcatggaggtggccgagtggacagacaaggctgtgaaccacatctggaagatctaccacaatggagtgctggagttctgcatcatcaccacagatgaaaatgaatgcaactggatgatgtttgtgaggaaggccaggaaccgggaggagcagaacctggtggcctacccccatgatggcaagatcttcttctgcaccagccaggacatccccccagaaaatgagctgctcttctactacagccgggactatgcccagcagatcggcgtgcctgagcacccagatgtgcacctgtgcaactgtgggaaggagtgcaacagctacacagagttcaaggcccacctgaccagccacatccacaaccacctgcccacccagggccacagcggcagccacggccccagccacagcaaggagaggaagtggaagtgcagcatgtgcccccaggccttcatcagccccagcaagctgcacgtgcacttcatgggccacatgggcatgaagccccacaagtgtgacttctgcagcaaggccttcagtgaccccagcaacctgcggacccacctgaagatccacacaggccagaagaactaccgctgcaccctgtgtgacaagagcttcacccagaaggcccacctggagagccacatggtgatccacactggagagaagaacctgaagtgtgactactgtgacaagctgttcatgaggcggcaggacctgaagcagcacgtgctgatccacacccaggagcggcagatcaagtgccccaagtgtgacaagctgttcctgcggaccaaccacctgaagaagcacctgaacagccatgagggcaagagggactatgtgtgtgagaagtgcaccaaggcctacctgaccaagtaccacctgaccaggcacctgaagacctgcaagggccccaccagcagcagcagcgcccctgaggaggaggaggaggatgacagcgaggaggaggacctggccgacagcgtgggcacagaggactgccgcatcaacagcgctgtgtacagcgcagatgagagcctgagcgcccacaagtag

SEQ ID NO: 174284 - DNA, 228 bp, Artificial Sequence
  derived and/or modified sequence
atgcaccacaggatgaatgagatgaacctgagccctgtgggcatggagcagctgaccagcagctctgtgtccaatgccctgcctgtgtctggcagccacctgggcctggccgccagccccacccacagcgccatcccagcccctggcctgcctgtggccatccccaacctgggccccagcctgagcagcctgcccagcgccctgagcctgatgctgcccatgggctag

SEQ ID NO: 174285 - DNA, 2406 bp, Artificial Sequence
  derived and/or modified sequence
atgcaccaccggatgaacgagatgaacctgagccccgtgggcatggaacagttaacttcatcatcagtgagcaatgccctccccgtttctggcagtcacttgggtctggctgccagccctacacactccgccatcccagcccccggactgccggttgcaatacctaacctaggccctagcctgtcctccctgccatcagccctttctctaatgcttcctatgggaattggcgacagaggggtgatgtgtggcctgccagaacgaaactatacgctacctccccccccttatccccatttggaatcctcatacttccgtacaattctccccgggattctgagttacctcgctgatagacccccgccacagtatatacacccaaactccatcaacgtggacggcaacacagcccttagcattactaataacccttccgcccttgacccttaccagagtaacgggaacgtggggctggagccgggaatcgtatccatcgattcccggagcgtcaatactcacggcgcacagtcactccatcctagcgatggtcacgaggttgccttggatacagcaatcacgatggaaaatgtatctcgtgttacgtcaccaattagcactgacggcatggctgaggaactcacaatggatggagtggcgggggagcactcacagataccaaacggatcgagaagccatgagcccctctcggtggatagcgtcagcaacaatttggccgccgatgccgtgggacatggcggggtgatacccatgcacggcaatggcctggaactaccagttgtcatggaaacggatcatatcgcctctcgcgtgaatgggatgtcagactcggcactgagtgatagcatccacacggtagcaatgtcgaccaatagtgtgtcagtcgctctgtcaacttctcataaccttgcaagtctcgaatccgtcagtctgcacgaggtgggactcagtcttgaaccagtcgctgtctcatccataacgcaagaggtggcaatgggaaccggacatgtcgacgtctcttcggactcactgtcctttgttagtccatccttacagatggaggacagtaactcaaataaggagaatatggccactctgttcaccatttggtgtaccctgtgcgaccgtgcttatcccagcgattgtccagagcacgggcctgttacattcgtgcctgatacccccatcgaatccagagccaggttgtccctcccgaagcaactcgttctgagacagtcaattgtgggcgccgaagtgggtgtttggaccggtgagactatccccgtacgtacctgctttggccccttgatcggtcaacagtctcattctatggaagttgccgaatggacagataaagctgtcaaccacatttggaagatctatcataatggagtcctggaattttgcattatcaccactgatgaaaacgagtgtaactggatgatgtttgttcgaaaggctcgtaaccgagaggagcagaacctcgtggcatatcctcatgatggaaagatcttcttttgcacaagccaggatatccctccagaaaacgaacttttattttattactctagggattatgcccagcagattggcgtacccgagcacccggacgtccacttgtgtaattgtgggaaggagtgtaatagttacacggagtttaaggcccacctgaccagtcacatccacaatcatttaccgactcagggccactccggaagtcacggaccaagtcatagcaaggaaaggaagtggaaatgcagcatgtgcccccaggcctttatctccccttctaaacttcacgtgcactttatgggccacatgggaatgaagcctcacaaatgcgatttttgctccaaggcttttagcgatccatccaacctccggactcatctcaaaattcacactgggcagaaaaattatcgctgcactttgtgtgacaagtcttttacgcagaaagcgcacctggagtcccacatggtcatccacaccggcgagaagaacttaaaatgtgattactgcgacaagctgttcatgcggcggcaagatcttaagcagcatgtgttgatacacacccaggagcgtcagattaaatgcccaaagtgtgataaactattcttgcgcactaaccatcttaaaaaacatctgaactctcatgagggaaaaagggattatgtttgcgagaaatgtacaaaggcatacctcacaaaatatcacctgactaggcacctcaagacttgtaagggcccaacttccagctcatcagctccagaggaagaggaggaggacgatagtgaggaggaggacctggcggactcggtgggtacagaggactgtaggatcaattccgcggtgtactccgcagacgaaagtctgtccgctcacaagtag

SEQ ID NO: 174286 - DNA, 228 bp, Artificial Sequence
  derived and/or modified sequence
atgcaccaccggatgaacgagatgaacctgagccccgtgggcatggaacagctcacgtcttcctctgtcagcaacgcgctgcccgtgagtggatctcacttggggctggccgcttcgcccacccatagtgccatcccagctcccgggcttcccgtcgctattcccaacctgggcccttctctgagcagcttgccatctgccctgtcactcatgctcccaatgggttag

SEQ ID NO: 174287 - DNA, 2406 bp, Artificial Sequence
  derived and/or modified sequence
atgcatcatagaatgaacgaaatgaacctctcccctgttgggatggaacagcttaccagctcctctgtaagcaatgccctgcccgtgtccggttcccacctggggttggctgcttcccccacccacagcgccatccccgctcccggtctacctgtcgcgatacctaacctgggcccatccctctcatccctgccctccgccctgagcttgatgcttccaatgggaatcggcgatcgtggggtgatgtgcggactgcctgagcgtaactacacgttgccccctcccccttacccccacttagagtctagttacttccggactattctccccggaatcttgagctatctggccgaccggcctcctccccagtacatacaccccaatagcatcaacgtggatggcaacacagctctgtcaattacgaataatccatccgcactcgacccctaccagtctaacggcaatgtggggctggagccagggatcgtctccatcgactccagatccgtgaatacacatggagcccagagcctccacccttccgacggccacgaggtggcgctggataccgctatcacgatggaaaacgtgtcaagagtgactagccctatcagcaccgacggcatggctgaggagctgacaatggacggagttgccggtgagcactctcagatccccaatggaagtcgatcccatgaaccccttagcgttgactccgtttcaaataatctagccgcagacgccgttggccacggaggcgtcattccaatgcatggtaacggactggaattacctgtcgtgatggagactgaccatattgcaagtagagtgaacggcatgtccgacagcgctctgagcgactccattcatactgttgcaatgtcgacaaattccgtgtctgtggcgctctctaccagtcataatcttgcctcattagaatcagtgtccttgcacgaggttggcctgtcattggaacctgtagccgttagttctataacccaagaggtcgcaatggggaccggtcacgtggacgtaagctccgattctctgtccttcgtctcacccagcctccagatggaagactctaatagcaataaggagaatatggcaacgcttttcacgatatggtgtacactatgtgatcgggcatacccaagtgattgccctgaacatggcccagtcacattcgtgcctgataccccaatagaaagccgagctcgcctgtctcttcccaaacagctggtcctcaggcagagcatagtaggcgcagaggtcggggtgtggactggagagactatccctgtgcggacgtgtttcgggccacttattggtcagcagagccactccatggaagttgctgaatggaccgataaggccgttaatcatatctggaagatttaccacaatggagtactggagttctgcattatcaccacagacgaaaatgagtgtaactggatgatgttcgtccgcaaggctaggaaccgcgaagagcagaatctcgtcgcttacccgcacgacggcaagatctttttttgcacctctcaggacatccctcccgaaaacgagctgcttttctattacagccgtgattacgcacagcagatcggcgtgccggaacatcccgatgtgcacctatgtaactgcggaaaggagtgcaactcgtacaccgaatttaaagcccatctcacgtcgcacatacacaaccacctgcctacccaaggtcattccggttctcacgggcctagccactctaaggaacgaaagtggaaatgttctatgtgtcctcaagctttcatttcccccagtaagctgcacgtgcacttcatggggcatatgggaatgaagccccacaaatgcgatttctgctctaaagccttttctgatccctcaaatctcaggacacatctgaagatccataccggacaaaagaattatcgttgtacactgtgcgataagagcttcacacagaaggcacatctggagtcgcatatggtcattcacacaggggaaaagaaccttaaatgcgattactgcgacaaactctttatgaggcgacaggacctcaaacagcacgttctgatccatacccaggagcgccagattaagtgtccaaagtgtgataagctatttctgcggacgaaccatcttaaaaaacacctgaactcccacgaaggtaaaagagattacgtgtgtgagaaatgtacaaaagcatatctgacgaagtaccacctgacccgtcaccttaaaacttgcaaggggcctacaagttcaagctctgctcctgaggaggaagaggaggacgattctgaagaagaggacctagctgactccgtggggactgaagactgcagaatcaactcagccgtgtatagcgcagacgaatcactatccgctcacaagtag

SEQ ID NO: 174288 - DNA, 4210 bp, Artificial Sequence
  derived and/or modified sequence
ggctgaggatccggaaacgcgccgcagagggtgcggcccagaggaggccgcgggccgggaagggccgggcgggacgggaaacgttagggcagcggcccccggggtgagggggccgagcggacgggcagggccccgaggcgaactctgcccggatgaggaacaaagcagtggggcaggcgcgtgcgcccccagcgcagctggcaggttgggcagcccccttcccgaagcttctggacggaaggccccaggtgttccccgagatgccccaacccgtggcggggtgcacggccaccggccctcgggagaagttgggcggccccgggcgaccccggggacgagtggccgcgtcggtgcagcggttgtgagcaagatgtggtagcacgtgaccctggaacgcaaaccctgatgcctgttccccaccacccgagcgctcctttctctgatatttggccccaagccgatgcatcacaggatgaatgaaatgaacctgagtccagtggggatggagcagctgacttcatcctctgtgagcaatgccttgccagtctcaggaagtcacctgggattggctgcctcacccactcacagtgccatccctgccccaggcctcccagtggcaattccaaacctgggtccctccctgagctctctgccttctgctctgtctttaatgctaccaatgggtattggggatcgaggggtgatgtgtgggttacctgaaagaaactacaccctacctccaccaccttaccctcacctggagagcagttatttcagaaccattctacctggcattttatcttatttagctgacagaccacctccacagtacatccaccctaactctataaatgttgatggtaatacagcattatctatcaccaataacccttcagcactagatccctatcagtccaatggaaatgttggattagaaccaggcattgtttcaatagactctcgctctgtgaacacacatggtgcccaaagtcttcatcccagtgatggccatgaggtggccttggacacagcaatcactatggagaacgtttctagggttaccagcccaatttcgacagatggaatggcagaggagcttacgatggacggtgttgcaggcgagcattcccaaatcccaaatggctccagaagtcatgaacctctgtctgtggattctgtgagcaacaaccttgcagcagacgctgtaggacatggtggtgtgatacccatgcatgggaatggcctggagctccctgtggtcatggagacagaccacattgcaagtcgggtcaatggcatgtctgacagtgccctcagtgactccattcacactgtggccatgagcaccaactctgtaagcgtggcactctctacctcacacaaccttgcctccctagaatctgtttccctccatgaagttggcctcagcctagaacctgtggctgtctcctccatcacccaggaggttgctatggggacaggtcatgtagatgtatcttcagacagtctttcttttgtatcaccttcactgcaaatggaagactccaattcaaacaaggagaacatggcaaccttgtttacaatttggtgtactctgtgtgaccgcgcctatccctcggactgtcccgaacatggaccagtgacttttgttcctgacactccaatagagagcagagcaaggctttctctcccaaagcagcttgttctccgtcagtcaattgtgggagcagaagttggtgtatggactggagaaaccattcctgtgcggacttgctttggacctctaattggccagcagagtcactccatggaagtagcagaatggacagacaaggcagttaaccatatctggaagatataccacaatggtgtcctagaattctgcatcattacaactgatgaaaatgaatgtaattggatgatgtttgtgcgcaaagccaggaaccgggaagagcagaatttggtggcttatcctcatgatggaaaaatctttttctgcacctcacaagatatccctcctgaaaatgaactgcttttttattatagccgagattatgctcaacagattggtgttcctgaacacccagatgtgcatctctgtaactgtggcaaggagtgcaattcttacacagagttcaaagcccatctgaccagccacatccataaccatcttcctacccagggacatagcggcagccatgggccaagtcacagcaaagaaaggaagtggaagtgctcaatgtgcccccaagcttttatctctccttccaaacttcatgtccactttatgggtcacatgggtatgaagccccacaagtgtgatttctgtagcaaggcttttagtgatcccagcaacctgcggacccacctcaagatacatacaggtcagaagaactacaggtgtaccttgtgtgacaagtctttcacccagaaggctcacctggagtcccacatggttatccacactggggagaagaatcttaagtgtgattactgtgacaagttgtttatgcggaggcaggacctcaagcagcacgtgctcatccacactcaagaacgccagatcaagtgtcccaagtgtgataagctgttcttgagaacaaatcacttaaagaagcatctcaattctcatgaaggaaaacgggattatgtctgtgaaaaatgtacaaaggcttatctaaccaaataccatctcacccgccacctgaaaacctgcaaagggcccacctccagttcgtcagcaccagaggaggaagaagaggatgactcagaagaggaagatctagcagactctgtggggacagaagactgtaggattaacagtgctgtgtattcagcggatgagtctctttctgcacataaataaaaggaaaagaaacaagcaattttggatgaaaatgcaaatggaaaaatacacataaccagttatctactataatggtttttatataaaatggttcctgatttattttcagccagtaatcaaaacagactgggaatgaataaagcacttacagaagagtatcctaatgaaaacactttaaaacagattgggaaaactgagcatgtgtcctgttttaagtggtggactgggagggaagtgtcaacttctgaggtctttatttacatgataatctgggagatgcatttatgcctgaatcaaagctgccttctgctcaaacaaatcagatttatttcacattcttccattattccattttcctgctggtcctgtgacttggtaacattctaaacggtccttgccccatagccatcctgattgctgatagtgttttatgcagactcttgtgacttatactcaccacagaatggattgggacacagcagcataagtgtgctacttggcagctagtaagtttaaagcaggacctgccttaactgctcctggccacttggaagtttagggtagatcttgttttccaaagtttcggcaggtgcctggagggcaaataaaaaagcagcagtcagtcagtagtcagtgatggagagaacaagaggagagatgcctggcctctgcccaagaaattagctttgatggaagcctgagcaagtcacctggttattgtaacgtggagatctttgtaggtttagacatggctccctgtctccagtaaacatccagccattcagacaaagggggcctggagatacagagagcccaaataatgcctgctggattgtctcctgatgagtacatgtggactcacctgaggaagggaaggaagggaataatcttttatgtttcatttaccttatgaaaagtgttaaaacattgccaactcaaaataacattatttaatgcatgtgcaaagttaggtcttcccagttgtctcagtgctgaggaacctcatcagagaagcatggaagatgccaaaggatttttggaaggtaaagaaggctgaatagtgaccacatgggcctgttttcagggtcccagcttagttaagtcacccatgcacctggtcattgtgtctcccatgcacatccagcgtttctcagaagcagacccacccttaagttgacaggattgatggaacatgctctcctgctcaaggcacaacctctgggctggagtagaggactctggtgggaaggttttgctgctaatgtatttatggaatgaatgtatttcattcaaatctgtattcctctaggaaggattaaaattaaacttttttaaaatacagga

SEQ ID NO: 174289 - DNA, 640 bp, Artificial Sequence
  derived and/or modified sequence
ggggcggggcgcggcggcccggcctgcgggccgcgggcgggctaatccacagcccttgggtggcggtgtcggcagcgcctggggctttcgggtagctgggatgggggctgcgaccttgttgtggttttggtgaccgctcttgtccccactcccccaggttgggcagcccccttcccgaagcttctggacggaaggccccaggtgttccccgagatgccccaacccgtggcggggtgcacggccaccggccctcgggagaagttgggcggccccgggcgaccccggggacgagtggccgcgtcggtgcagcggttgtgagcaagatgtggtagcacgtgaccctggaacgcaaaccctgatgcctgttccccaccacccgagcgctcctttctctgatatttggccccaagccgatgcatcacaggatgaatgaaatgaacctgagtccagtggggatggagcagctgacttcatcctctgtgagcaatgccttgccagtctcaggaagtcacctgggattggctgcctcacccactcacagtgccatccctgccccaggcctcccagtggcaattccaaacctgggtccctccctgagctctctgccttctgctctgtctttaatgctaccaatgggtat

SEQ ID NO: 174290 - DNA, 228 bp, Artificial Sequence
  derived and/or modified sequence
atgcatcatagaatgaatgagatgaaccttagtccagtcggtatggaacaactgacatccagcagcgtctccaacgctctgccagtgtccggatcccatctaggcctggctgcgagtcctacccattctgcaattccggcacccggactgccagtcgccattccgaatctaggcccatcactttccagcctgcccagcgctctttcattgatgctgcctatgggctag

SEQ ID NO: 174291 - DNA, 2406 bp, Artificial Sequence
  derived and/or modified sequence
atgcaccacagaatgaacgagatgaacctgagccccgtgggcatggagcagctgaccagcagcagcgtgagcaacgccctgcccgtgagcggcagccacctgggcctggccgccagccccacccacagcgccatccccgcccccggcctgcccgtggccatccccaacctgggccccagcctgagcagcctgcccagcgccctgagcctgatgctgcccatgggcatcggcgacagaggcgtgatgtgcggcctgcccgagagaaactacaccctgcccccccccccctacccccacctggagagcagctacttcagaaccatcctgcccggcatcctgagctacctggccgacagaccccccccccagtacatccaccccaacagcatcaacgtggacggcaacaccgccctgagcatcaccaacaaccccagcgccctggacccctaccagagcaacggcaacgtgggcctggagcccggcatcgtgagcatcgacagcagaagcgtgaacacccacggcgcccagagcctgcaccccagcgacggccacgaggtggccctggacaccgccatcaccatggagaacgtgagcagagtgaccagccccatcagcaccgacggcatggccgaggagctgaccatggacggcgtggccggcgagcacagccagatccccaacggcagcagaagccacgagcccctgagcgtggacagcgtgagcaacaacctggccgccgacgccgtgggccacggcggcgtgatccccatgcacggcaacggcctggagctgcccgtggtgatggagaccgaccacatcgccagcagagtgaacggcatgagcgacagcgccctgagcgacagcatccacaccgtggccatgagcaccaacagcgtgagcgtggccctgagcaccagccacaacctggccagcctggagagcgtgagcctgcacgaggtgggcctgagcctggagcccgtggccgtgagcagcatcacccaggaggtggccatgggcaccggccacgtggacgtgagcagcgacagcctgagcttcgtgagccccagcctgcagatggaggacagcaacagcaacaaggagaacatggccaccctgttcaccatctggtgcaccctgtgcgacagagcctaccccagcgactgccccgagcacggccccgtgaccttcgtgcccgacacccccatcgagagcagagccagactgagcctgcccaagcagctggtgctgagacagagcatcgtgggcgccgaggtgggcgtgtggaccggcgagaccatccccgtgagaacctgcttcggccccctgatcggccagcagagccacagcatggaggtggccgagtggaccgacaaggccgtgaaccacatctggaagatctaccacaacggcgtgctggagttctgcatcatcaccaccgacgagaacgagtgcaactggatgatgttcgtgagaaaggccagaaacagagaggagcagaacctggtggcctacccccacgacggcaagatcttcttctgcaccagccaggacatcccccccgagaacgagctgctgttctactacagcagagactacgcccagcagatcggcgtgcccgagcaccccgacgtgcacctgtgcaactgcggcaaggagtgcaacagctacaccgagttcaaggcccacctgaccagccacatccacaaccacctgcccacccagggccacagcggcagccacggccccagccacagcaaggagagaaagtggaagtgcagcatgtgcccccaggccttcatcagccccagcaagctgcacgtgcacttcatgggccacatgggcatgaagccccacaagtgcgacttctgcagcaaggccttcagcgaccccagcaacctgagaacccacctgaagatccacaccggccagaagaactacagatgcaccctgtgcgacaagagcttcacccagaaggcccacctggagagccacatggtgatccacaccggcgagaagaacctgaagtgcgactactgcgacaagctgttcatgagaagacaggacctgaagcagcacgtgctgatccacacccaggagagacagatcaagtgccccaagtgcgacaagctgttcctgagaaccaaccacctgaagaagcacctgaacagccacgagggcaagagagactacgtgtgcgagaagtgcaccaaggcctacctgaccaagtaccacctgaccagacacctgaagacctgcaagggccccaccagcagcagcagcgcccccgaggaggaggaggaggacgacagcgaggaggaggacctggccgacagcgtgggcaccgaggactgcagaatcaacagcgccgtgtacagcgccgacgagagcctgagcgcccacaagtag

SEQ ID NO: 174292 - DNA, 228 bp, Artificial Sequence
  derived and/or modified sequence
atgcaccacagaatgaacgagatgaacctgagccccgtgggcatggagcagctgaccagcagcagcgtgagcaacgccctgcccgtgagcggcagccacctgggcctggccgccagccccacccacagcgccatccccgcccccggcctgcccgtggccatccccaacctgggccccagcctgagcagcctgcccagcgccctgagcctgatgctgcccatgggctag

SEQ ID NO: 174293 - protein, 1160 aa, Artificial Sequence
  derived and/or modified sequence
MHPQSLAEEEIKTEQEVVEGMDISTRSKDPGSAERTAQKRKFPSPPHSSNGHSPQDTSTSPIKKKKKPGLLNSNNKEQSELRHGPFYYMKQPLTTDPVDVVPQDGRNDFYCWVCHREGQVLCCELCPRVYHAKCLRLTSEPEGDWFCPECEKITVAECIETQSKAMTMLTIEQLSYLLKFAIQKMKQPGTDAFQKPVPLEQHPDYAEYIFHPMDLCTLEKNAKKKMYGCTEAFLADAKWILHNCIIYNGGNHKLTQIAKVVIKICEHEMNEIEVCPECYLAACQKRDNWFCEPCSNPHPLVWAKLKGFPFWPAKALRDKDGQVDARFFGQHDRAWVPINNCYLMSKEIPFSVKKTKSIFNSAMQEMEVYVENIRRKFGVFNYSPFRTPYTPNSQYQMLLDPTNPSAGTAKIDKQEKVKLNFDMTASPKILMSKPVLSGGTGRRISLSDMPRSPMSTNSSVHTGSDVEQDAEKKATSSHFSASEESMDFLDKSTASPASTKTGQAGSLSGSPKPFSPQLSAPITTKTDKTSTTGSILNLNLDRSKAEMDLKELSESVQQQSTPVPLISPKRQIRSRFQLNLDKTIESCKAQLGINEISEDVYTAVEHSDSEDSEKSDSSDSEYISDDEQKSKNEPEDTEDKEGCQMDKEPSAVKKKPKPTNPVEIKEELKSTSPASEKADPGAVKDKASPEPEKDFSEKAKPSPHPIKDKLKGKDETDSPTVHLGLDSDSESELVIDLGEDHSGREGRKNKKEPKEPSPKQDVVGKTPPSTTVGSHSPPETPVLTRSSAQTSAAGATATTSTSSTVTVTAPAPAATGSPVKKQRPLLPKETAPAVQRVVWNSSTVQQKEITQSPSTSTITLVTSTQSSPLVTSSGSMSTLVSSVNADLPIATASADVAADIAKYTSKMMDAIKGTMTEIYNDLSKNTTGSTIAEIRRLRIEIEKLQWLHQQELSEMKHNLELTMAEMRQSLEQERDRLIAEVKKQLELEKQQAVDETKKKQWCANCKKEAIFYCCWNTSYCDYPCQQAHWPEHMKSCTQSATAPQQEADAEVNTETLNKSSQGSSSSTQSAPSETASASKEKETSAEKSKESGSTLDLSGSRETPSSILLGSNQGSDHSRSNKSSWSSSDEKRGSTRSDHNTSTSTKSLLPKESRLDTFWD

SEQ ID NO: 174294 - DNA, 3483 bp, Artificial Sequence
  derived and/or modified sequence
atgcacccccagagcctggccgaggaggagatcaagaccgagcaggaggtggtggagggcatggacatcagcaccagaagcaaggaccccggcagcgccgagagaaccgcccagaagagaaagttccccagccccccccacagcagcaacggccacagcccccaggacaccagcaccagccccatcaagaagaagaagaagcccggcctgctgaacagcaacaacaaggagcagagcgagctgagacacggccccttctactacatgaagcagcccctgaccaccgaccccgtggacgtggtgccccaggacggcagaaacgacttctactgctgggtgtgccacagagagggccaggtgctgtgctgcgagctgtgccccagagtgtaccacgccaagtgcctgagactgaccagcgagcccgagggcgactggttctgccccgagtgcgagaagatcaccgtggccgagtgcatcgagacccagagcaaggccatgaccatgctgaccatcgagcagctgagctacctgctgaagttcgccatccagaagatgaagcagcccggcaccgacgccttccagaagcccgtgcccctggagcagcaccccgactacgccgagtacatcttccaccccatggacctgtgcaccctggagaagaacgccaagaagaagatgtacggctgcaccgaggccttcctggccgacgccaagtggatcctgcacaactgcatcatctacaacggcggcaaccacaagctgacccagatcgccaaggtggtgatcaagatctgcgagcacgagatgaacgagatcgaggtgtgccccgagtgctacctggccgcctgccagaagagagacaactggttctgcgagccctgcagcaacccccaccccctggtgtgggccaagctgaagggcttccccttctggcccgccaaggccctgagagacaaggacggccaggtggacgccagattcttcggccagcacgacagagcctgggtgcccatcaacaactgctacctgatgagcaaggagatccccttcagcgtgaagaagaccaagagcatcttcaacagcgccatgcaggagatggaggtgtacgtggagaacatcagaagaaagttcggcgtgttcaactacagccccttcagaaccccctacacccccaacagccagtaccagatgctgctggaccccaccaaccccagcgccggcaccgccaagatcgacaagcaggagaaggtgaagctgaacttcgacatgaccgccagccccaagatcctgatgagcaagcccgtgctgagcggcggcaccggcagaagaatcagcctgagcgacatgcccagaagccccatgagcaccaacagcagcgtgcacaccggcagcgacgtggagcaggacgccgagaagaaggccaccagcagccacttcagcgccagcgaggagagcatggacttcctggacaagagcaccgccagccccgccagcaccaagaccggccaggccggcagcctgagcggcagccccaagcccttcagcccccagctgagcgcccccatcaccaccaagaccgacaagaccagcaccaccggcagcatcctgaacctgaacctggacagaagcaaggccgagatggacctgaaggagctgagcgagagcgtgcagcagcagagcacccccgtgcccctgatcagccccaagagacagatcagaagcagattccagctgaacctggacaagaccatcgagagctgcaaggcccagctgggcatcaacgagatcagcgaggacgtgtacaccgccgtggagcacagcgacagcgaggacagcgagaagagcgacagcagcgacagcgagtacatcagcgacgacgagcagaagagcaagaacgagcccgaggacaccgaggacaaggagggctgccagatggacaaggagcccagcgccgtgaagaagaagcccaagcccaccaaccccgtggagatcaaggaggagctgaagagcaccagccccgccagcgagaaggccgaccccggcgccgtgaaggacaaggccagccccgagcccgagaaggacttcagcgagaaggccaagcccagcccccaccccatcaaggacaagctgaagggcaaggacgagaccgacagccccaccgtgcacctgggcctggacagcgacagcgagagcgagctggtgatcgacctgggcgaggaccacagcggcagagagggcagaaagaacaagaaggagcccaaggagcccagccccaagcaggacgtggtgggcaagaccccccccagcaccaccgtgggcagccacagcccccccgagacccccgtgctgaccagaagcagcgcccagaccagcgccgccggcgccaccgccaccaccagcaccagcagcaccgtgaccgtgaccgcccccgcccccgccgccaccggcagccccgtgaagaagcagagacccctgctgcccaaggagaccgcccccgccgtgcagagagtggtgtggaacagcagcaccgtgcagcagaaggagatcacccagagccccagcaccagcaccatcaccctggtgaccagcacccagagcagccccctggtgaccagcagcggcagcatgagcaccctggtgagcagcgtgaacgccgacctgcccatcgccaccgccagcgccgacgtggccgccgacatcgccaagtacaccagcaagatgatggacgccatcaagggcaccatgaccgagatctacaacgacctgagcaagaacaccaccggcagcaccatcgccgagatcagaagactgagaatcgagatcgagaagctgcagtggctgcaccagcaggagctgagcgagatgaagcacaacctggagctgaccatggccgagatgagacagagcctggagcaggagagagacagactgatcgccgaggtgaagaagcagctggagctggagaagcagcaggccgtggacgagaccaagaagaagcagtggtgcgccaactgcaagaaggaggccatcttctactgctgctggaacaccagctactgcgactacccctgccagcaggcccactggcccgagcacatgaagagctgcacccagagcgccaccgccccccagcaggaggccgacgccgaggtgaacaccgagaccctgaacaagagcagccagggcagcagcagcagcacccagagcgcccccagcgagaccgccagcgccagcaaggagaaggagaccagcgccgagaagagcaaggagagcggcagcaccctggacctgagcggcagcagagagacccccagcagcatcctgctgggcagcaaccagggcagcgaccacagcagaagcaacaagagcagctggagcagcagcgacgagaagagaggcagcaccagaagcgaccacaacaccagcaccagcaccaagagcctgctgcccaaggagagcagactggacaccttctgggactag

SEQ ID NO: 174295 - DNA, 3483 bp, Artificial Sequence
  derived and/or modified sequence
atgcatccacaaagtttagcagaggaagaaatcaagacggagcaggaagtggtggagggcatggacatcagtacccggtcaaaagatccaggcagcgctgagcggacagcacaaaagaggaagttccccagtcccccgcactcctcgaatggccatagccctcaggatacaagcactagcccgattaagaagaaaaagaaaccgggccttctaaactctaataacaaagagcagtctgagctgcgccatggacctttttactatatgaaacaacccctcactacagatccagtagacgtggtccctcaggatggtaggaacgatttttattgctgggtgtgtcaccgagaggggcaagttctctgttgcgaactgtgccctagggtctaccatgccaaatgtctccggctgaccagtgagcccgagggcgactggttttgcccagagtgcgagaagataaccgtggctgagtgtatcgaaacgcagagcaaggcgatgacgatgctgactatcgagcaactcagttatttgctaaaatttgccattcaaaaaatgaaacagcctgggactgacgcctttcagaagcccgtacccctggagcagcaccccgactacgcggagtatatctttcaccctatggacctctgtactttggagaagaacgccaagaagaagatgtacggctgcaccgaggcttttctggccgatgcaaagtggatcctgcataattgcataatctacaacggcggtaatcacaaactgacccagatcgctaaggtggtgataaagatctgtgaacacgaaatgaacgagatcgaggtctgtccagagtgctacctggcagcatgccaaaaacgggacaattggttttgtgaaccctgcagtaatcctcatcccctggtttgggcgaaactcaagggtttccctttttggcccgccaaagcgctcagagataaagatggccaggtcgacgcccgcttttttggccagcacgaccgcgcctgggtcccaataaacaattgctacctcatgtccaaagagataccattctctgtcaagaaaacaaagagcatcttcaactcagcaatgcaggagatggaggtatacgtcgaaaatattcggcgaaaatttggggtctttaactacagcccattccggactccctacactcccaacagtcagtaccaaatgctactcgatccaaccaaccctagtgccggcaccgcaaagatagataaacaagaaaaggtgaaattgaacttcgacatgacggctagtcccaagatcctgatgtcaaaacccgtcctgtccggagggactggtagaagaatttctctgagcgacatgcctaggtctccaatgagtacaaactcttctgtgcatacaggatctgatgtcgagcaagatgcggaaaaaaaagccacaagttcacatttcagtgcctcagaggagtcaatggattttctggacaaaagcacagcgtccccggcatcaaccaagacaggacaggccggctctctgtcagggtcacctaagcccttctcacctcagttgagcgcccccatcaccaccaaaaccgacaagactagcaccactgggagcatattaaacctcaaccttgatcggagcaaagccgagatggacttgaaggaacttagtgagtcagtgcagcagcagtctaccccagtgcctctcattagccccaaacggcagatcagaagccgtttccagctgaacttggataagaccattgagagttgtaaagcccaactgggtatcaacgagatcagcgaggatgtgtacactgccgtcgagcactctgatagcgaggactctgaaaagagcgactcctctgattccgagtacataagtgacgacgagcaaaagagcaaaaatgagccggaggacactgaagacaaggaaggttgtcagatggataaggagccaagcgccgtaaaaaaaaagccaaaaccaacaaaccctgtggaaatcaaggaggagctgaagagcacttctcccgcttcagagaaagccgacccgggagcagtgaaagacaaagcttctccggaaccagagaaagatttttccgagaaggcaaaaccaagccctcaccctatcaaggacaagctgaagggtaaagatgagaccgattcacccaccgtgcacctgggcttagacagcgattccgagagtgaacttgtgatagatctaggcgaggatcacagcggccgagaggggaggaaaaacaagaaggagcccaaggagccttccccaaagcaggacgtggtaggaaagacacctccgtccacgactgtgggttctcattctcctccagaaaccccggtcttgactcggtccagcgctcaaacgtctgccgctggtgccactgccacaacctctacctccagcaccgtcaccgttacagccccagctccagccgcaacaggcagtcccgtgaaaaagcagcgtcctctgctgcccaaggagacggctcccgccgtccagagagttgtgtggaactcatcaactgttcaacaaaaagagatcactcagtcaccgtcaacatccacaattaccctggtgacgagtacccagagttccccactggtcacaagtagcggaagcatgtctacattagtatccagtgtaaacgccgacctccccatcgcgaccgccagcgcagacgtagccgccgatatcgccaaatacacatcaaagatgatggacgcaataaagggaacgatgacagaaatttacaatgatctatccaaaaacaccacgggctccacgatcgctgaaatacgccggctacggatcgagattgagaagctgcagtggctgcaccaacaggagctgtccgagatgaaacacaatctcgagctgactatggctgaaatgcgccaatctttggagcaagaacgcgacaggctgattgctgaggttaagaaacagttggagctggagaaacagcaggccgtcgacgaaactaaaaaaaagcagtggtgcgcgaactgcaagaaggaggccatcttctactgctgctggaatacatcctactgtgactatccctgtcagcaagctcactggccagagcacatgaaatcgtgcacacagtctgctactgccccgcagcaggaagctgatgccgaagtgaatactgagacccttaacaagagcagccaaggtagctcgtcatcaacccaaagcgccccaagtgagaccgcgtcagcatcaaaggaaaaggagacatcagctgaaaaaagcaaggaatccgggtcgacactggatctgtcgggctctcgggaaaccccctcgagtatcctgctgggaagcaaccagggcagcgatcattctcgctcaaacaagagctcatggtcttccagtgatgagaaaagggggtccactcgcagtgaccacaatacaagcacatccaccaagtccctgctccctaaagaaagtcgcttggatactttctgggactag

SEQ ID NO: 174296 - DNA, 3483 bp, Artificial Sequence
  derived and/or modified sequence
atgcacccccagagcctggccgaggaggagatcaagacagagcaggaggtggtggagggcatggacatcagcaccaggagcaaggaccccggcagcgctgagaggacagcccagaagaggaagttccccagccccccccacagcagcaatggccacagcccccaggacaccagcaccagccccatcaagaagaagaagaagccaggcctgctgaacagcaacaacaaggagcagagcgagctgcggcacggccccttctactacatgaagcagcccctgaccacagatcctgtggatgtggtgccccaggacggcagaaatgacttctactgctgggtgtgccaccgggagggccaggtgctgtgctgtgagctgtgcccccgggtgtaccacgccaagtgcctgcggctgaccagcgagcctgagggggactggttctgcccagaatgtgagaagatcaccgtggctgaatgtattgagacccagagcaaggccatgaccatgctgaccatcgagcagctgagctacctgctgaagtttgccatccagaagatgaagcagcccggcacagatgccttccagaagcctgtgcccctggagcagcacccagactatgcagagtacatcttccaccccatggacctgtgcaccctggagaagaatgccaagaagaagatgtatggctgcacagaggccttcctggctgatgccaagtggatcctgcacaactgcatcatctacaacggcggcaaccacaagctgacccagatcgccaaggtggtgatcaagatctgtgaacatgagatgaatgaaattgaggtgtgcccagagtgctacctggccgcctgccagaagagggacaactggttctgtgagccctgcagcaacccccaccccctggtgtgggccaagctgaagggcttccccttctggccagccaaggccctgcgggacaaggatggccaggtggatgcccgcttcttcggccagcacgaccgggcctgggtgcccatcaacaactgctacctgatgagcaaggagatccccttctctgtgaagaagaccaagagcatcttcaacagcgccatgcaggagatggaggtgtatgtggagaacatccggaggaagtttggagtcttcaactacagccccttccgcaccccctacacccccaacagccagtaccagatgctgctggaccccaccaaccccagcgctggaacagccaagattgacaagcaggagaaggtgaagctgaactttgacatgacagccagccccaagatcctgatgagcaagcctgtgctgagcggcggcaccggccgccgcatcagcctgagtgacatgcccaggagccccatgagcaccaacagctctgtgcacacaggcagtgatgtggagcaggatgctgagaagaaggccaccagcagccacttcagcgccagcgaggagagcatggacttcctggacaagagcacagccagccctgccagcaccaagacaggccaggccggcagcctgagcggcagccccaagcccttcagcccccagctgagcgcccccatcaccaccaagacagacaagaccagcaccaccggcagcatcctgaacctgaacctggacaggagcaaggccgagatggacctgaaggagctgtctgagagcgtgcagcagcagagcacccctgtgcccctcatcagccccaagaggcagatccgcagccgcttccagctgaacctggacaagaccatcgagagctgcaaggcccagctgggcatcaatgagatcagtgaagatgtgtacacagctgtggagcacagcgacagcgaggacagcgagaagagtgacagcagtgacagcgagtacatcagtgatgatgagcagaagagcaagaatgaacctgaggacacagaggacaaggagggctgccagatggacaaggagcccagcgctgtgaagaagaagcccaagcccaccaaccctgtggagatcaaggaggagctgaagagcaccagccctgccagcgagaaggctgaccccggggctgtgaaggacaaggccagccctgagcctgagaaggacttcagcgagaaggccaagcccagcccccaccccatcaaggacaagctgaagggcaaggatgaaacagacagccccaccgtgcacctgggcctggacagcgacagcgagagcgagctggtgattgacctgggggaggaccacagcggccgggagggcaggaagaacaagaaggagcccaaggagcccagccccaagcaggatgtggtgggcaagaccccacccagcaccaccgtgggcagccacagccccccagagacccctgtgctgaccaggagcagcgcccagaccagcgctgctggggccacagccaccaccagcaccagcagcacagtgacagtgacagccccagccccagctgccaccggcagccctgtgaagaagcagaggcccctgctgcccaaggagacagccccagctgtgcagagggtggtgtggaacagcagcacagtgcagcagaaggagatcacccagagccccagcaccagcaccatcaccctggtgaccagcacccagagcagccccctggtgaccagcagcggctccatgagcaccctggtgtcctctgtgaatgctgacctgcccatcgccacagccagcgcagatgtggccgctgacatcgccaagtacaccagcaagatgatggatgccatcaagggcaccatgacagagatctacaatgacctgagcaagaacaccaccggcagcaccatcgccgagatccggcggctgagaattgaaattgagaagctgcagtggctgcaccagcaggagctgtctgagatgaagcacaacctggagctgaccatggccgagatgaggcagagcctggagcaggagcgggaccggctgattgctgaggtgaagaagcagctggagctggagaagcagcaggccgtggatgagaccaagaagaagcagtggtgtgccaactgcaagaaggaggccatcttctactgctgctggaacaccagctactgtgactacccctgccagcaggcccactggccagagcacatgaagagctgcacccagagcgccacagccccccagcaggaggctgatgctgaggtgaacacagagaccctgaacaagagcagccagggcagcagcagcagcacccagagcgcccccagcgagacagccagcgccagcaaggagaaggagaccagcgctgagaagagcaaggagagcggcagcaccctggacctgagcggcagccgggagacccccagcagcatcctgctgggcagcaaccagggcagtgaccacagccgcagcaacaagagctcctggagcagcagtgatgagaagaggggcagcaccaggagtgaccacaacaccagcaccagcaccaagagcctgctgcccaaggagagccggctggacaccttctgggactag

SEQ ID NO: 174297 - DNA, 3483 bp, Artificial Sequence
  derived and/or modified sequence
atgcacccccagagcctggccgaggaggagatcaagaccgagcaggaagtggttgaaggaatggacatttctaccaggtctaaagatcccggctcggcagagcgtactgcccagaaacgtaaattccctagtccaccgcattcctcgaatggccactcaccccaggacaccagtacttcacctattaaaaagaaaaagaagcctggtctactgaattctaacaataaggaacaaagtgagctgcggcacggcccattttattacatgaaacaaccccttaccacagaccccgtggacgtggttccccaggatgggcggaacgacttctactgttgggtttgccaccgcgaagggcaggttctttgctgtgaactgtgccctagggtctatcacgcaaagtgcttgcgcctcacaagtgagccggagggggactggttctgtccggaatgtgaaaaaattacggtggccgagtgcatcgagacacagtcaaaggcgatgacgatgttaactatcgaacagctgtcgtatctcctgaaattcgctatccaaaaaatgaagcagcccggcactgatgcattccagaaacctgtgccactggaacagcatcccgattatgccgagtatatctttcatcctatggacctttgcacacttgaaaagaatgcgaaaaaaaaaatgtatggatgcaccgaggccttcttggcggacgccaagtggatactccacaactgcatcatctataacgggggcaatcataagctgacccagatcgccaaggtggtgatcaaaatatgtgaacacgagatgaacgagattgaagtctgccctgagtgttacctggctgcttgccagaaacgcgacaattggttctgcgagccctgcagcaatcctcatcctctagtctgggcgaagctgaaaggttttccattctggcccgccaaggcactgagggataaagacgggcaggttgacgcacgcttcttcggccagcatgatagagcatgggttccgataaacaactgttatcttatgagcaaggaaatccccttcagcgtgaagaaaacgaagagcatattcaattcagctatgcaggaaatggaggtgtatgtggagaacatacggagaaagtttggggtgttcaactattccccgttccgaaccccctacactccaaattcccagtatcagatgcttctcgatccaactaatccatctgctggaactgcaaagatcgataaacaggaaaaagtcaaactgaattttgacatgaccgcttctcccaaaattctgatgtccaaacccgtgctatccggaggaactgggcgtaggatatcgctgagcgacatgccccggtcccccatgagtaccaactctagcgttcatacggggtcagacgtggaacaagatgccgaaaagaaagccactagtagccatttctctgcttctgaggaaagcatggattttctggacaagagcaccgcgtcaccggccagcaccaagactggacaagccggctcactgtccgggtccccgaagccattctcccctcagctgtccgctccaatcacaactaaaaccgataaaactagtactactgggtcaatcttgaacttgaacctggaccgttcaaaagccgagatggacttaaaggaactgagtgaaagtgtgcagcagcagtccacccccgtccctcttatctcgccaaagaggcagattcgtagcaggtttcagctaaatctcgataagaccatcgaatcctgtaaggctcagctgggcatcaacgaaatatcggaagacgtgtatactgctgtagagcacagtgacagcgaagattccgaaaagtccgactcttcagacagcgagtacatttcagacgatgagcagaagtcaaagaatgaaccagaggatactgaggataaagagggttgccagatggacaaagaaccatcggccgtcaagaagaagcctaaacccaccaatcctgtggaaatcaaagaagagctgaaaagtacttcacccgccagcgaaaaggcagacccaggcgcagtcaaggacaaggcctctccagagccagagaaagacttctccgaaaaagccaaaccatcacctcatcccattaaggataagttgaagggtaaggatgagacggacagcccaactgtccacttagggttagactctgacagcgaaagcgagcttgtaattgacttaggagaggaccactctggacgagagggccgaaaaaacaaaaaagaaccaaaggagccctccccaaaacaggatgtggtcgggaagacgcctccatctaccaccgtgggatcacatagccctcccgagacgcccgtcctgactcggtccagcgcacagacctcggcggccggagctaccgcgacaacatccacctcttctaccgtgacagtcaccgcacctgcccccgcagctacaggctccccggtaaagaaacagcgtccactcctccccaaggagaccgctcccgctgtccagagagtggtgtggaacagctccaccgtgcagcaaaaggagatcacccagagtccttcaacatccaccatcactctggttacctccacgcaatcctcccctctggtcactagcagtgggagcatgagtaccttggtgagtagcgtaaacgccgacttgcctattgcgaccgcatctgcagacgtcgcagcagatatcgccaaatacacaagcaaaatgatggatgcaatcaagggcaccatgaccgaaatttataacgacctgtccaaaaatacaaccgggagtaccatcgcagagatcaggcgcttgagaattgaaatagagaaattacaatggctgcaccaacaggaattgagtgaaatgaagcacaacttagaactgacaatggccgaaatgcgtcagtccctggagcaggagagggatcggctgatcgccgaagtgaagaaacagcttgagcttgagaaacaacaggccgtggatgagacaaaaaagaaacagtggtgtgccaattgcaagaaggaagctatcttttactgttgttggaatacttcctactgcgattatccatgccagcaggcccactggccagagcacatgaaatcctgtacgcagtccgcaactgcccctcagcaagaggccgacgctgaagtgaatactgaaaccctgaataaaagcagtcagggatcatcttcctcgacccagtcggccccgagcgagaccgccagcgcatccaaggaaaaggaaacttccgccgaaaaaagcaaagagagtggttccactcttgatcttagtggctcccgggaaacaccctcctctatcctgctgggttctaatcaagggtccgatcattctaggtccaacaagagttcttggtcctccagcgacgagaaaagagggtcaacccgctccgatcacaatacatctaccagcactaagtccctgctccccaaagaaagcaggcttgacacattctgggactag

SEQ ID NO: 174298 - DNA, 3483 bp, Artificial Sequence
  derived and/or modified sequence
atgcacccacagagcttggccgaggaggagattaaaacggaacaagaggtggtggaaggtatggacatctccacccggtccaaagacccaggtagcgccgaacgcacggctcagaagcgtaaattcccaagccccccacactcatctaacggacattctccacaagacacaagcacgtccccaatcaagaagaaaaaaaagcctgggctcctgaatagcaataacaaggagcaatcagaactgcgccacggcccattctactatatgaaacaaccgctgacgaccgatcctgtggacgtggtaccgcaagacggtaggaacgacttctactgctgggtatgtcatcgagagggtcaagtcctgtgttgtgaactgtgtccaagggtttaccacgctaaatgtctcagactgacatcagagcccgaaggcgactggttctgtccagaatgcgagaaaataaccgtcgccgaatgtatcgaaacccaatctaaagcaatgaccatgctgaccattgaacagctgtcctatttacttaaattcgccatacagaaaatgaaacagcccggtaccgacgcctttcagaagcccgtgccgctggaacagcacccagattacgcagaatacattttccaccctatggatctgtgcaccctggagaagaacgcaaaaaagaaaatgtatggttgtacggaagcatttcttgctgatgcgaagtggattctccataattgtattatatataatggcggaaaccataagttaacgcagatcgctaaggtcgtaattaaaatttgcgagcatgaaatgaatgaaatagaggtgtgcccagaatgctacctggctgcatgtcagaagagagataattggttctgcgaaccttgttcaaaccctcacccattggtgtgggcaaagctgaagggattccccttctggccagcaaaggcgctccgggacaaagacggccaggtcgacgccaggtttttcgggcagcatgaccgcgcttgggtcccaatcaataattgctacctcatgtctaaggagattccattctcagttaagaaaacaaagagcatctttaacagcgcaatgcaggaaatggaagtctatgtggagaatattagacggaagttcggcgtgttcaattactcacccttccgaactccttatacccccaatagtcagtatcagatgctgctagaccctaccaacccgagtgctgggactgccaagatcgataagcaggaaaaagttaagttgaattttgatatgaccgcgagcccaaagatcctgatgagtaagcccgtcctgtcaggcggtacaggcagacgcataagtctgagcgatatgccaagaagtcccatgagtactaatagctcggtgcacaccggctccgacgttgagcaggatgctgagaagaaagcaacatcgagccactttagcgctagtgaggagagcatggactttctggacaagagtactgccagccctgctagcaccaagacaggccaggccggatcactgtcaggcagccccaaacccttcagtccgcagctatccgcaccgataaccaccaaaactgataaaacaagtacaacgggaagcattttgaatttgaaccttgaccggtcaaaggccgaaatggaccttaaagaactgagcgagagcgtacaacaacagagcaccccagtccccctgatcagtccgaaaaggcagatcaggtctcggttccagcttaatttggacaaaactattgaatcttgtaaagcccaactggggatcaatgagatatctgaggacgtgtacactgctgtggagcatagtgattccgaagattccgaaaagtcagattcttctgacagcgagtacatctctgatgacgaacagaaatcaaagaatgaaccagaagacacagaagataaagagggttgtcagatggacaaagaacccagcgctgtgaaaaaaaaacccaaacctaccaaccctgttgaaatcaaagaggagcttaagtctacatctccagcatctgaaaaggccgacccaggcgctgtcaaggacaaagcttcccccgaaccagagaaggacttttctgaaaaagccaaaccttctccccatccaataaaggacaagctcaagggcaaagacgaaaccgattcaccaacggtgcacctgggactggattcagactccgaaagtgagctggtgattgacctaggggaggatcattcggggagggaggggaggaaaaataaaaaggaaccaaaagaacctagccctaagcaggatgtggtgggaaagaccccaccctctaccacagtgggttcacactctcctccagagacacccgtgcttacgaggtcatccgcccagactagtgcggctggagccaccgccaccacctccacgtcatctaccgtcactgtcaccgctcccgcacctgccgctacaggcagccccgttaaaaagcaacgtcctctgttgccgaaggagactgctcctgctgtgcagagagtggtgtggaactcctcaaccgttcaacagaaggagatcactcagtcaccatctacatctaccatcacgctggtgacctcaacccaatcctctcctcttgtaactagttctggctccatgtccactctggtgtcttcggtgaacgctgatttgcctattgctacagcttccgcggacgttgcagccgatattgccaaatatacgtctaaaatgatggatgcaataaaggggactatgactgagatctataacgacctctctaagaatactaccggctccaccattgcagaaattcggaggttgaggattgaaattgaaaaactacagtggttgcatcaacaggaactgtctgaaatgaagcacaacctggaattaaccatggccgagatgagacagtctcttgaacaggagagggacagacttatcgctgaggttaaaaaacaacttgagcttgagaaacagcaggctgtggatgagaccaaaaagaagcaatggtgcgcgaattgtaagaaagaagctatcttctactgttgttggaacaccagctattgcgactatccttgtcagcaggcccactggcccgaacatatgaagtcctgtactcaaagcgccaccgctccccagcaggaggcagacgctgaagttaataccgaaaccctcaacaaaagctcccaggggtcaagtagcagcacccagagcgccccatccgagactgccagcgcatccaaagaaaaggagacgagcgcagagaaaagcaaggaatccggaagcacactggacctgagtgggagtcgtgagacccctagtagtatattgctcggttccaaccagggctctgaccactcccgatctaacaagtctagctggagttcctccgacgaaaagcgaggtagcacacgctctgatcacaatacaagtacaagtacgaaatccctgctacccaaggaatcccgcctggatactttttgggactag

SEQ ID NO: 174299 - DNA, 3832 bp, Artificial Sequence
  derived and/or modified sequence
ataagtattgacattacacagtgttaacaatgcatccacagagcttggctgaagaggaaataaaaacagaacaggaggtggtagagggcatggatatctctactcgctccaaagatcctggctctgcagagagaacagcccagaaaagaaagttccccagccctccacattcttccaatggccactcgccgcaggacacatcaacaagccccattaaaaagaaaaagaaacctggcttactgaacagtaacaataaggagcagtcagaactaagacatggtccgttttactatatgaagcagccactcaccacagaccctgttgatgttgtaccgcaggatggacggaatgatttctactgctgggtttgtcaccgggaaggccaagtcctttgctgtgagctctgtccccgggtttatcacgctaagtgtctgagactgacatcggaaccagagggggactggttttgtcctgaatgtgagaaaattacagtagcagaatgcatcgagacccagagtaaagccatgacaatgctcaccattgaacagttatcctacctgctcaagtttgccattcagaaaatgaaacagccagggacagatgcattccagaagcccgttccattggaacagcaccctgactatgcggaatacatcttccatccaatggacctttgtacattggaaaagaatgcgaaaaagaaaatgtatggctgcacagaagccttcctggctgatgcaaagtggattttgcacaactgcatcatttataatgggggaaatcacaaattgacgcaaatagcgaaagtagtcatcaaaatctgtgaacatgagatgaatgaaatcgaagtatgtccagaatgttatctagctgcttgccaaaaacgagataactggttttgtgagccttgtagcaatccacatcctttggtctgggccaaactgaaggggtttccattctggcctgcaaaagctctaagggataaagacgggcaggtcgatgcccgattctttggacaacatgacagggcctgggttccaataaataattgctacctcatgtctaaagaaattcctttttctgtgaaaaagactaagagcatcttcaacagtgccatgcaagagatggaggtttacgtggagaacatccgcaggaagtttggggtttttaattactctccatttaggacaccctacacacccaacagccagtatcaaatgctgctcgatcccaccaaccccagcgccggcactgccaagatagacaagcaggagaaggtcaagctcaactttgacatgacggcatcccccaagatcctgatgagcaagcctgtgctgagtgggggcacaggccgccggatttccttgtcggatatgccgcgctcccccatgagcacaaactcttctgtgcacacgggctccgacgtggagcaggatgctgagaagaaggccacgtcgagccacttcagtgcgagcgaggagtccatggacttcctggataagagcacagcttcaccagcctccaccaagacgggacaagcagggagtttatccggcagcccaaagcccttctctcctcaactgtcagctcctatcacgacgaaaacggacaaaacctccaccaccggcagcatcctgaatcttaacctggatcgaagcaaagctgagatggatttgaaggagctgagcgagtcggtccagcaacagtccacccctgttcctctcatctctcccaagcgccagattcgtagcaggttccagctgaatcttgacaagaccatagagagttgcaaagcacaattaggcataaatgaaatctcggaagatgtctatacggccgtagagcacagcgattcggaggattctgagaagtcagatagtagcgatagtgagtatatcagtgatgatgagcagaagtctaagaacgagccagaagacacagaggacaaagaaggttgtcagatggacaaagagccatctgctgttaaaaaaaagcccaagcctacaaacccagtggagattaaagaggagctgaaaagcacgtcaccagccagcgagaaggcagaccctggagcagtcaaggacaaggccagccctgagcctgagaaggacttttccgaaaaggcaaaaccttcacctcaccccataaaggataaactgaagggaaaagatgagacggattccccaacagtccatttgggcctggactctgattcagagagcgaacttgtcatagatttaggagaagaccattctgggcgggagggtcgaaaaaataagaaggaacccaaagaaccatctcccaaacaggatgttgtaggtaaaactccaccatccacgacggtgggcagccattctcccccggaaacaccggtgctcacccgctcttccgcccaaacttccgcggctggcgccacagccaccaccagcacgtcctccacggtcaccgtcacggccccggcccccgccgccacaggaagcccagtgaaaaagcagaggccgcttttaccgaaggagactgccccggccgtgcagcgggtcgtgtggaactcatcaactgtccagcagaaggagatcacacagagcccatccacgtccaccatcaccctggtgaccagcacacagtcatcgcccctggtcaccagctcggggtccatgagcacccttgtgtcctcagtcaacgctgacctgcccatcgccactgcctcagctgatgtcgccgctgatattgccaagtacactagcaaaatgatggatgcaataaaaggaacaatgacagaaatatacaacgatctttctaaaaacactactggaagcacaatagctgagattcgcaggctgaggatcgagatagagaagctccagtggctgcaccagcaagagctctccgaaatgaaacacaacttagagctgaccatggcggagatgcggcagagcctggagcaggagcgggaccggctcatcgccgaggtgaagaagcagctggagttggagaagcagcaggcggtggatgagaccaagaagaagcagtggtgcgccaactgcaagaaggaggccatcttttactgctgttggaacactagctactgtgactacccctgccagcaagcccactggcctgagcacatgaagtcctgcacccagtcagctactgctcctcagcaggaagcggatgctgaggtgaacacagaaacactaaataagtcctcccaggggagctcctcgagcacacaatcagcaccttcagaaacggccagcgcctccaaagagaaggagacgtcagctgagaaaagcaaggagagtggctcgacccttgacctttctggctccagagagacgccctcctccattctcttaggctccaaccaaggctctgaccattcccggagtaataaatccagttggagcagcagtgatgagaagaggggatcgacacgttccgatcacaacaccagtaccagcacgaagagcctcctcccgaaagagtctcggctggacaccttctgggactagcagtgaatcgggacacaaaccacccaccccattgggagaaaaacccagacgccaggaaaagaagaaacaacaaaggcaggagaacagccactttcagacttgaaaatgacaaaaccctcagttgagcctgagcccccggcgcgggggctgctacactacaggacacccagcatcggctttgactgcagactgttcacccacacgagccctgtgcttttggtgtaaataatgtacaatttgtggatgtcattgaatctagaggactttcccctttttatatttgtattaactttaacttattaaaaaaaaaaaaagaaaaa

SEQ ID NO: 174300 - protein, 176 aa, Artificial Sequence
  derived and/or modified sequence
MRKHLSWWWLATVCMLLFSHLSAVQTRGIKHRIKWNRKALPSTAQITEAQVAENRPGAFIKQGRKLDIDFGAEGNRYYEANYWQFPDGIHYNGCSEANVTKEAFVTGCINATQAANQGEFQKPDNKLHQQVLWRLVQELCSLKHCEFWLERGAGLRVTMHQPVLLCLLALIWLTVK

SEQ ID NO: 174301 - DNA, 531 bp, Artificial Sequence
  derived and/or modified sequence
atgcggaagcatttgtcctggtggtggttggcgacggtgtgcatgctccttttcagccacctaagcgcagttcagacccgaggaataaaacacagaatcaaatggaataggaaagcgctgccaagcacagcgcaaatcaccgaagcgcaggtagccgaaaatcgacctggcgcatttatcaaacagggccggaagttagatatcgatttcggcgcggagggtaatcgctactatgaggcaaattactggcagttcccagacggtattcactataacggatgctctgaggctaatgtcacaaaagaagccttcgtgaccggttgcataaacgccacccaagccgcaaaccaaggagagttccagaaacctgataataagctgcatcagcaggtcctttggcggcttgtacaagagttatgcagtctaaagcattgtgagttttggttggagagaggcgccgggctgcgagtgaccatgcaccagcccgttttgctctgcctgctggcgctgatttggctgactgttaagtag

SEQ ID NO: 174302 - DNA, 531 bp, Artificial Sequence
  derived and/or modified sequence
atgaggaagcacctgtcctggtggtggctggccaccgtgtgcatgctgctcttcagccacctgtctgctgtgcagacccggggcatcaagcaccgcatcaagtggaacaggaaggccctgcccagcacagcccagatcacagaggcccaggtggctgaaaatagacctggggccttcatcaagcagggcaggaagctggacatcgactttggagctgagggcaaccgctactatgaggccaactactggcagttcccagatggcatccactacaacggctgcagcgaggccaacgtgaccaaggaggcctttgtgacaggctgcatcaatgccacccaggccgccaaccagggcgagttccagaagccagacaacaagctgcaccagcaggtgctgtggaggctggtgcaggagctgtgcagcctgaagcactgtgagttctggctggagagaggagctggcctgcgggtgaccatgcaccagcctgtgctgctgtgcctgctggccctgatctggctgactgtgaagtag

SEQ ID NO: 174303 - DNA, 531 bp, Artificial Sequence
  derived and/or modified sequence
atgcggaagcacctgagctggtggtggctggccaccgtgtgcatgctgctatttagtcacctgtctgctgtgcagaccagaggaattaagcataggattaaatggaatagaaaggccctgccttcaacggcgcagattacagaggcacaagtcgccgagaacaggccgggcgcttttatcaagcaaggtcggaaactggacattgatttcggcgccgaagggaaccgctactacgaagctaattactggcagttccctgacgggatccactataatggttgcagtgaagcaaacgtgacaaaagaagccttcgtcacaggatgcattaacgctactcaggcagccaaccagggagagttccagaaacctgacaacaaactgcatcaacaggtgctatggcgtctggtacaggagctgtgctccctgaaacattgcgaattctggctggaaagaggggcggggctgagagtgacaatgcaccagccagtcttgctgtgcctgctggcattgatatggctcacagtcaaatag

SEQ ID NO: 174304 - DNA, 531 bp, Artificial Sequence
  derived and/or modified sequence
atgcgcaaacacctgagttggtggtggcttgcaactgtgtgcatgctcctgttctcccacttgtcggccgtgcagactcgcggtatcaagcacaggatcaaatggaacaggaaagctctgcccagcaccgcgcaaatcaccgaagcccaggttgccgagaaccgcccaggcgctttcatcaaacagggaagaaagttggatattgactttggggcagagggtaaccgttattatgaggccaactattggcagttccccgatggtatccactacaacggatgcagcgaagctaatgtgacaaaggaggctttcgtaaccggatgtatcaacgctactcaggctgcaaaccagggagagtttcaaaaacctgataataagttacatcagcaggtgctttggaggctggtgcaggaactctgttcactcaaacactgcgaattttggctggagcggggagcaggcctgcgtgttaccatgcatcagcctgtactgctgtgcctgctggccttaatctggctgaccgtgaagtag

SEQ ID NO: 174305 - DNA, 3980 bp, Artificial Sequence
  derived and/or modified sequence
gggtgtgctgggggactgtgcagctcgaggctccagaggcacactccagagagagccaaggttctgacgcgatgaggaagcacctgagctggtggtggctggccactgtctgcatgctgctcttcagccacctctctgcggtccagacgaggggcatcaagcacagaatcaagtggaaccggaaggccctgcccagcactgcccagatcactgaggcccaggtggctgagaaccgcccgggagccttcatcaagcaaggccgcaagctcgacattgacttcggagccgagggcaacaggtactacgaggccaactactggcagttccccgatggcatccactacaacggctgctctgaggctaatgtgaccaaggaggcatttgtcaccggctgcatcaatgccacccaggcggcgaaccagggggagttccagaagccagacaacaagctccaccagcaggtgctctggcggctggtccaggagctctgctccctcaagcattgcgagttttggttggagaggggcgcaggacttcgggtcaccatgcaccagccagtgctcctctgccttctggctttgatctggctcacggtgaaataagcttgccaggaggctggcagtacagagtgcagcagcgagcaaatcctggcaagtgacccagctcttctcccccaaacccacgcgtgttctgaaggtgcccaggagcggcgatgcactcgcactgcaaatgccgctctcacgtatgcgccctggtatgtgcctgcgttctgatagatgggggactgtggcttctccgtcactccattctcagcccctagcagagcgtctggcacactagattagtagtaaatgcttgatgagaagaacacatcaggcactgcgccacctgcttcacagtacttcccaacaactcttagaggtaggtgtattcccgttttacagataaggaaactgaggcccagagagctgaagtactgcacccagcatcaccagctagaaagtggcagagccaggattcaaccctggcttgtctaaccccaggttttctgctctgtccaattccagagctgtctggtgatcactttatgtctcacagggacccacatccaaacatgtatctctaatgaaattgtgaaagctccatgtttagaaataaatgaaaacacctgagctggtggctgtgtactttgactggtacatggaggctattttaatccttctaactaaactaaaatagattaaaggaattaaactaaaatacaagtaaagctagacaaaggcccagaaatcatactgtaaggaaatgttattggaagctgattcccagagcagaccacatatacagcaggatgtgcctgtggcatgaagattttctttctcttttttttttttttttagatggagttttactcttgttgcccaggctggagtgcaacggcatgattttggctcactgcagcctctgcctcccaggctcaagcacttttcctgtctcagccttccgagtagctgggattacaggtgtgtgccatcatgcctgactaattttgtatttttagtagagacagggtttcaccatgttggccaggctggtcttgaactcctgacctcaggtgatccacccacctgggcctcccatagtgctgggattcaattttttttttttttttttcaaaagaagggtaagtgcttgctgttcccatccctgaaacattgcatgtatttaagaaaaacaaaatgttagtggcatatttgcttctaatgttcccctaaccctacatgcatgttttatgtgcactcatatgagtatctttaaatataatccctttacatctgtgttctatgcaaagtctctcatttctttcaagacagcctaatgaaggccatcatctctgtaaaccacttgtcactacaaaaatacaattactcaccaaaaagctttaaaaaataaagctgtgtctttagggagacccaataaagaatgcaatccatgccataagcaggagttgatacaccaccttattagctaaaaatatatataacacaatatgagtaatgtttaagatctgttttaaatttaaaacaatgaattgaatgctctaagaggctcctacaggcgctccaggccactctcagagactcccaggagttgttgaactatatttggagaaaacagccactgaatattatcatttctcctttaaagagagtttgtaaggggggaacatgcattttatcagacaatttatccaaagcattgcagaacatgagtgctgatgagggcacctcttgtgctgagtcccctcagctatcagtgttcttctcaaggacacatttggaaggttttaacattgaaagtgagcggaggacttgggggcagagcagcacaaagaaacagccttacactgggcacatggaggagacgtccaccctgcagccaggactggggttcacgtcactgccagagctacactcgccttctgcttccacggtcctgttaattctagatcagagagcaagaaaaaagtacagaacatatcctctacggttatttcctgctttctaattaaaaaaataataaccatggcaagagagaaagaaagagaaagtactcagaggctgacactgacatttcacttcctcgctctcctaagtttaattacaacagcacgtgcagccacgtcagccaaatgacttcatttctgatgtgaaaacgcttaggccatgatgtcgttcattttctgtaattgctgccttttctcattctgttaatagtcccggcaaccagatttcagtggggcatgacgtgaatgtgtatatggtgattcaaatgcaaaatttgtttatggggcttttaatcgaacgcgtgtgtgcctgaacattcttgctcaagttgatgaatcatggggtggaataaaggctgagtttagtttttcactttagcaaaggggcaatggggtgcctactatgtgcgagacattgggaggggcttctgaattattctggatatcgtcattttgcagtgtgcataattttgccaaccgttgctttcgtagcccctgctaagtgttgactttttaaaatataagtttattgtaaaagtgacatgaaaattacaacagatattccagaccaaaataatacaacaatcccagcatctgattgagtcagtgtttgctgtttcccctgcactttcctagttcttaagcatttgcgtatgtaaacattcatatttgcaataaaaaagtgagcttttatattctaaatttttacttaacttaattcaatgctttctactcatttttctatacttttttttttgaggcagagtctcattctgttgcccaggctggagtgcagtggcgtgatcttggctcactacaacctccaccttccaggcttaagcgattctcatgcctcatcctcccaagtaggtgggattacaggtgcccaccaccaagccctgcaaatttttttgtatttttagtagagacagtgttttgccatgttggccaggctggtctcgaactcctgacatcaggtgatccacctgcctcggcctcccaaagtgctgggattacaggtgtgagccaccacgccctgcctactctttgttttctttcctccccacccattttcccccgtcctgtcccctccttccagcctgagatgtaggctccaccttaactgtgctcagatacacaagtgagggctttttaacttgattatgccttttaaaaatactatgtatgtaaaatatttattcatctgcaatttggcttccctaacttaacattgcatcatgaaactctttggaacaacagctatctagatagctgactcattcttttggattgctacgtaatctcacttaatacagatgtatcatgattgattgaatcattgccttgttgatgggccttcagattatttccagttttttgccactgcaaacaataaacatccttgtacatacta

SEQ ID NO: 174306 - DNA, 531 bp, Artificial Sequence
  derived and/or modified sequence
atgagaaagcacctgagctggtggtggctggccaccgtgtgcatgctgctgttcagccacctgagcgccgtgcagaccagaggcatcaagcacagaatcaagtggaacagaaaggccctgcccagcaccgcccagatcaccgaggcccaggtggccgagaacagacccggcgccttcatcaagcagggcagaaagctggacatcgacttcggcgccgagggcaacagatactacgaggccaactactggcagttccccgacggcatccactacaacggctgcagcgaggccaacgtgaccaaggaggccttcgtgaccggctgcatcaacgccacccaggccgccaaccagggcgagttccagaagcccgacaacaagctgcaccagcaggtgctgtggagactggtgcaggagctgtgcagcctgaagcactgcgagttctggctggagagaggcgccggcctgagagtgaccatgcaccagcccgtgctgctgtgcctgctggccctgatctggctgaccgtgaagtag

SEQ ID NO: 174307 - protein, 853 aa, Artificial Sequence
  derived and/or modified sequence
MGTPRAQHPPPPQLLFLILLSCPWIQGLPLKEEEILPEPGSETPTVASEALAELLHGALLRRGPEMGYLPGPPLGPEGGEEETTTTIITTTTVTTTVTSPVLCNNNISEGEGYVESPDLGSPVSRTLGLLDCTYSIHVYPGYGIEIQVQTLNLSQEEELLVLAGGGSPGLAPRLLANSSMLGEGQVLRSPTNRLLLHFQSPRVPRGGGFRIHYQAYLLSCGFPPRPAHGDVSVTDLHPGGTATFHCDSGYQLQGEETLICLNGTRPSWNGETPSCMASCGGTIHNATLGRIVSPEPGGAVGPNLTCRWVIEAAEGRRLHLHFERVSLDEDNDRLMVRSGGSPLSPVIYDSDMDDVPERGLISDAQSLYVELLSETPANPLLLSLRFEAFEEDRCFAPFLAHGNVTTTDPEYRPGALATFSCLPGYALEPPGPPNAIECVDPTEPHWNDTEPACKAMCGGELSEPAGVVLSPDWPQSYSPGQDCVWGVHVQEEKRILLQVEILNVREGDMLTLFDGDGPSARVLAQLRGPQPRRRLLSSGPDLTLQFQAPPGPPNPGLGQGFVLHFKEVPRNDTCPELPPPEWGWRTASHGDLIRGTVLTYQCEPGYELLGSDILTCQWDLSWSAAPPACQKIMTCADPGEIANGHRTASDAGFPVGSHVQYRCLPGYSLEGAAMLTCYSRDTGTPKWSDRVPKCALKYEPCLNPGVPENGYQTLYKHHYQAGESLRFFCYEGFELIGEVTITCVPGHPSQWTSQPPLCKVAYEELLDNRKLEVTQTTDPSRQLEGGNLALAILLPLGLVIVLGSGVYIYYTKLQGKSLFGFSGSHSYSPITVESDFSNPLYEAGDTREYEVSI

SEQ ID NO: 174308 - DNA, 2562 bp, Artificial Sequence
  derived and/or modified sequence
atgggcacccccagagcccagcaccccccccccccccagctgctgttcctgatcctgctgagctgcccctggatccagggcctgcccctgaaggaggaggagatcctgcccgagcccggcagcgagacccccaccgtggccagcgaggccctggccgagctgctgcacggcgccctgctgagaagaggccccgagatgggctacctgcccggcccccccctgggccccgagggcggcgaggaggagaccaccaccaccatcatcaccaccaccaccgtgaccaccaccgtgaccagccccgtgctgtgcaacaacaacatcagcgagggcgagggctacgtggagagccccgacctgggcagccccgtgagcagaaccctgggcctgctggactgcacctacagcatccacgtgtaccccggctacggcatcgagatccaggtgcagaccctgaacctgagccaggaggaggagctgctggtgctggccggcggcggcagccccggcctggcccccagactgctggccaacagcagcatgctgggcgagggccaggtgctgagaagccccaccaacagactgctgctgcacttccagagccccagagtgcccagaggcggcggcttcagaatccactaccaggcctacctgctgagctgcggcttcccccccagacccgcccacggcgacgtgagcgtgaccgacctgcaccccggcggcaccgccaccttccactgcgacagcggctaccagctgcagggcgaggagaccctgatctgcctgaacggcaccagacccagctggaacggcgagacccccagctgcatggccagctgcggcggcaccatccacaacgccaccctgggcagaatcgtgagccccgagcccggcggcgccgtgggccccaacctgacctgcagatgggtgatcgaggccgccgagggcagaagactgcacctgcacttcgagagagtgagcctggacgaggacaacgacagactgatggtgagaagcggcggcagccccctgagccccgtgatctacgacagcgacatggacgacgtgcccgagagaggcctgatcagcgacgcccagagcctgtacgtggagctgctgagcgagacccccgccaaccccctgctgctgagcctgagattcgaggccttcgaggaggacagatgcttcgcccccttcctggcccacggcaacgtgaccaccaccgaccccgagtacagacccggcgccctggccaccttcagctgcctgcccggctacgccctggagccccccggcccccccaacgccatcgagtgcgtggaccccaccgagccccactggaacgacaccgagcccgcctgcaaggccatgtgcggcggcgagctgagcgagcccgccggcgtggtgctgagccccgactggccccagagctacagccccggccaggactgcgtgtggggcgtgcacgtgcaggaggagaagagaatcctgctgcaggtggagatcctgaacgtgagagagggcgacatgctgaccctgttcgacggcgacggccccagcgccagagtgctggcccagctgagaggcccccagcccagaagaagactgctgagcagcggccccgacctgaccctgcagttccaggccccccccggcccccccaaccccggcctgggccagggcttcgtgctgcacttcaaggaggtgcccagaaacgacacctgccccgagctgcccccccccgagtggggctggagaaccgccagccacggcgacctgatcagaggcaccgtgctgacctaccagtgcgagcccggctacgagctgctgggcagcgacatcctgacctgccagtgggacctgagctggagcgccgccccccccgcctgccagaagatcatgacctgcgccgaccccggcgagatcgccaacggccacagaaccgccagcgacgccggcttccccgtgggcagccacgtgcagtacagatgcctgcccggctacagcctggagggcgccgccatgctgacctgctacagcagagacaccggcacccccaagtggagcgacagagtgcccaagtgcgccctgaagtacgagccctgcctgaaccccggcgtgcccgagaacggctaccagaccctgtacaagcaccactaccaggccggcgagagcctgagattcttctgctacgagggcttcgagctgatcggcgaggtgaccatcacctgcgtgcccggccaccccagccagtggaccagccagccccccctgtgcaaggtggcctacgaggagctgctggacaacagaaagctggaggtgacccagaccaccgaccccagcagacagctggagggcggcaacctggccctggccatcctgctgcccctgggcctggtgatcgtgctgggcagcggcgtgtacatctactacaccaagctgcagggcaagagcctgttcggcttcagcggcagccacagctacagccccatcaccgtggagagcgacttcagcaaccccctgtacgaggccggcgacaccagagagtacgaggtgagcatctag

SEQ ID NO: 174309 - DNA, 2562 bp, Artificial Sequence
  derived and/or modified sequence
atgggtactccgagagctcagcatccgccaccacctcagctgctgtttctgatcctgctttcatgtccgtggattcagggcctccccctgaaggaggaagaaatccttccagaacctggctccgaaacccctaccgtggccagcgaggcactcgctgagctactgcatggcgccctgctgcgcaggggacccgagatgggatacctaccaggtcccccgctgggacccgaaggaggcgaggaagagacaacgacaacaataatcaccaccactacagtcactaccaccgttacatcccctgttctatgcaataataacatctcagaaggcgaagggtatgtcgagagccctgatttgggcagccctgtgagtcgcactctgggcctcctcgattgtacttatagcatacatgtctatccaggttacggaatcgaaatccaggttcagaccttaaacttgagtcaagaggaagagctgctggtgctggccgggggcggatccccgggcctcgcaccccgtctcctggccaattcaagcatgttgggggagggacaggtgcttagatcccccacaaatagactgctcctccacttccaaagccctagagttcctcggggaggcgggtttagaatccattatcaggcgtacctcctctcctgcggcttcccccccagaccggcacatggtgatgtgtccgtgactgacctccaccctggcggcactgccacattccattgtgacagcggctaccaactacagggcgaggagactctgatctgcctcaatgggactcggccctcatggaacggggagaccccttcttgtatggcctcttgtggaggcacaatccacaacgctaccctcggtcggatcgtgtcacctgagcccggcggtgcagtaggtcccaatctcacatgtaggtgggtcatcgaggcggccgaaggccgccggctccacctgcactttgaacgggtctctctagatgaagacaatgacagattgatggtgcggtctgggggtagtcctctgtcccctgtcatctacgatagcgacatggacgacgtaccagagaggggcttaatttccgatgcgcagtccctgtatgttgagctgctgagtgagactccagccaatccacttcttctctctcttcggttcgaggcatttgaggaggatcgctgctttgccccgttcttggcgcatgggaatgtcaccacgactgaccctgagtacaggcccggggctctggccaccttttcatgcctcccaggctatgccctggagccccctgggccccctaacgccattgagtgcgtagatcccaccgagccccactggaacgataccgaaccggcctgtaaagctatgtgcggcggcgagttatctgaacccgcaggagtggttttgtcacctgactggccacaaagctacagtcctgggcaagattgcgtatggggggtacacgtgcaggaggagaaacgcatcctgctccaagttgagattctcaacgtgcgggaaggtgacatgttgaccctgtttgatggagacggaccctccgccagagttctggcccagctcagaggcccccagccccggcgacggctcctctcttccggtccggatttgactttacagttccaggcccctcccggtcccccaaatccaggccttggacaaggattcgtactccactttaaggaagttcctagaaacgacacatgtccagagctacctccccccgaatgggggtggcggaccgctagccacggcgacctcattaggggaacagttctaacgtaccagtgcgaacccggatacgagctgcttggcagtgatatccttacctgccaatgggacctgtcttggtccgctgctcctcccgcctgccagaagattatgacatgcgccgatcccggggaaatagctaacggacaccgcaccgctagcgacgcaggatttccagttggttcccacgtacaataccgctgtctccctggctactctctggagggggctgcaatgttgacctgctattctagagataccggcacacctaaatggagtgatagagtgccaaaatgtgcattaaagtatgagccttgtctgaatccaggtgtgccggagaacgggtatcagacattgtataaacaccactatcaggcaggggagagtctccgatttttttgctatgaggggtttgagctgataggtgaggtgaccatcacttgcgtacctgggcatcccagccaatggaccagccagcctccactgtgcaaggtggcttacgaggagcttctggacaacagaaaattggaagttactcagacaactgacccctctagacagttggaggggggcaatcttgctttggccatccttctgcctctaggactggtcatcgtgttgggctctggggtgtacatctattatacaaaactccaaggtaaatccctcttcggcttttctggctcccacagctattcacccataaccgtggaatcggacttttcaaaccctctgtatgaggctggcgacacccgcgagtatgaagtctctatctag

SEQ ID NO: 174310 - DNA, 2562 bp, Artificial Sequence
  derived and/or modified sequence
atgggcaccccccgggcccagcaccccccaccaccccagctgctcttcctgatcctgctgagctgcccctggatccagggcctgcccctgaaggaggaggagatcctgcctgagcccggcagcgagacccccaccgtggccagcgaggccctggccgagctgctgcacggggccctgctgcggcggggccctgagatgggctacctgcccggcccccccctgggccctgagggcggggaggaggagaccaccaccaccatcatcaccaccaccaccgtgaccaccaccgtgaccagccctgtgctgtgcaacaacaacatcagcgagggggagggctacgtggagagcccagacctgggcagccctgtgtccaggaccctgggcctgctggactgcacctacagcatccacgtgtacccaggctacggcatcgagatccaggtgcagaccctgaacctgagccaggaggaggagctgctggtgctggccggcggcggcagccctggcctggccccccggctgctggccaacagctccatgctgggggagggccaggtgctgcggagccccaccaaccggctgctgctgcacttccagagcccccgggtgccccggggcggcggcttccgcatccactaccaggcctacctgctgagctgtggcttcccccccaggcctgcccatggagatgtgtctgtgacagacctgcaccctgggggcacagccaccttccactgtgacagcggctaccagctgcagggcgaggagaccctcatctgcctgaatggcacccggcccagctggaatggagagacccccagctgcatggccagctgtggcggcaccatccacaatgccaccctgggcagaattgtgtccccagagcccggcggcgctgtgggccccaacctgacctgccgctgggtgattgaggccgctgagggccggcggctgcacctgcactttgagcgggtgtccctggatgaagataatgaccggctgatggtgcgcagcggcggcagccccctgagccctgtgatctatgacagcgacatggatgatgtgcctgagcggggcctcatcagtgatgcccagagcctgtatgtggagctgctgtctgagaccccagccaaccccctgctgctgagcctgcgctttgaggcctttgaagaagatcgctgctttgcccccttcctggcccatggaaatgtgaccaccacagatcctgagtacagacctggggccctggccaccttcagctgcctgcccggctacgccctggagcccccaggccccccaaatgccattgaatgtgtggaccccacagagccccactggaatgacacagagcccgcctgcaaggccatgtgtggcggggagctgtctgagcctgctggggtggtgctgagcccagactggccccagagctacagccctggccaggactgtgtgtggggcgtgcacgtgcaggaggagaagaggatcctgctgcaggtggagatcctgaatgtgcgggagggggacatgctgaccctgtttgatggagatggccccagcgcccgggtgctggcccagctgcggggcccccagccccggcggcggctgctgagcagcggccctgacctgaccctgcagttccaggcccctcctggcccccccaaccctggcctgggccagggctttgtgctgcacttcaaggaggtgcccagaaatgacacctgcccagagctgcccccacctgagtggggctggaggacagccagccatggagacctgatccggggcaccgtgctgacctaccagtgtgagcccggctatgagctgctgggcagtgacatcctgacctgccagtgggacctgtcctggagcgctgcccccccagcctgccagaagatcatgacctgtgccgaccccggggagatcgccaacggccacaggacagccagtgatgctggcttccctgtgggcagccacgtgcagtaccgctgcctgcccggctacagcctggagggcgccgccatgctgacctgctacagccgggacaccggcacccccaagtggagcgacagagtgcccaagtgtgccctgaagtatgagccctgcctgaaccctggggtgcctgaaaatggctaccagaccctgtacaagcaccactaccaggccggggagagcctgcgcttcttctgctatgagggctttgagctgattggagaggtgaccatcacctgtgtgcccggccaccccagccagtggaccagccagccccccctgtgcaaggtggcctatgaggagctgctggacaacaggaagctggaggtgacccagaccacagaccccagccggcagctggagggcggcaacctggccctggccatcctgctgcccctgggcctggtgattgtgctgggcagcggcgtgtacatctactacaccaagctgcagggcaagagcctgtttggcttcagcggcagccacagctacagccccatcaccgtggagagtgacttcagcaaccccctgtatgaagctggggacacccgggagtatgaggtgtccatctag

SEQ ID NO: 174311 - DNA, 2562 bp, Artificial Sequence
  derived and/or modified sequence
atgggcaccccccgggcccagcaccccccccccccccagctgctgttcctaattttgcttagctgtccatggatccagggactcccattgaaagaagaggaaatccttccagagcccggttcggagacacctaccgtggccagtgaggcgctggctgagctgcttcacggggctctgctacggcgggggcctgaaatgggatatttgcccggaccccccttaggccccgaaggcggtgaagaagaaaccaccaccacgattattactaccactaccgtgacaaccactgtgacatcccccgtcttgtgcaataataatattagcgaaggcgaagggtacgtagagtctccagatctcggctcacccgttagccggacactgggactgctggattgtacatactccatccacgtatatccgggttatggaatagagatccaggtgcagacccttaatttgagtcaagaagaggagctgttagtgctagctggaggaggatctccagggttagcgccccgtctgctggccaatagctccatgttaggagaagggcaggtgcttcgctcaccaaccaatcggcttttgttgcatttccagtctcctcgggttccgagaggtgggggcttcagaattcactaccaggcctatctcttatcctgtggattccccccacggccagctcacggtgacgtctccgtgaccgatttgcaccccggggggacagccacatttcattgtgactctggctatcagctgcagggcgaagagaccttaatttgtctcaacggaacacggcccagctggaatggggagacaccttcctgtatggcaagctgcggaggaactatccacaatgctaccctgggccgaattgtgtctcctgagccggggggtgcggttgggcccaatctgacctgccgctgggtaatagaagccgcagaaggcaggcgactgcacctgcactttgaacgggtgagtctagacgaggataatgacaggttgatggtgagatctgggggtagtccacttagtcctgtgatatatgatagcgatatggacgacgttccagaaagaggcctgatatcagatgctcagagcctgtacgtggagcttcttagtgaaactcctgccaatccactgctgttgtccctgagatttgaagcttttgaggaggatcgctgcttcgctccgttccttgcccatggtaacgttaccaccacagaccccgagtatagaccaggggccttggccacgttctcttgcctgcccggatacgcattggagcctcccgggccaccgaatgccatcgaatgcgtcgaccctacagaaccccattggaacgacaccgaacctgcgtgtaaagctatgtgcgggggggagctgtcggagcccgccggggtagtcctgtccccagactggccccaatcctatagccccggccaggactgtgtgtggggagttcatgtccaggaggagaagaggatcttattgcaagtggagatcctcaacgtcagagagggcgacatgctgacgctgtttgatggggacggcccttccgccagagtgcttgcccagctaaggggaccccaaccgcgtcgtaggcttctatcatccggcccagatctgactttacagttccaggcccctcccggccctccgaatcctggcctgggccagggatttgtgttacatttcaaagaagttcccagaaatgacacatgcccagagctgcctccgcccgaatggggctggcgaacggctagtcacggagatctgatccgcggcacggtcttgacataccagtgcgaacctggatacgagctgctaggtagtgatattttgacctgccaatgggacctcagctggtctgccgcgccaccagcctgccagaaaataatgacctgcgcagatccaggggagatcgctaatgggcatcgcaccgcctctgacgccggttttccagtgggtagccatgtacagtacagatgccttcctgggtatagcctggaaggagctgcaatgctaacctgctactcacgcgatacgggcaccccaaagtggtcggaccgcgtgccaaaatgcgctctcaagtacgaaccttgtttaaaccctggagttcccgaaaacgggtaccagaccttgtacaagcatcactaccaggctggagagtccctgaggttcttttgttatgagggttttgaactgatcggcgaagtgaccattacttgtgtcccagggcatccaagtcaatggacttctcaaccaccactgtgcaaggtcgcatatgaagaattactggataatcgcaaactggaggtgacccagactacagatccttcccggcagctggagggcggcaacctcgctcttgcaattctgctgccgctggggcttgtgattgtgctgggcagcggcgtttacatctactatactaagctgcagggaaagtctctgttcggcttttcaggttctcacagctattcccctattacggtcgagagcgacttctcaaaccccctgtacgaagccggcgatactcgagaatacgaagttagcatctag

SEQ ID NO: 174312 - DNA, 2562 bp, Artificial Sequence
  derived and/or modified sequence
atgggtacaccacgggctcaacaccctccgcctccacagctactcttcttgattttactttcctgtccgtggatccagggtctaccactgaaagaagaggaaatcttacccgagcctggatctgagacacctacagtggctagcgaggctctcgccgagcttttacacggcgcattacttcggaggggacccgaaatgggctacctgcctggccctcctcttggaccggaaggcggagaggaggaaacgactacgaccattataacaacaaccacagtgacaaccactgttacatctcccgttctgtgcaataacaatatttctgagggggagggctacgtggagtcacccgacttaggctctccggtctcacgcacccttggcctgctggactgcacttattccattcacgtctatccagggtacggtatagaaatccaggtccaaaccctgaacctgtcgcaagaagaggagcttctggtcttggcgggtggaggaagtcctggcctggctccacgtttactggctaacagcagcatgctgggagaggggcaggttcttcgatcacctacaaacagactacttttgcacttccagtctcctagggtgcccagagggggaggttttcgcatccactaccaagcctatctgctctcgtgtgggttccccccacgccctgcacatggcgatgtgagcgttacggacctacatccaggcggtacagcaactttccattgtgatagcgggtatcagttacaaggggaagagactctcatatgcctaaacggcactcgccctagctggaatggagaaactccttcttgcatggctagctgcggtggtaccattcacaacgctacacttggtagaatcgtcagcccagaacctgggggagcggtcgggcctaatctgacttgtcgatgggtaattgaggccgctgaggggaggcgcctccaccttcattttgagagagtgtctctggacgaggataatgaccgactcatggtacgaagtggcggtagtcccctgagcccagtcatctatgattcagacatggacgatgtacctgagcgcggattaatttccgacgcccagtcactgtatgtggaactgctgtccgagactccggctaatccactgctgctgagcttaaggtttgaagcatttgaagaagaccgatgctttgcacctttcctggctcatgggaatgtgacaacaactgaccccgagtatcgtccaggagctctggcgaccttctcatgtcttcctggttacgcactggagccccctggacctcccaatgcaatagaatgcgtcgacccgacagagccccactggaatgatacggagccggcttgcaaggcaatgtgcggtggtgagctctcggagccggcaggtgtggttttgtccccagattggccacaatcctattcacctggacaggattgtgtttggggtgtgcatgtgcaagaagagaaacgaatcctgctccaggttgaaatcctgaatgtaagggagggagacatgttaactctgttcgacggggacggcccatcagcccgtgtgctggcccagctgcgaggccctcagcctagaaggagactactgtcttctggcccagacctgaccctacagtttcaggcgccacccggtccccctaaccccggtctgggacaaggattcgtacttcatttcaaagaagtccctagaaatgatacttgtcctgagctccccccaccggagtggggctggaggacagcgagccacggagacctgattcggggaaccgtcttgacgtaccagtgtgaacccggttacgaactgctcggatcagatattctgacctgccaatgggacctaagttggtccgccgctcccccagcatgtcagaaaatcatgacgtgtgctgacccaggtgagattgctaacgggcaccgcaccgcctctgacgcgggatttccagtagggagccacgttcagtaccgatgcctgccagggtactctctcgaaggagcagccatgctgacctgttactctcgggatacaggcacaccaaagtggagtgatcgcgttcccaaatgtgccctgaaatacgagccctgcttgaacccaggagtccccgaaaacgggtaccagactctctacaagcatcattatcaggcgggtgagagcctgcggttcttctgttacgagggttttgagctcatcggggaagttacgataacctgcgtgcccggacatccctcacagtggactagtcagcccccactttgcaaagttgcatacgaagagttactggacaaccggaagttggaagttactcaaacaacggatcctagccgccagctcgaaggagggaatttggcgttggccattctgctgcctttaggcctggtgatcgtattgggttctggcgtgtatatttattacacgaagctacaggggaaaagcctgttcggcttctccggctctcacagctacagtccgattacagttgagtccgatttctctaacccactgtacgaggccggagatactagggagtatgaggtctcgatatag

SEQ ID NO: 174313 - DNA, 3173 bp, Artificial Sequence
  derived and/or modified sequence
cggagacggaggaaaggtggcagccagattacttagagaggcacagaggagagagatcggggtgagtcgccatggggactcccagggcccagcacccgccgcctccccagctgctgttcctaattctgctgagctgtccctggatccagggtctgcccctgaaggaggaggagatattgccagagcctggaagtgagacccccacggtggcctctgaggccctggctgaactgcttcatggggccctgctgaggaggggcccagagatgggctacctgccagggcctccccttgggcctgagggaggagaggaggagacgacgaccaccatcatcaccacgacaactgttaccactacggtgaccagcccagttctgtgtaataacaacatctccgagggcgaagggtatgtggagtctccagatctggggagccccgtcagccgcaccctggggctcctggactgcacttacagcatccatgtctaccctggctacggcattgagatccaggtgcagacgctgaacctgtcacaggaagaggagctcctggtgctggctggtgggggatccccaggcctggccccccgactcctggccaactcatccatgcttggagaaggacaagtccttcggagcccaaccaaccggctgcttctgcacttccagagcccacgggtcccaaggggcggtggcttcaggatccactatcaggcctacctcctgagctgtggcttccctccccggccggcccatggggacgtgagtgtgacggacctgcaccctgggggcactgccacctttcactgtgattcgggctaccagctgcagggagaggagaccctcatctgcctcaatggcacccggccatcctggaacggtgaaacccccagctgcatggcatcctgtggtggcaccatccacaatgccaccctgggccgcatcgtgtccccagagcctgggggagccgtagggcccaacctcacctgccgttgggtcattgaagcagctgaggggcgccggctgcacctgcactttgaaagggtctcgctggatgaggacaatgaccggctgatggtgcgctcagggggcagccccctatcccccgtgatctatgattcggacatggacgatgtccccgagcggggtctcatcagtgacgcccagtccctctacgtggagctgctgtcagagacacctgccaatcccctgctgttaagccttcgatttgaagcctttgaggaggatcgctgcttcgcccccttcctggcacatggaaatgtcactaccacggaccctgagtatcgcccaggggcactggcaaccttctcgtgcctcccaggatatgccctggagccccctgggccccccaatgccatcgaatgtgtggatcccacagaaccccactggaacgacacagagccggcctgcaaagccatgtgtggaggggagctgtcggaaccagctggcgtggtcctctctcccgactggccccagagctatagcccgggccaagactgcgtgtggggcgtgcacgtccaggaagagaagcgcatcttgctccaagttgagatattgaatgtgcgggaaggggacatgctgacgctgttcgacggggacggtcccagcgcccgagtcttggcccagctgcggggacctcagccgcgccgccgccttctctcctctgggcccgacctcacactgcagtttcaggcaccgcccgggcccccaaatccaggcctgggccagggcttcgtattgcacttcaaagaggtcccgaggaacgacacgtgccccgagctgccacctccggagtggggctggagaacggcatcccacggggacctgatccggggcacggtgctcacctaccagtgcgagcctggctacgagctgctaggctccgacattctcacttgccagtgggacctgtcttggagcgccgcgccgcccgcctgccaaaagatcatgacttgtgctgaccctggcgagattgccaacgggcaccgcaccgcctcggacgccggcttccccgttggctcccacgtccagtaccgctgcctgccagggtacagcctcgagggggcagccatgctcacctgctacagccgggacacaggcacacccaagtggagcgatagggtccccaaatgcgccttgaagtacgagccgtgcctgaacccgggggttcccgagaatggctaccagacgctgtacaagcaccactaccaggcgggcgagtctctgcgcttcttctgctatgagggctttgagcttatcggcgaggtcaccatcacctgtgtgcccggccacccctcccagtggaccagccagcccccactctgcaaagttgcctatgaggagctcctggacaaccgaaaactggaagtgacccagaccacagatccatcacggcagctggaaggggggaacctggccctggccatcctgctgcctctaggcttggtcattgtcctcggcagtggcgtttacatctactacaccaagcttcagggaaagtcccttttcggcttctcgggctcccactcctacagccccatcaccgtggagtcggacttcagcaacccgctgtatgaagctggggatacgcgggagtatgaagtttccatctgaaccccaagactacagctgcaggacccaggacgcccctcccctcctcattcgggcagagggaaatacgggacccggtctctgcctcctggctgccctcctccctggctgtgtaaatagtctccctatcccacgagggggctttgatggccctggagatcctacagtaaataaaccagcatcctgccgcccaaagccgcctcttctcagttgccaaacgaggggcctgccccccgccctaccggcttttggattctgggaggggaactctgcctccctgcaaatcttgcagcccctcctgcccagggcacccctcaaggactgcccccgatagctctactgttcccttggccacgaaggtgcccccctcccagatgccctggccctaggcctgactccggccaggagggtcagaagaaggacaaaggggagagctgggacaaggccttgcccccttcctgccatctccccaacccacagtctctccacctttgcttctgaattcttgtttttgagcaataaacagaaaatcgccacttgtaa

SEQ ID NO: 174314 - protein, 361 aa, Artificial Sequence
  derived and/or modified sequence
MAGGRHRRVVGTLHLLLLVAALPWASRGVSPSASAWPEEKNYHQPAILNSSALRQIAEGTSISEMWQNDLQPLLIERYPGSPGSYAARQHIMQRIQRLQADWVLEIDTFLSQTPYGYRSFSNIISTLNPTAKRHLVLACHYDSKYFSHWNNRVFVGATDSAVPCAMMLELARALDKKLLSLKTVSDSKPDLSLQLIFFDGEEAFLHWSPQDSLYGSRHLAAKMASTPHPPGARGTSQLHGMDLLVLLDLIGAPNPTFPNFFPNSARWFERLQAIEHELHELGLLKDHSLEGRYFQNYSYGGVIQDDHIPFLRRGVPVLHLIPSPFPEVWHTMDDNEENLDESTIDNLNKILQVFVLEYLHL

SEQ ID NO: 174315 - protein, 312 aa, Artificial Sequence
  derived and/or modified sequence
MAGGRHRRVVGTLHLLLLVAALPWASRGVSPSASAWPEEKHIMQRIQRLQADWVLEIDTFLSQTPYGYRSFSNIISTLNPTAKRHLVLACHYDSKYFSHWNNRVFVGATDSAVPCAMMLELARALDKKLLSLKTVSDSKPDLSLQLIFFDGEEAFLHWSPQDSLYGSRHLAAKMASTPHPPGARGTSQLHGMDLLVLLDLIGAPNPTFPNFFPNSARWFERLQAIEHELHELGLLKDHSLEGRYFQNYSYGGVIQDDHIPFLRRGVPVLHLIPSPFPEVWHTMDDNEENLDESTIDNLNKILQVFVLEYLHL

SEQ ID NO: 174316 - DNA, 1086 bp, Artificial Sequence
  derived and/or modified sequence
atggccggcggtcgccataggagagtggtgggaaccctccacctattattgctggtcgctgcactcccttgggccagtcggggcgtatcccccagcgcctctgcctggcccgaagaaaagaattaccaccaacccgcaatcctgaattcatctgcccttagacagattgcagaggggacctcgatctcagagatgtggcaaaatgatctgcagccacttctgattgaacggtatcccggcagtccaggctcctatgccgcccggcagcacattatgcagaggattcaacgcctgcaggcagattgggtgttggaaattgacacctttctgtcacaaaccccatatggataccggtcattttccaacatcatatcaacactcaaccccactgcaaagagacacctggtgctagcctgccactatgacagcaagtacttctctcattggaacaaccgcgtctttgtgggggctactgactctgccgtgccctgcgctatgatgcttgagctggctcgcgccctcgacaagaagctgctgtcactgaaaacagtttctgacagcaaaccagatctgtccctccagcttattttttttgatggcgaagaggctttcttgcattggtctccccaggactctttgtacgggagtcgacacttggcggccaagatggcatcaaccccccatcctcctggcgctcgcggcacctcccagctgcatggcatggacttgctcgtactgctggacctgataggggccccaaatcccaccttccccaatttcttcccaaatagcgcccggtggttcgaaaggctgcaggctatcgaacacgaactacacgagctcgggcttcttaaagatcactctctggaaggcaggtacttccagaactattcatacggaggcgtcatccaagacgatcacatccctttccttcgccggggcgtccccgtattacatcttatcccttcaccctttcctgaggtgtggcatactatggacgacaacgaggagaacttggacgagtctacgattgataaccttaataaaattttacaggtcttcgtgctggaatacctgcatttatag

SEQ ID NO: 174317 - DNA, 939 bp, Artificial Sequence
  derived and/or modified sequence
atggccggcggccgacaccgcagagtagttggcaccctgcacctactgctactcgtggcagcgcttccatgggcaagtagaggggtgtcacctagtgcttctgcatggcccgaggagaagcacatcatgcagagaattcagcggttgcaggccgattgggtgttagagatcgatactttcttatcccaaactccctatggctacagaagcttctctaacataatctccacacttaaccccaccgcaaagcgacacctggtgttagcctgtcattacgactcaaagtacttttcacactggaacaatagagtgtttgtgggggcgaccgacagcgccgtgccctgcgccatgatgctagagctcgctcgagctctcgacaaaaagcttctgtcactgaagactgtgagcgacagcaagccagatctgtcgttacagctaatcttctttgacggtgaagaggcttttctacattggtcccctcaggactctctctatgggtcgaggcatctggcggcaaagatggcaagtacaccccacccccctggggcacggggtaccagccagcttcacggcatggacctcctggtgttgctcgaccttatcggcgctccgaatccaaccttccccaattttttccctaattccgcgcggtggttcgagcggctacaggcgattgaacacgagctgcatgagctggggctgctcaaggaccactctctcgagggccgttactttcaaaactattcttacggcggagtcatccaagatgaccatattccctttctccggcggggagtgccagttctccatctgattccctctcccttccccgaagtctggcatactatggatgataacgaggaaaatctggacgagagtactattgacaacctcaataagatcctccaggtgtttgtgctcgagtacctgcatctctag

SEQ ID NO: 174318 - DNA, 1739 bp, Artificial Sequence
  derived and/or modified sequence
ctgcagcctgcgcgacgcggcgggaggctacccgggggcgatgggaaggcgggcgcagtcgacccaagggtggagaagagggaaggcgaaggacgcgcgttcccgggctcgtgaccgccagcggcccggggaacccgctcccagacagactcggagagatggcaggcggaagacaccggcgcgtcgtgggcaccctccacctgctgctgctggtggccgccctgccctgggcatccaggggggtcagtccgagtgcctcagcctggccagaggagaagaattaccaccagccagccattttgaattcatcggctcttcggcaaattgcagaaggcaccagtatctctgaaatgtggcaaaatgacttacagccattgctgatagagcgatacccgggatcccctggaagctatgctgctcgtcagcacatcatgcagcgaattcagaggcttcaggctgactgggtcttggaaatagacaccttcttgagtcagacaccctatgggtaccggtctttctcaaatatcatcagcaccctcaatcccactgctaaacgacatttggtcctcgcctgccactatgactccaagtatttttcccactggaacaacagagtgtttgtaggagccactgattcagccgtgccatgtgcaatgatgttggaacttgctcgtgccttagacaagaaactcctttccttaaagactgtttcagactccaagccagatttgtcactccagctgatcttctttgatggtgaagaggcttttcttcactggtctcctcaagattctctctatgggtctcgacacttagctgcaaagatggcatcgaccccgcacccacctggagcgagaggcaccagccaactgcatggcatggatttattggtcttattggatttgattggagctccaaacccaacgtttcccaatttttttccaaactcagccaggtggttcgaaagacttcaagcaattgaacatgaacttcatgaattgggtttgctcaaggatcactctttggaggggcggtatttccagaattacagttatggaggtgtgattcaggatgaccatattccatttttaagaagaggtgttccagttctgcatctgataccgtctcctttccctgaagtctggcacaccatggatgacaatgaagaaaatttggatgaatcaaccattgacaatctaaacaaaatcctacaagtctttgtgttggaatatcttcatttgtaatactctgatttagtttaggataattggttctagaattgaattcaaaagtcaaggcatcatttaaaataatctgatttcagacaaatgctgtgtggaaacatctatcctatagatcatcctattcttatgtgtctttggttatcagatcaattacagaataattgtgttgtgatattgtgtcctaaattgctcattaatttttatttacagattgaaaaagagggaccgtgtaaagaaaatggaaaataaatatctttcaaagactcttttagataaacacgatgaggcaaaatcaggttcattcattcaacgatagtttctcaacagtacttaaatagcggttggaaaacgtagccttcattttatgattttttcatatgtggaaatctattacatgtaatacaaaacaaacatgtagtttgaaggcggtcagatttctttgagaaatctttgtagagttaattttatggaaattaaaatcagaattaaatgcta

SEQ ID NO: 174319 - DNA, 1456 bp, Artificial Sequence
  derived and/or modified sequence
cgctcccagacagactcggagagatggcaggcggaagacaccggcgcgtcgtgggcaccctccacctgctgctgctggtggccgccctgccctgggcatccaggggggtcagtccgagtgcctcagcctggccagaggagaagcacatcatgcagcgaattcagaggcttcaggctgactgggtcttggaaatagacaccttcttgagtcagacaccctatgggtaccggtctttctcaaatatcatcagcaccctcaatcccactgctaaacgacatttggtcctcgcctgccactatgactccaagtatttttcccactggaacaacagagtgtttgtaggagccactgattcagccgtgccatgtgcaatgatgttggaacttgctcgtgccttagacaagaaactcctttccttaaagactgtttcagactccaagccagatttgtcactccagctgatcttctttgatggtgaagaggcttttcttcactggtctcctcaagattctctctatgggtctcgacacttagctgcaaagatggcatcgaccccgcacccacctggagcgagaggcaccagccaactgcatggcatggatttattggtcttattggatttgattggagctccaaacccaacgtttcccaatttttttccaaactcagccaggtggttcgaaagacttcaagcaattgaacatgaacttcatgaattgggtttgctcaaggatcactctttggaggggcggtatttccagaattacagttatggaggtgtgattcaggatgaccatattccatttttaagaagaggtgttccagttctgcatctgataccgtctcctttccctgaagtctggcacaccatggatgacaatgaagaaaatttggatgaatcaaccattgacaatctaaacaaaatcctacaagtctttgtgttggaatatcttcatttgtaatactctgatttagtttaggataattggttctagaattgaattcaaaagtcaaggcatcatttaaaataatctgatttcagacaaatgctgtgtggaaacatctatcctatagatcatcctattcttatgtgtctttggttatcagatcaattacagaataattgtgttgtgatattgtgtcctaaattgctcattaatttttatttacagattgaaaaagagggaccgtgtaaagaaaatggaaaataaatatctttcaaagactcttttagataaacacgatgaggcaaaatcaggttcattcattcaacgatagtttctcaacagtacttaaatagcggttggaaaacgtagccttcattttatgattttttcatatgtggaaatctattacatgtaatacaaaacaaacatgtagtttgaaggcggtcagatttctttgagaaatctttgtagagttaattttatggaaattaaaatcagaattaaatgct

SEQ ID NO: 174320 - DNA, 1086 bp, Artificial Sequence
  derived and/or modified sequence
atggccggcggccgccacagaagagtggtgggcaccctgcacctgctgctgctggtggccgccctgccctgggccagccggggcgtgagccccagcgccagcgcctggccagaggagaagaactaccaccagcctgccatcctgaacagcagcgccctgcggcagattgctgagggcaccagcatcagcgagatgtggcagaatgacctgcagcccctgctgattgagcgctacccaggcagccctggcagctatgctgcccggcagcacatcatgcagaggatccagaggctgcaggccgactgggtgctggagattgacaccttcctgagccagaccccctacggctaccgctccttcagcaacatcatcagcaccctgaaccccacagccaagaggcacctggtgctggcctgccactatgacagcaagtacttcagccactggaacaacagagtgtttgtgggcgccacagacagcgctgtgccctgtgccatgatgctggagctggcccgggccctggacaagaagctgctgagcctgaagacagtgtctgacagcaagccagacctgagcctgcagctgatcttctttgatggagaggaggccttcctgcactggagcccccaggacagcctgtatggcagccgccacctggccgccaagatggccagcaccccccaccccccaggggcccggggcaccagccagctgcacggcatggacctgctggtgctgctggacctgattggagcccccaaccccaccttccccaacttcttccccaacagcgcccgctggtttgagcggctgcaggccatcgagcacgagctgcacgagctgggcctgctgaaggaccacagcctggagggccgctacttccagaactacagctatggaggagtcatccaggatgaccacatccccttcctgcggcggggcgtgcctgtgctgcacctgatccccagccccttccctgaggtgtggcacaccatggatgacaatgaggagaacctggatgagagcaccatcgacaacctgaacaagatcctgcaggtgtttgtgctggagtacctgcacctgtag

SEQ ID NO: 174321 - DNA, 939 bp, Artificial Sequence
  derived and/or modified sequence
atggccggcggccgccacagaagagtggtgggcaccctgcacctgctgctgctggtggccgccctgccctgggccagccggggcgtgagccccagcgccagcgcctggccagaggagaagcacatcatgcagaggatccagaggctgcaggccgactgggtgctggagattgacaccttcctgagccagaccccctacggctaccgctccttcagcaacatcatcagcaccctgaaccccacagccaagaggcacctggtgctggcctgccactatgacagcaagtacttcagccactggaacaacagagtgtttgtgggcgccacagattctgctgtgccctgtgccatgatgctggagctggcccgggccctggacaagaagctgctgagcctgaagacagtgtctgacagcaagccagacctgagcctgcagctgatcttctttgatggagaggaggccttcctgcactggagcccccaggacagcctgtatggcagccgccacctggccgccaagatggccagcaccccccaccccccaggggcccggggcaccagccagctgcacggcatggacctgctggtgctgctggacctgattggagcccccaaccccaccttccccaacttcttccccaacagcgcccgctggtttgagcggctgcaggccattgaacatgagctgcacgagctgggcctgctgaaggaccacagcctggagggccgctacttccagaactacagctatggaggagtcatccaggatgaccacatccccttcctgcggcggggcgtgcctgtgctgcacctgatccccagccccttccctgaggtgtggcacaccatggatgacaatgaggagaacctggatgagagcaccatcgacaacctgaacaagatcctgcaggtgtttgtgctggagtacctgcacctgtag

SEQ ID NO: 174322 - DNA, 1086 bp, Artificial Sequence
  derived and/or modified sequence
atggccggcggccggcaccggcgggtggtgggcaccctgcacctgttattattggtggctgctctgccctgggcctctcgcggcgtgagtccttccgcctcagcatggcccgaggagaaaaactatcaccagcctgctattctgaactcttcagccttacgccagatcgccgaaggcacatcaatctcagagatgtggcagaatgatttgcagcccctgctgattgagcgatatcctggtagtcccgggtcttatgccgctcgacagcatatcatgcagcgtattcagcgactgcaagctgactgggtactggagatcgacacatttttgagccaaacaccttatgggtacaggagtttctccaacatcatcagcacactgaatcctactgcgaaacgccatctcgtcctggcatgccactatgatagtaagtacttcagtcactggaacaacagggtttttgtcggcgctaccgattccgcagtaccctgtgcaatgatgttggaacttgctcgcgcactggacaaaaaattgctgagcctgaagacagtgtcagattccaaacctgatcttagtctgcagctcatattctttgatggcgaagaggctttcctgcattggtctccacaggatagcctgtacggaagtagacacctggctgccaagatggccagcactcctcacccccccggtgcaaggggaacaagccagctgcatgggatggacctccttgtcctgcttgacctaattggcgctcccaatcccacctttcccaatttctttccaaacagtgccaggtggttcgagcggctgcaagccatagagcacgagcttcatgagctgggattgcttaaggatcattccctggaaggccgctacttccagaactatagttatggaggtgtgatccaggatgaccacatccctttcctgcgaaggggtgtccccgttctccacctgatcccttcacctttccccgaggtatggcatactatggatgacaatgaagagaatctcgacgagtcaaccatcgataatctgaacaagatcctacaagtgttcgtgctggaatatctgcacctgtag

SEQ ID NO: 174323 - DNA, 939 bp, Artificial Sequence
  derived and/or modified sequence
atggccggcggccggcaccggcgggtggtgggcaccctgcacctgctgctgctcgttgccgctttgccttgggcctcccgcggggtttcacctagcgcttctgcctggcctgaagaaaaacatataatgcagcgcatacaaaggttgcaagcagactgggtgctggaaatcgatacctttcttagtcagaccccgtacgggtacagatcgttctccaacattatctcgaccctgaacccaactgccaagcggcacctggtgttggcttgccactatgacagcaagtacttttcacactggaacaaccgggttttcgtgggcgcaactgactccgccgtgccatgcgccatgatgctggagttagctcgcgctctggacaaaaagcttctctcactgaaaactgtctccgactctaagccagatctgtcactgcagctgatcttttttgacggcgaagaggccttcctgcattggtcgccccaagactccctctacggtagcagacacctcgccgcaaagatggcatcaaccccccatcctccaggtgctcgtggtaccagtcagttgcatggcatggacctcttggtgctattggacctgattggggcaccaaacccaaccttccccaacttttttcctaactccgcccgctggttcgagcgcttacaggcaatcgagcacgaactgcatgaacttgggctgctgaaggatcactctctggagggtagatactttcagaattatagctatggtggggtgatccaggacgaccacatccctttcctacgcagaggcgtccctgtgcttcacctgattcccagcccgttccctgaagtttggcatactatggacgataatgaggagaacctcgacgagagcacaatcgacaatctcaacaagattcttcaggttttcgtgttagagtatctccatctctag

SEQ ID NO: 174324 - DNA, 1086 bp, Artificial Sequence
  derived and/or modified sequence
atggctggaggaagacatcgtagggtggtgggcaccctacatctcctgctgttggttgctgccttaccctgggcaagtagaggagtctcgccctccgctagtgcctggcccgaggagaaaaattaccaccagccagcaatcctgaattctagtgctcttcgacagattgctgagggcacatctatttccgagatgtggcagaacgacctccagcctctccttattgaacggtatcccggttccccgggatcctatgcagcacgccagcacatcatgcagcgaattcagcggcttcaggccgactgggtcctcgaaatcgacactttcttatcacagactccatatggctatagaagtttttccaatataatcagcactctgaatcccactgccaaaagacatcttgttcttgcctgtcactatgacagcaagtatttcagccattggaataacagagtcttcgttggcgctacggacagtgcagtgccttgcgccatgatgttggaacttgctagggcccttgacaaaaaattactgtctctgaaaacagtgtcagattcaaaacctgacttgtcactgcagctcattttttttgacggggaagaagcatttctacactggtcaccacaggactcactgtacggctcgcggcatttagccgctaaaatggcgtccacacctcacccacccggtgcgaggggaacttctcagctccatgggatggatctcctggtgctgctcgatctgatcggggcaccaaatcccaccttcccgaacttttttccgaatagtgccaggtggtttgaacggctgcaggccatcgagcacgagttgcatgagctgggtctcctgaaggatcacagcttagagggtaggtatttccagaactattcctatggcggagttatccaggatgaccacatccctttcctgcggagaggagttcctgtgttacacttgattccgtcgcccttccctgaagtctggcacaccatggatgataatgaagaaaacctcgacgaaagcaccatcgacaaccttaataagatcctgcaggtcttcgtactggagtacctgcatctgtag

SEQ ID NO: 174325 - DNA, 939 bp, Artificial Sequence
  derived and/or modified sequence
atggctggcggtcgccatagaagggtggtaggtactctacaccttctgctgttagtggctgctttaccctgggctagccgcggagtgagcccctccgccagtgcctggccggaggaaaaacacattatgcagcggatccagagattacaggcagattgggtcctggagattgacacctttctgagtcaaactccttatggctatagatcctttagtaatattattagcactcttaatccaaccgccaagcgtcacctggttttagcctgtcactacgattccaaatatttctctcattggaataatcgtgtttttgtcggagccacggatagcgccgtgccgtgtgctatgatgctcgagctcgctcgggcattggacaagaaacttctaagcctcaaaactgtttctgattcaaaaccagacctaagcttgcaactgatctttttcgacggggaggaagcattcttacattggtctccccaggactccttgtacggatctagacaccttgcagctaagatggcttcaactccccacccacccggtgccagggggacaagtcagctgcatggaatggatttgcttgttttgttggacttaataggtgctccaaatccgactttcccaaatttcttccccaacagcgcccgttggttcgagcggctgcaggccatcgaacatgagcttcatgagttagggcttttaaaggatcattcccttgaagggcgatattttcagaactactcctatggcggagtgatccaggatgaccacataccctttctcaggcggggagtccccgtcctacacctaattccatctccctttcccgaggtctggcacacaatggacgataacgaagagaatctggatgagtccaccattgacaatttaaataagatactgcaagtgttcgtattggagtacctgcatctgtag

SEQ ID NO: 174326 - DNA, 1086 bp, Artificial Sequence
  derived and/or modified sequence
atggccggcggcagacacagaagagtggtgggcaccctgcacctgctgctgctggtggccgccctgccctgggccagcagaggcgtgagccccagcgccagcgcctggcccgaggagaagaactaccaccagcccgccatcctgaacagcagcgccctgagacagatcgccgagggcaccagcatcagcgagatgtggcagaacgacctgcagcccctgctgatcgagagataccccggcagccccggcagctacgccgccagacagcacatcatgcagagaatccagagactgcaggccgactgggtgctggagatcgacaccttcctgagccagaccccctacggctacagaagcttcagcaacatcatcagcaccctgaaccccaccgccaagagacacctggtgctggcctgccactacgacagcaagtacttcagccactggaacaacagagtgttcgtgggcgccaccgacagcgccgtgccctgcgccatgatgctggagctggccagagccctggacaagaagctgctgagcctgaagaccgtgagcgacagcaagcccgacctgagcctgcagctgatcttcttcgacggcgaggaggccttcctgcactggagcccccaggacagcctgtacggcagcagacacctggccgccaagatggccagcaccccccacccccccggcgccagaggcaccagccagctgcacggcatggacctgctggtgctgctggacctgatcggcgcccccaaccccaccttccccaacttcttccccaacagcgccagatggttcgagagactgcaggccatcgagcacgagctgcacgagctgggcctgctgaaggaccacagcctggagggcagatacttccagaactacagctacggcggcgtgatccaggacgaccacatccccttcctgagaagaggcgtgcccgtgctgcacctgatccccagccccttccccgaggtgtggcacaccatggacgacaacgaggagaacctggacgagagcaccatcgacaacctgaacaagatcctgcaggtgttcgtgctggagtacctgcacctgtag

SEQ ID NO: 174327 - DNA, 939 bp, Artificial Sequence
  derived and/or modified sequence
atggccggcggcagacacagaagagtggtgggcaccctgcacctgctgctgctggtggccgccctgccctgggccagcagaggcgtgagccccagcgccagcgcctggcccgaggagaagcacatcatgcagagaatccagagactgcaggccgactgggtgctggagatcgacaccttcctgagccagaccccctacggctacagaagcttcagcaacatcatcagcaccctgaaccccaccgccaagagacacctggtgctggcctgccactacgacagcaagtacttcagccactggaacaacagagtgttcgtgggcgccaccgacagcgccgtgccctgcgccatgatgctggagctggccagagccctggacaagaagctgctgagcctgaagaccgtgagcgacagcaagcccgacctgagcctgcagctgatcttcttcgacggcgaggaggccttcctgcactggagcccccaggacagcctgtacggcagcagacacctggccgccaagatggccagcaccccccacccccccggcgccagaggcaccagccagctgcacggcatggacctgctggtgctgctggacctgatcggcgcccccaaccccaccttccccaacttcttccccaacagcgccagatggttcgagagactgcaggccatcgagcacgagctgcacgagctgggcctgctgaaggaccacagcctggagggcagatacttccagaactacagctacggcggcgtgatccaggacgaccacatccccttcctgagaagaggcgtgcccgtgctgcacctgatccccagccccttccccgaggtgtggcacaccatggacgacaacgaggagaacctggacgagagcaccatcgacaacctgaacaagatcctgcaggtgttcgtgctggagtacctgcacctgtag

SEQ ID NO: 174328 - protein, 1393 aa, Artificial Sequence
  derived and/or modified sequence
MACSIVQFCYFQDLQAARDFLFPHLREEILSGALRRDPSKSTDWEDDGWGAWEENEPQEPEEEGNTCKTQKTSWLQDCVLSLSPTNDLMVIAREQKAVFLVPKWKYSDKGKEEMQFAVGWSGSLNVEEGECVTSALCIPLASQKRSSTGRPDWTCIVVGFTSGYVRFYTENGVLLLAQLLNEDPVLQLKCRTYEIPRHPGVTEQNEELSILYPAAIVTIDGFSLFQSLRACRNQVAKAAASGNENIQPPPLAYKKWGLQDIDTIIDHASVGIMTLSPFDQMKTASNIGGFNAAIKNSPPAMSQYITVGSNPFTGFFYALEGSTQPLLSHVALAVASKLTSALFNAASGWLGWKSKHEEEAVQKQKPKVEPATPLAVRFGLPDSRRHGESICLSPCNTLAAVTDDFGRVILLDVARGIAIRMWKGYRDAQIGWIQTVEDLHERVPEKADFSPFGNSQGPSRVAQFLVIYAPRRGILEVWSTQQGPRVGAFNVGKHCRLLYPGYKIMGLNNVTSQSWQPQTYQICLVDPVSGSVKTVNVPFHLALSDKKSERAKDMHLVKKLAALLKTKSPNLDLVETEIKELILDIKYPATKKQALESILASERLPFSCLRNITQTLMDTLKSQELESVDEGLLQFCANKLKLLQLYESVSQLNSLDFHLDTPFSDNDLALLLRLDEKELLKLQALLEKYKQENTRTNVRFSDDKDGVLPVKTFLEYLEYEKDVLNIKKISEEEYVALGSFFFWKCLHGESSTEDMCHTLESAGLSPQLLLSLLLSVWLSKEKDILDKPQSICCLHTMLSLLSKMKVAIDETWDSQSVSPWWQQMRTACIQSENNGAALLSAHVGHSVAAQISNNMTEKKFSQTVLGADSEALTDSWEALSLDTEYWKLLLKQLEDCLILQTLLHSKGNTQTSKVSSLQAEPLPRLSVKKLLEGGKGGIADSVAKWIFKQDFSPEVLKLANEERDAENPDEPKEGVNRSFLEVSEMEMDLGAIPDLLHLAYEQFPCSLELDVLHAHCCWEYVVQWNKDPEEARFFVRSIEHLKQIFNAHVQNGIALMMWNTFLVKRFSAATYLMDKVGKSPKDRLCRRDVGMSDTAMTSFLGSCLDLLQILMEADVSRDEIQVPVLDTEDAWLSVEGPISIVELALEQKHIHYPLVEHHSILCSILYAVMRFSLKTVKPLSLFDSKGKNAFFKDLTSIQLLPSGEMDPNFISVRQQFLLKVVSAAVQAQHSATKVKDPTEEATPTPFGKDQDWPALAVDLAHHLQVSEDVVRRHYVGELYNYGVDHLGEEAILQVHDKEVLASQLLVLTGQRLAHALLHTQTKEGMELLARLPPTLCTWLKAMDPQDLQNTEVPIATTAKLVNKVIELLPEKHGQYGLALHLIEAVEAISLPSL

SEQ ID NO: 174329 - DNA, 4182 bp, Artificial Sequence
  derived and/or modified sequence
atggcatgttcgatagtccagttttgctattttcaggatctgcaggcagcgcgggatttcctgtttccccatctgagagaggagattcttagtggcgctctcaggagagacccctccaaatctacagattgggaagatgacggatggggggcatgggaggaaaatgaaccccaagaacctgaggaagaaggaaacacttgtaagacacagaagaccagctggctgcaggattgtgttctttccctgtcaccaactaacgacctcatggtcatcgccagagaacaaaaggcagtgttcctggtccccaaatggaagtactcagataaaggcaaggaggaaatgcaatttgcggtcggctggtccggatcattgaacgtcgaagagggtgagtgcgtcacctcagctctctgtatcccccttgctagtcagaaaagatcaagtaccggacggccagattggacatgcatagtggtggggttcaccagtggttatgtgcgcttttataccgaaaatggagtgttattgcttgcccaattgctgaacgaagaccccgttctgcagctaaaatgccgaacctatgagatccctaggcatccaggagttacagagcagaacgaggagctgtctatcctgtaccccgccgctatcgtgacaatcgacggcttctctctctttcagagcctgcgagcctgtcgcaaccaagttgctaaggctgcggccagtggaaatgagaacatccagccacccccattggcctacaaaaagtggggacttcaggatatcgacactattatcgaccatgcgagcgtggggattatgaccctctccccattcgatcaaatgaaaacagcgtccaatataggggggtttaatgctgcaattaagaattcaccacccgcaatgtcacagtatatcactgttgggtccaatccatttactggctttttttatgccctcgaaggtagcacacagcctttgctctcccacgttgctctcgccgtggcatcaaaactgaccagtgcactcttcaacgctgcttctgggtggctgggttggaagtctaaacacgaggaagaagccgttcagaagcagaagccaaaggtagagcccgcaacccctctcgcagtaagatttggcctgccagacagccgtaggcatggggagagtatttgcctctctccctgcaatactctggccgccgtgaccgacgatttcggccgcgtgatcctactggacgtggctcgtggaattgccatcaggatgtggaagggctacagagacgcccagatcgggtggatccagacagttgaggatctgcatgagcgggtgccagagaaagcagacttctcaccattcggcaacagtcaagggcccagccgcgtagcccagttcctggtcatttatgccccacggagaggcatcttagaggtgtggagcactcaacagggccctcgggttggggcattcaatgtaggcaagcactgccgactgctctaccccggctacaaaattatgggactcaataatgtgacctcacagtcttggcagcctcagacttaccaaatatgtctggtggatcctgtgtccggctccgtcaagacagttaatgtacctttccaccttgcactgtcagataagaaatccgaacgagctaaagacatgcacctcgtgaaaaaactcgctgcactgcttaagacaaaatctcccaatctagatctcgtggagacagagatcaaggagctgattctggatatcaagtaccctgcaactaagaaacaagcactggagtccatcctagcctctgaacggcttcccttcagctgtctccgaaatataacccaaacactcatggacaccttaaagagtcaagaactggagtccgtggatgagggactgcttcagttttgcgcaaacaagctgaaactgttacagctgtacgagtccgtttcccagctgaattcactagacttccatctcgacacaccatttagcgataacgacctggccctcctgctgagattggacgaaaaagagttgctgaaactacaggccctgttagaaaagtacaagcaggagaacactcgaacaaatgtgcggttctcagacgacaaagacggggtgctgccagtgaaaacctttctggaatatctggaatatgaaaaagatgtgctgaacattaaaaagatcagcgaggaggagtacgttgcactaggcagtttttttttctggaagtgcttacacggggaaagttccaccgaagacatgtgccacaccctggagtccgcaggcctgagcccacaactgctgttatcgcttctactgagcgtctggctgagcaaggagaaagacatactcgacaaaccacagtccatttgttgtcttcacacgatgctctcactcctgtccaaaatgaaagttgctattgatgaaacttgggattcccagtccgtctccccctggtggcaacaaatgaggacggcgtgtatacaatccgaaaataatggcgctgccctcctctctgcacacgtggggcacagcgtggcagcccaaatatccaacaacatgactgaaaagaaattctcgcagacagtcttgggggctgatagtgaggccctcacagattcctgggaagccctgtcattggataccgagtactggaaacttctgctcaaacagctggaggattgtctaattctgcaaacactgctgcactcaaagggcaatacccaaacttccaaagtgtcttctctgcaggccgagcccctgccacgcttatcggtgaaaaagctgctcgaggggggcaaggggggtattgctgattccgtggccaaatggatcttcaaacaggatttcagtcctgaggttctcaagctggccaatgaggagagggatgctgaaaaccctgacgagccaaaagagggcgtcaatcgcagtttcctcgaggtcagcgagatggagatggacctaggggccatcccagacctcctccacctcgcatacgaacaattcccatgcagcttagagcttgatgttctgcacgctcactgttgttgggagtacgtggtgcagtggaacaaggaccctgaagaggcccgattcttcgtacgtagtattgaacatctgaaacaaatattcaacgctcatgtgcagaatggaattgcacttatgatgtggaacacctttctagtgaagagattttccgcagcaacataccttatggataaagtgggaaagtctccaaaggatcggctctgccgtagagacgtaggtatgtcagataccgcgatgacctccttcctgggttcatgcctcgatctcctacaaatcctcatggaagctgacgtctcacgggacgaaattcaagtgcctgtcttggatacagaagacgcgtggctgtcggttgaagggccaatctctatagtggagctggccttagagcagaaacatattcattatcctctcgtggaacaccactctatcctgtgtagtatcctgtatgccgtgatgagattctctttaaagaccgtgaagcccctgtctctgttcgattccaaaggtaaaaacgcatttttcaaagacctgacctctattcagcttctaccatcaggagagatggaccctaatttcatctccgtgcggcagcagtttctgctcaaggtggtgtccgcagccgtgcaggcccagcactcagcgaccaaggttaaggaccccacagaagaggccactccgacaccgtttggaaaagaccaggactggcccgcactcgcggtggacttggcgcaccacttacaggtgagtgaggacgtggtgagacggcactacgtcggtgaactatacaattacggtgtggaccacttgggggaagaggccatacttcaggttcacgataaggaagtcctggcctcccagctgctggtattaaccggtcaacggttggcgcacgcactgcttcacactcagaccaaggaggggatggaactgcttgctcgccttccacccactctctgtacttggctgaaagccatggatccccaggacctccaaaatactgaagtcccgattgcaacgacagcgaagctggttaataaggtgattgagctcctgcctgaaaagcacggccagtatggactggcattacatcttatagaggcagttgaggcgatcagcttacctagcctctag

SEQ ID NO: 174330 - DNA, 4182 bp, Artificial Sequence
  derived and/or modified sequence
atggcctgcagcatcgtgcagttctgctacttccaggacctgcaggccgcccgggacttcctgttcccccacctgcgggaggagatcctgagcggggccctgcggcgggaccccagcaagagcacagactgggaggatgatggctggggcgcctgggaggagaatgagccccaggagcctgaggaggagggcaacacctgcaagacccagaagacctcctggctgcaggactgtgtgctgagcctgagccccaccaatgacctgatggtgattgcccgggagcagaaggctgtgttcctggtgcccaagtggaagtacagcgacaagggcaaggaggagatgcagtttgctgtgggctggagcggcagcctgaatgtggaggagggggagtgtgtgaccagcgccctgtgcatccccctggccagccagaagaggagcagcacaggccgcccagactggacctgcatcgtggtgggcttcaccagcggctacgtgcgcttctacacagaaaatggagtgctgctgctggcccagctgctgaatgaagatcctgtgctgcagctgaagtgcaggacctatgagatccccaggcaccctggggtgacagagcagaatgaggagctgagcatcctgtacccagctgccatcgtgaccattgatggcttcagcctcttccagagcctgcgggcctgcaggaaccaggtggccaaggctgctgccagcggaaatgaaaacatccagcccccacccctggcctacaagaagtggggcctgcaggacatcgacaccatcatcgaccacgcctctgtgggcatcatgaccctgagcccctttgaccagatgaagacagccagcaacattggaggcttcaatgctgccatcaagaacagccccccagccatgagccagtacatcaccgtgggcagcaaccccttcaccggcttcttctacgccctggagggcagcacccagcccctgctgagccacgtggccctggccgtggccagcaagctgaccagcgccctcttcaatgctgccagcggctggctgggctggaagagcaagcatgaggaggaggccgtgcagaagcagaagcccaaggtggagcccgccacccccctggccgtgcgcttcggcctgcctgacagccgccgccacggggagagcatctgcctgagcccctgcaacaccctggccgctgtgacagatgactttggccgggtcatcctgctggatgtggcccggggcatcgccatccgcatgtggaagggctacagagatgcccagatcggctggatccagacagtggaggacctgcacgagcgggtgcctgagaaggctgacttcagccccttcggcaacagccagggccccagccgggtggcccagttcctggtgatctatgccccccggcggggcatcctggaggtgtggagcacccagcagggcccccgggtgggcgccttcaacgtgggcaagcactgccgcctgctgtacccaggctacaagatcatgggcctgaacaacgtgaccagccagagctggcagccccagacctaccagatctgcctggtggaccctgtgtctggctctgtgaagacagtgaatgtgcccttccacctggccctgagtgacaagaagtctgagcgggccaaggacatgcacctggtgaagaagctggccgccctgctgaagaccaagagccccaacctggacctggtggagacagagatcaaggagctgatcctggacatcaagtacccagccaccaagaagcaggccctggagagcatcctggccagcgagcggctgcccttcagctgcctgaggaacatcacccagaccctgatggacaccctgaagagccaggagctggagagcgtggatgagggcctgctgcagttctgtgccaacaagctgaagctgctgcagctgtatgagagcgtgtcccagctgaacagcctggacttccacctggacacccccttcagtgacaatgacctggccctgctgctgcggctggatgagaaggagctgctgaagctgcaggccctgctggagaagtacaagcaggagaacaccaggaccaacgtgcgcttcagtgatgacaaggatggagtgctgcctgtgaagaccttcctggagtacctggagtatgagaaggatgtgctgaacatcaagaagatcagcgaggaggagtatgtggccctgggcagcttcttcttctggaagtgcctgcatggagagagcagcacagaggacatgtgccacaccctggagagcgctggcctgagcccccagctgctgctgagcctgctgctgtctgtgtggctgagcaaggagaaggacatcctggacaagccccagagcatctgctgcctgcacaccatgctgagcctgctgagcaagatgaaggtggccattgatgagacctgggacagccagagcgtgagcccctggtggcagcagatgaggacagcctgcatccagagcgagaacaacggggccgccctgctgagcgcccacgtgggccacagcgtggccgcccagatcagcaacaacatgacagagaagaagttcagccagacagtgctgggcgctgacagcgaggccctgacagacagctgggaggccctgagcctggacacagagtactggaagctgctgctgaagcagctggaggactgcctgatcctgcagaccctgctgcacagcaagggcaacacccagaccagcaaggtgagcagcctgcaggccgagcccctgccccggctgtctgtgaagaagctgctggagggcggcaaaggaggcattgctgacagcgtggccaagtggatcttcaagcaggacttcagccctgaggtgctgaagctggccaatgaggagagagatgctgagaacccagatgagcccaaggagggcgtgaacagaagcttcctggaggtgtctgagatggagatggacctgggcgccatcccagacctgctgcacctggcctatgagcagttcccctgcagcctggagctggatgtgctgcacgcccactgctgctgggagtatgtggtgcagtggaacaaggaccctgaggaggcccgcttctttgtgcgcagcattgagcacctgaagcagatcttcaatgcccacgtgcagaatggaattgccctgatgatgtggaacaccttcctggtgaagcgcttctctgctgccacctacctgatggacaaggtgggcaagagccccaaggaccggctgtgcagaagagatgtgggcatgtctgacacagccatgaccagcttcctgggcagctgcctggacctgctgcagatcctgatggaggctgatgtgtccagagatgagatccaggtgcctgtgctggacacagaagatgcctggctgtctgtggagggccccatcagcatcgtggagctggccctggagcagaagcacatccactaccccctggtggagcaccacagcatcctgtgcagcatcctgtatgctgtgatgaggttcagcctgaagacagtgaagcccctgagcctgtttgacagcaagggcaagaatgccttcttcaaggacctgaccagcatccagctgctgcccagcggggagatggaccccaacttcatctctgtgcggcagcagttcctgctgaaggtggtgtctgctgctgtgcaggcccagcacagcgccaccaaggtgaaggaccccacagaggaggccacccccaccccatttgggaaggaccaggactggccagccctggccgtggacctggcccaccacctgcaggtgtctgaagatgtggtgagaagacactacgtgggggagctgtacaactatggagtggaccacctgggggaggaggccatcctgcaggtgcatgacaaggaggtgctggccagccagctgctggtgctgaccggccagaggctggcccacgccctgctgcacacccagaccaaggagggcatggagctgctggcccggctgccccccaccctgtgcacctggctgaaggccatggacccccaggacctgcagaacacagaggtgcccatcgccaccacagccaagctggtgaacaaggtgattgagctgctgcctgagaagcacggccagtatggcctggccctgcacctgattgaggccgtggaggccatcagcctgcccagcctgtag

SEQ ID NO: 174331 - DNA, 4182 bp, Artificial Sequence
  derived and/or modified sequence
atggcctgcagcatcgtgcagttctgctacttccaggacctgcaggctgcacgcgatttcttgttccctcacctgagggaggaaatcctatctggtgccctgaggcgagaccctagtaagtctaccgactgggaggacgatggctggggtgcctgggaggagaacgaaccgcaagaaccagaagaagaaggaaatacctgtaagacccagaagacctcctggctgcaggactgtgtcctgagcttatccccaaccaatgatctgatggtgatcgccagagagcagaaggcagtgtttcttgtgcctaaatggaaatatagtgacaagggtaaggaagaaatgcagtttgccgtcgggtggtctgggtcactgaacgtggaggagggggaatgcgtaacaagcgcactgtgcatcccactagccagccaaaagcgcagctccaccggccggcctgattggacctgcatcgtggttggcttcactagcggttacgtgcgcttctataccgaaaatggggtcctgctgctggctcagctcctcaacgaggaccctgtactgcagctcaaatgtcgaacatacgagattccgcgccatccaggggttactgaacagaatgaggaactgtccatcctctaccccgccgctatcgtgaccattgatggcttttctctctttcaatcactaagggcctgtagaaatcaagtagccaaagccgctgccagcggtaatgagaatattcagcctccaccactcgcttataagaagtgggggctccaggacattgatacgattattgaccacgcaagcgttggtattatgaccctctcccctttcgaccaaatgaagactgccagcaatatcggtggttttaatgctgccatcaagaatagcccgccagccatgtcccagtacattacggttggctccaatccctttacaggttttttctatgctctggaagggtctacccagcccctgctgagccatgtagctctcgcagtcgcatctaaactgacctcggctctgttcaacgccgcttctgggtggttggggtggaagagcaagcatgaggaggaggccgtgcagaaacaaaagcccaaagtggagcctgcaacacctctcgccgtacgttttggactccccgacagtcggcggcatggggagtctatctgcctgtctccttgcaatacccttgctgcagtcaccgacgactttggacgggtaattctgctggacgtggctagaggaatagcaatcaggatgtggaagggttatcgagatgctcagattggatggatccagacggtggaagacctgcacgaaagagtgccagagaaggctgacttttcgccgttcgggaattctcagggaccctcacgggtggcccagttcctggtgatctatgcgccccggaggggcattctggaagtgtggagcacacagcagggccccagagtcggcgcgtttaacgtcgggaagcattgccgcctcctatatcccggttacaaaatcatgggattgaacaatgtgacctcccagagttggcagccccagacttatcagatctgtttggtggaccccgtgagtggcagcgtcaagacagtgaacgtgccgtttcatctggccctgtcagataaaaaaagcgagcgggcaaaagacatgcatctggtgaaaaagctggccgcgctgttaaagactaagtctcccaacttggatctggtggagacagaaattaaagagctaattctggacataaagtaccctgcgaccaagaagcaggccctggagtctatcctcgcctctgagcgccttccttttagctgtctgagaaatattactcaaaccctgatggatactcttaagagccaagaattggaatccgtggatgaaggcttattacagttttgtgctaacaagttaaagctgctgcagctatacgagagcgtctctcaacttaattctctggatttccatcttgatactcccttctccgataatgatctcgctctgctgttgcgactggatgagaaggagctgctgaaactacaggcactgctagaaaagtataagcaggaaaatacccgcactaatgtgcggttttccgatgacaaggacggcgtgttacctgtcaagaccttcttggagtacctggagtacgaaaaagacgtcctaaatatcaagaagataagcgaggaagagtatgttgctcttggatcttttttcttctggaagtgtctacatggggaaagctcgaccgaagacatgtgccacaccctggagtccgcaggactatccccacagcttctgctcagcctcttgttgtcggtatggttgagtaaagaaaaagatattctggataaaccgcagagcatctgctgcctgcacaccatgctatctctgctgtccaagatgaaagtagctatcgacgagacatgggacagtcagtctgtgtcaccctggtggcagcaaatgcgcaccgcctgtatacagagcgagaacaatggcgccgccctcctttctgcacacgtgggccactccgtggcggcccagatctcaaataacatgaccgagaagaagttttcgcaaacagtcctcggcgcagattcagaagctctgaccgatagttgggaagcgctctctttggataccgaatattggaagttacttttgaagcaacttgaggattgcctcattcttcaaactttgttgcacagtaaaggaaacacacagacatccaaagtgtcatcactccaagccgaaccactgccccgtctaagcgtgaagaagctgctggagggtgggaaaggaggcatagccgatagcgtggctaaatggatatttaaacaggatttttcccccgaggttctgaaactggcgaacgaagagcgggacgctgagaatccagatgagcccaaggaaggcgtcaacaggtcttttctggaggtcagcgaaatggagatggatctgggagcaattcccgatctcctgcaccttgcatatgagcagtttccctgttccttggagctggacgtcttacacgcgcactgttgctgggaatatgtggttcaatggaataaagatcctgaagaagctcggttttttgtacgtagcatcgaacatctcaagcagattttcaacgcacacgtgcagaatgggattgcactgatgatgtggaacaccttcctggtgaagaggttctcggccgcaacgtacctgatggataaggtgggcaagagcccgaaggataggctgtgtaggcgagacgtcgggatgtcagatactgcaatgaccagcttcctcggatcttgcttagacctgttacagatcctgatggaggctgatgtttcacgagacgagatccaggttcccgttctggatacagaagacgcctggttgtccgtagaggggcctattagtattgtggaacttgctctcgagcagaagcacatacattatccgctcgtggagcaccattccattctgtgttccattttgtatgcagtcatgcgcttctcacttaaaacagtgaagcccctgtccctcttcgatagcaagggcaagaacgcctttttcaaagacctgacttctatccagctgttgccttcaggggagatggaccctaactttatttccgttcgccaacagttcctgttgaaggttgtgagcgcagctgtccaggcacagcacagtgctactaaggtcaaagatccgactgaggaggcgaccccgaccccctttggcaaggaccaggattggcctgccctggcggttgacctggcacaccacctgcaagtctcggaggacgtcgtgcgacggcattatgtgggcgaactgtacaattacggagtggatcatctgggagaagaggctattttgcaggtgcatgataaagaggttctggcgagtcaattgctcgtcttgacggggcaaaggctcgcacatgccttgctgcatacacagacaaaggaagggatggagctcctcgctcgtttaccccctacactctgcacctggctgaaagcaatggatcctcaggacctgcaaaataccgaggtgccaattgcaacgaccgccaagctggtgaacaaggtcattgaattgctgccggagaagcacggccagtacgggctcgcactgcatttgatcgaggctgtcgaggccataagcctgccaagcctttag

SEQ ID NO: 174332 - DNA, 4182 bp, Artificial Sequence
  derived and/or modified sequence
atggcttgctctattgtgcagttctgttattttcaggatttgcaggccgctcgggactttttgtttcctcacctgagagaggaaattctgtctggggcattgaggagagaccccagcaaaagcactgattgggaggacgacgggtggggcgcatgggaggaaaacgaaccccaagaacctgaagaagaaggaaatacttgcaaaacacagaaaacaagctggcttcaagactgtgtgctgagcctgagccccactaatgacctcatggtgatcgcacgcgagcaaaaggcagtgttcctggtgcctaaatggaaatattcggataaaggcaaagaggaaatgcaatttgcagtcggttggagtggcagcttaaacgtagaagagggagagtgtgtcaccagcgccctttgtattcccttagcatcacaaaaaagatcatcaacaggccgacccgactggacctgcatcgtcgtgggatttaccagtgggtatgttcgcttttatactgaaaatggagttctgctgttggctcaactactgaacgaggatcctgttttgcaactaaaatgccggacctacgaaattccccgtcacccaggcgttacagaacagaacgaggaattgtccatattataccctgctgcaattgtgaccattgatggcttctctctttttcagtcactcagagcctgcaggaaccaggtggctaaggccgctgcatccgggaacgaaaacattcaacctccacccttagcgtacaagaagtggggactgcaggatatcgataccattattgatcacgcatcggttggcataatgactctgtctccctttgaccagatgaagaccgcatccaatattggcggttttaatgccgcaataaaaaacagccccccagctatgtcccaatatattactgtgggatctaacccctttacaggcttcttttatgccctagagggctcaacccaaccactcctgtcccatgtggcgttagccgtggcaagtaaactcaccagcgcgctgtttaatgctgcatctggatggctgggctggaaaagcaaacacgaggaggaagcagtgcagaaacagaagccaaaagtggaacctgcaaccccccttgccgttcgttttggcctgccagactctagaaggcacggcgagagcatctgtctctctccgtgtaataccctggctgccgtgacagatgattttggcagagtgatcctgttggatgttgctagaggaatagccatccgcatgtggaaaggctatagagacgcccagattggatggattcaaacagttgaggacctgcatgagagagtaccagaaaaggctgatttctctcctttcggtaattctcagggaccttcgagggtcgcccagtttctggtgatttacgcccctcgcaggggaatactggaggtgtggtccacccagcagggtcccagggtcggggcatttaatgtgggaaagcactgtcgcctgttgtacccaggctacaaaatcatgggtttaaataatgttacttcacaatcctggcagccccagacttaccaaatctgtctggtggaccctgtcagtgggtccgtcaaaacagtaaatgtccctttccatcttgctctgtccgataagaaatctgagcgagcaaaggatatgcacttggttaaaaaactcgccgctctcctgaagacaaagagtcctaatctggatctggtggagaccgaaataaaggaattgatcctggacatcaaatacccggcaaccaaaaagcaagctctagaaagcatcctggcttccgaacgcctccccttttcatgtttacggaatattacacagaccctgatggacacactgaaatcccaggagttagagtctgttgatgaggggctgctgcagttttgcgcgaataagctgaagctacttcagctttatgaatcagtgtcacagctcaacagcctcgactttcacttagacacccccttttctgataacgatctggcgctgctcctcaggctagatgagaaggaattgctcaaactccaggctctgttggaaaaatataagcaggaaaacactcggactaacgtcaggttttcagacgataaggacggcgtgctgcccgttaaaactttcctcgagtacctggaatacgagaaagacgtgctgaatatcaaaaagattagtgaagaagaatacgtcgcccttggctcttttttcttctggaaatgtctacacggcgaatcctccacagaagacatgtgtcacaccctcgagtccgctggcctgtctcctcagctcctccttagcttactgctgtctgtgtggctgtctaaagagaaggatattctggacaagcctcagtctatttgctgcctgcacactatgttgtcgctcttgagcaaaatgaaagtggccatcgatgagacatgggacagtcagagcgtgtctccttggtggcagcagatgaggacagcctgtatccagagcgaaaataatggagctgctctcctgtcagctcacgttggacactctgtggccgcacaaatttctaataatatgacagagaagaaattctcacaaaccgtgctaggagctgactccgaagctctgacagactcctgggaggctctgagcctggataccgaatattggaaattattactgaagcagctggaggactgcctcatcctacagactctgttgcactcaaaaggaaatacacaaacctccaaggtgtcctccctgcaggccgagcccctacctcggctgagtgtaaagaagttgctggaaggcggaaagggcggtattgctgactccgtggccaaatggatcttcaagcaggacttttctccagaggtgctaaaactggccaacgaggagagagacgccgagaacccagatgagcccaaggaaggagttaaccgttcgttcctggaggtaagcgaaatggagatggacttaggagctatcccagaccttttacacctcgcctacgagcaattcccatgttccttggagttggacgtgctccacgcccattgctgctgggaatacgtagtccagtggaataaagaccctgaagaagccaggttctttgtgaggtcgatcgaacacctgaaacaaattttcaatgcccacgtccagaacggaatagctctcatgatgtggaatacatttttggtgaagagatttagtgcagccacatacctcatggacaaagtaggcaaatcccccaaagatagactgtgcaggcgtgacgttggaatgagcgacacagcaatgaccagtttcctgggtagctgtctagacctccttcaaattctaatggaggctgatgtctctcgcgacgaaattcaggtgcccgtcctggataccgaggatgcctggctctcggtggagggcccaattagcattgtggagctggctctggaacagaaacacattcactaccctcttgtggagcatcacagcatcctctgctccattctgtacgccgtgatgagattcagccttaagaccgttaagcccctcagcttgttcgattccaaagggaagaatgccttcttcaaggatctgacctctatccaactgctgcccagcggagaaatggatcctaatttcataagcgttcgccagcagttccttctcaaagtggtgagtgccgctgtgcaggcccagcacagcgccacaaaagtgaaagatcccaccgaagaggctactcccacaccatttggcaaggaccaagactggcctgcgctggctgtggatctcgcccaccacctccaggtgtccgaggatgtcgtcaggcgccactatgtgggcgagctgtacaattacggcgtcgatcacctgggggaggaagcgatcctgcaagttcacgataaggaggtgctcgcatcacagcttttggtcctgacagggcagcgccttgcccatgctctgttgcacactcagaccaaagagggaatggagttactggcccgactgccgccaactctctgcacatggcttaaagccatggatcctcaggatctacagaacactgaggtgccaatcgctactactgcaaagctggttaataaggttatcgagttgttgcctgaaaaacacggccagtacggccttgctctgcatctaatcgaggcagtcgaggctatatcactgcccagtctctag

SEQ ID NO: 174333 - DNA, 7257 bp, Artificial Sequence
  derived and/or modified sequence
ggtttctccgccttctgcttggctagagctattggggctcggtggcggccgcagtggggtggagggggcagggcgtggtgaggtaaggtgagtgccgtagtggggttccctggagccatggcctgctccattgtccagttctgctacttccaggacctccaggccgcccgggacttcctctttcctcacctgcgggaggagatcctcagcggcgccttgcggagggaccccagtaaatcaacagactgggaagatgatggttggggagcatgggaagaaaatgaaccacaagaacctgaagaagaaggaaatacttgcaaaacacaaaaaacttcctggctccaagattgtgttttatccttatctccaaccaatgatcttatggtgatagctcgagagcaaaaagctgtatttctagtgccaaaatggaaatatagtgataaaggaaaggaagaaatgcaatttgctgttggctggagtggttccttaaatgtcgaagaaggggaatgtgtaaccagtgctctatgtatcccactagcaagccaaaagaggagttccactgggcgtcctgactggacctgcattgtggtgggttttacttcaggttatgtacgcttctacactgagaatggtgtgctcttgcttgcacagcttttgaatgaggacccagtacttcaacttaaatgcagaacctatgaaataccacgacatcccggcgtgactgagcagaatgaagagttgagtatcttatatccagctgccattgtgactattgatggatttagcctttttcaatctcttcgtgcttgtcgaaatcaggtagcaaaagctgcagcatcaggcaatgagaacatacaaccaccaccattagcttataagaaatggggtctacaagatattgacactattattgatcatgctagtgttggtattatgactctgtccccctttgatcaaatgaagactgcctccaatataggtggatttaatgcagcaattaaaaatagtccacctgccatgtctcagtatatcactgtagggtccaatccatttactggcttcttctatgctttagagggaagcacacaaccattattatcccatgttgcactagcagttgcaagtaaactcacttctgctttatttaatgctgccagtggttggcttggttggaaaagtaagcacgaagaagaagctgtccaaaagcaaaagccgaaggttgagccagctaccccattagctgtaagatttggacttccagattctagacgccatggtgaaagcatatgtctgtctccatgtaacacactggcagcagtaacagatgatttcggcagagttattttattggatgtagctagaggaattgcaatacgcatgtggaaagggtaccgcgacgcacaaattggatggattcaaactgtagaggacctccatgaaagagtgccagaaaaggcagatttttccccctttggaaattctcagggtccaagtcgagtagctcaattccttgtgatctatgcgccaagaaggggaattttagaagtgtggagcacacagcagggacctagagtaggagctttcaatgtggggaagcactgcaggctgctgtatcctggctataaaataatgggtttaaataatgttaccagtcagagttggcagccacagacttatcagatctgtctggttgatccagtgtctggaagtgtgaaaacagtgaacgttcccttccatttagcactgagtgataagaagagtgaacgagccaaggatatgcacctagtgaagaaactagcagccttactgaaaacaaaatctcccaatcttgatttggttgaaacagaaataaaggaattaattcttgatattaaataccctgcaaccaaaaaacaagctttggaaagcattttggcaagtgaacgtttaccattttcttgccttagaaacatcactcagactttaatggacactttaaaaagtcaagaacttgagtctgttgatgaaggattgctacagttttgtgccaataaactaaaactgctgcaactctatgagtctgtcagtcaattaaattcccttgattttcatttagacacaccattctctgataatgacttggctctgttactaaggcttgatgaaaaagaactgcttaagctccaggcattactagagaaatataagcaagagaacaccaggacaaatgttcgattttctgatgataaagatggtgtgttgcctgtaaaaacattcttggaatatttagaatatgaaaaggatgtgctcaacataaagaaaataagtgaagaggaatatgtggctttaggtagtttctttttttggaagtgtttgcatggagaaagctccactgaggatatgtgtcacactttggagtcggctggtcttagccctcagctgttgttgtctctgctcctgagtgtttggctttcaaaggaaaaggatattttggataaaccacagtcaatctgctgtcttcataccatgctgtccctcctgagcaagatgaaagtggccatcgatgagacctgggattctcagtctgtgtccccatggtggcagcagatgcgcacagcctgtattcagtctgagaacaatggagccgctctgttgtctgcgcatgttgggcattctgttgctgcacagatatcaaacaacatgacagagaaaaaattttcccaaacagttttgggtgctgattcagaggccctcactgattcctgggaggcactttctcttgacactgagtactggaaactccttctgaaacagctggaggattgtctcatacttcagactctgcttcacagcaaagggaacactcagacctccaaagtgtcatcactgcaggctgagccacttccaaggctttctgttaaaaagttattagaaggaggaaaaggtggcattgcagacagtgtagccaagtggatatttaaacaggacttcagccctgaagtattaaaactggctaatgaagaaagagatgcagaaaacccagatgaacccaaagaaggtgttaacagaagtttccttgaggtatcagagatggagatggacttaggagccataccagacttactgcatttagcctatgagcagtttccttgtagccttgagctcgatgtcttgcatgcacattgctgctgggagtacgttgttcagtggaataaagatccagaggaagcacgtttttttgttaggtcaatagaacacttgaagcaaatatttaatgcacatgttcaaaatggcattgcactgatgatgtggaatacgttcttagttaaaagattttctgctgctacatacttaatggataaggttggaaaatcaccaaaagataggttatgccgaagggatgtgggaatgagtgacacagcaatgacatctttcctcggctcctgtttggatcttcttcagatcttaatggaggcagatgttagcagggatgaaatacaggtgcctgtgctggatactgaggatgcgtggctctccgtggaaggaccaatctccatagtggaactggcccttgaacagaagcacatccactacccactggtggagcaccactccatcctgtgctccatcttgtatgcagtcatgaggttttctctgaagaccgtgaagccactttcactttttgacagtaagggaaaaaatgcatttttcaaagacctaacttcaattcagttattacctagtggggaaatggatccaaattttatttctgtacgacaacagttcttattgaaagttgtcagtgcagctgtccaggcccaacattcagccacaaaggtcaaagatcccacagaagaggccacacccactccttttgggaaagaccaagattggccagctctagctgtggatttagcccatcaccttcaagttagtgaagatgttgttagaaggcattatgtgggggaactatacaactatggagttgaccacttaggagaagaggccattctacaggttcatgacaaagaggtccttgcctctcagctgctggtgctcacggggcaaaggctggctcatgcgcttctccacacccagacaaaagaaggaatggagctgcttgccagacttccacccacactgtgtacttggctgaaagcaatggacccccaggaccttcaaaacactgaagtgccaattgcaacaacagctaaactagtaaataaagtaattgagcttttaccagaaaaacatgggcaatatggtctagccttacacctcattgaagctgtggaagccatatctcttccttctttatgacacttacctactggaaatagtctaaaattatgattataacatgaagtagtgcatggttattttacatagtaagacctggaattttatgggaaaagtatgtctttttttttccttttgtaaaataaataaaagtatatacaacttttaaaaagtgcaaccctggctaaattccactcctttggttaatactgaagataaaatataaacaaatgtcaactctgttataattaatacagatgttttactgtttatttctaattcaaacacttaagtagctttattgttaaactttgctatttaaaattggttataatttagattatgttcttataagattctatatttcctatctaaaatgttgttgtaattcaatttaaatgtgttcatgtacagtccccatcagtagcgtatagaacaccccactctcctttagtaaatgttgagaaaatgcctttgttgtcatgctccaaatcccacactgggctgccacctgggagttctggataccgaaaggttcctttcccagaggttctgctgttgccatcagaggaggatgaccgtgcttgaggaggaagaatgggttcaagatcatcatattcatcagaaggggacactaaatagaacccttaacctgttgtacttgccaaaattgagaatcagagatgtgtaaaatgcagcaaattaattataatgtaagttaagatttgctttttgccaagttgcaaagttgtatccacatcaggtcactgtaaaaatgtattatcttgtaaaacttatgtaaaaaaaaaaaaaaaaaaaaggcaaagatactaaaaattttaagtccgactttatttttcctacaagtgtttagaaatgcttctgggatttgctaatattatctgtccttgggaacagtattgaaaaaactgcttagtggtattacagctttagcaaacctacctcacagctgggatgagaggataaaatacaactaattttgtaccctatagtgcctagagcagtccaagtgctaaataaatatttactgattaaaaccaaactatagctactcgggaggctggaggaggatcgcttgagcccaggagtttgaggccattctgggcaatatagcaagaccctgtctcgaaaaaaaaaaaaaaaagaaaaaaccaaactaaccaaaactctgtaaaagagtgctttgagctctacaaataccaagtatttattgtggtatatttttagaatgtagccatacagtgtaattatgggtatctgtcatggatcacaattattattcatagtaagtcattgtgatacagaagtttgtttcttcacttccccttaagaagccaactatagtaatcatgcaaagttgaggagtatgtccttcagggatataaaaagaaaaacaaatctgttttttgagctaaaagagcacatccaaacaagaatttaactggctaaaatttagtaattactgttaagtaactatcaaacttgaaatcttacaagataaatggttaagatgtcttgagtatttgggatgggggcctgtgagtctgattgagacatacattttacagagtagcagcactggaaagggctagtccaacctcccagcctctgcttgggtctccgctgccccagccacacacatcctagaattcttgtaaacatatctggctctgtgttaacagtcacttgttatatgttttctaagagattagttcttcctgtgatttttccaagtacgctgaaagtagtagtatgaacttaaggaggctagtcaaagaaacttggagttataggtatttttaaagaataaatcctcaattccatcatcacttggcggggagggggcacttattaagcattttagataataaaactggttaagcttactctggtagaacagacaatcaaatctggggattgctgagaacaataataagctgaagtatggctcacagaatcctaacacaaatcattaagtctctagttagatttgttatcctaaaatttttcatagaattttaaaatctaattctgacttgtatggttaagaaaagcagttaaatattttactacttatcaagggcttttaaaataaataaatctgattgataggaagaaaggcaaataaatacctatgtagacattctataataacaaagagccatagatgataaaggaattagattttaatgtagaatgggtggtttctgaaacaaaggtatgtggtactttgtagttattgatgagaagccagtaaccagtagtgttttcctagatatatgcccaccctcacacaactttcttcattaacaaacattaaatatgcatttgtatcttattaaattatattgtataatgctgaaggaaaacaaaaagtgttcaaataatcataacttctacattacaggttctgtttagatgcagaactagaggggccagggtaaatgtagataaagagatatatagcaccatgcttcttaatgcttcatacttttgcaaacagaaaaaaaaagttttacttttattataaaacttcatctatggtcaaagtaaacactgttacatttaaattgctttttaaaaacaattgcgatctaaaaagtcaaaaatctgaaatttaataatatgagacttacactgaatataatgttcatttagaagttgctgtggtccacttcatttataaggaacaaatatttttacagtacactatagcaacagcaaaagccctctctcaccctgataggaatgggtttgctgggtgtctagaagttagattcctgctgaatagaattagccatccttaaaagattttaatccaatactgaactgtttataaaatgctttctctattgtaatgtactgtaagtagtgaaattctgtatatactgctattttctgtctgttcattgttgtgaacttcttatgtatattagtgaaataaattttcagctttca

SEQ ID NO: 174334 - DNA, 4182 bp, Artificial Sequence
  derived and/or modified sequence
atggcctgcagcatcgtgcagttctgctacttccaggacctgcaggccgccagagacttcctgttcccccacctgagagaggagatcctgagcggcgccctgagaagagaccccagcaagagcaccgactgggaggacgacggctggggcgcctgggaggagaacgagccccaggagcccgaggaggagggcaacacctgcaagacccagaagaccagctggctgcaggactgcgtgctgagcctgagccccaccaacgacctgatggtgatcgccagagagcagaaggccgtgttcctggtgcccaagtggaagtacagcgacaagggcaaggaggagatgcagttcgccgtgggctggagcggcagcctgaacgtggaggagggcgagtgcgtgaccagcgccctgtgcatccccctggccagccagaagagaagcagcaccggcagacccgactggacctgcatcgtggtgggcttcaccagcggctacgtgagattctacaccgagaacggcgtgctgctgctggcccagctgctgaacgaggaccccgtgctgcagctgaagtgcagaacctacgagatccccagacaccccggcgtgaccgagcagaacgaggagctgagcatcctgtaccccgccgccatcgtgaccatcgacggcttcagcctgttccagagcctgagagcctgcagaaaccaggtggccaaggccgccgccagcggcaacgagaacatccagcccccccccctggcctacaagaagtggggcctgcaggacatcgacaccatcatcgaccacgccagcgtgggcatcatgaccctgagccccttcgaccagatgaagaccgccagcaacatcggcggcttcaacgccgccatcaagaacagcccccccgccatgagccagtacatcaccgtgggcagcaaccccttcaccggcttcttctacgccctggagggcagcacccagcccctgctgagccacgtggccctggccgtggccagcaagctgaccagcgccctgttcaacgccgccagcggctggctgggctggaagagcaagcacgaggaggaggccgtgcagaagcagaagcccaaggtggagcccgccacccccctggccgtgagattcggcctgcccgacagcagaagacacggcgagagcatctgcctgagcccctgcaacaccctggccgccgtgaccgacgacttcggcagagtgatcctgctggacgtggccagaggcatcgccatcagaatgtggaagggctacagagacgcccagatcggctggatccagaccgtggaggacctgcacgagagagtgcccgagaaggccgacttcagccccttcggcaacagccagggccccagcagagtggcccagttcctggtgatctacgcccccagaagaggcatcctggaggtgtggagcacccagcagggccccagagtgggcgccttcaacgtgggcaagcactgcagactgctgtaccccggctacaagatcatgggcctgaacaacgtgaccagccagagctggcagccccagacctaccagatctgcctggtggaccccgtgagcggcagcgtgaagaccgtgaacgtgcccttccacctggccctgagcgacaagaagagcgagagagccaaggacatgcacctggtgaagaagctggccgccctgctgaagaccaagagccccaacctggacctggtggagaccgagatcaaggagctgatcctggacatcaagtaccccgccaccaagaagcaggccctggagagcatcctggccagcgagagactgcccttcagctgcctgagaaacatcacccagaccctgatggacaccctgaagagccaggagctggagagcgtggacgagggcctgctgcagttctgcgccaacaagctgaagctgctgcagctgtacgagagcgtgagccagctgaacagcctggacttccacctggacacccccttcagcgacaacgacctggccctgctgctgagactggacgagaaggagctgctgaagctgcaggccctgctggagaagtacaagcaggagaacaccagaaccaacgtgagattcagcgacgacaaggacggcgtgctgcccgtgaagaccttcctggagtacctggagtacgagaaggacgtgctgaacatcaagaagatcagcgaggaggagtacgtggccctgggcagcttcttcttctggaagtgcctgcacggcgagagcagcaccgaggacatgtgccacaccctggagagcgccggcctgagcccccagctgctgctgagcctgctgctgagcgtgtggctgagcaaggagaaggacatcctggacaagccccagagcatctgctgcctgcacaccatgctgagcctgctgagcaagatgaaggtggccatcgacgagacctgggacagccagagcgtgagcccctggtggcagcagatgagaaccgcctgcatccagagcgagaacaacggcgccgccctgctgagcgcccacgtgggccacagcgtggccgcccagatcagcaacaacatgaccgagaagaagttcagccagaccgtgctgggcgccgacagcgaggccctgaccgacagctgggaggccctgagcctggacaccgagtactggaagctgctgctgaagcagctggaggactgcctgatcctgcagaccctgctgcacagcaagggcaacacccagaccagcaaggtgagcagcctgcaggccgagcccctgcccagactgagcgtgaagaagctgctggagggcggcaagggcggcatcgccgacagcgtggccaagtggatcttcaagcaggacttcagccccgaggtgctgaagctggccaacgaggagagagacgccgagaaccccgacgagcccaaggagggcgtgaacagaagcttcctggaggtgagcgagatggagatggacctgggcgccatccccgacctgctgcacctggcctacgagcagttcccctgcagcctggagctggacgtgctgcacgcccactgctgctgggagtacgtggtgcagtggaacaaggaccccgaggaggccagattcttcgtgagaagcatcgagcacctgaagcagatcttcaacgcccacgtgcagaacggcatcgccctgatgatgtggaacaccttcctggtgaagagattcagcgccgccacctacctgatggacaaggtgggcaagagccccaaggacagactgtgcagaagagacgtgggcatgagcgacaccgccatgaccagcttcctgggcagctgcctggacctgctgcagatcctgatggaggccgacgtgagcagagacgagatccaggtgcccgtgctggacaccgaggacgcctggctgagcgtggagggccccatcagcatcgtggagctggccctggagcagaagcacatccactaccccctggtggagcaccacagcatcctgtgcagcatcctgtacgccgtgatgagattcagcctgaagaccgtgaagcccctgagcctgttcgacagcaagggcaagaacgccttcttcaaggacctgaccagcatccagctgctgcccagcggcgagatggaccccaacttcatcagcgtgagacagcagttcctgctgaaggtggtgagcgccgccgtgcaggcccagcacagcgccaccaaggtgaaggaccccaccgaggaggccacccccacccccttcggcaaggaccaggactggcccgccctggccgtggacctggcccaccacctgcaggtgagcgaggacgtggtgagaagacactacgtgggcgagctgtacaactacggcgtggaccacctgggcgaggaggccatcctgcaggtgcacgacaaggaggtgctggccagccagctgctggtgctgaccggccagagactggcccacgccctgctgcacacccagaccaaggagggcatggagctgctggccagactgccccccaccctgtgcacctggctgaaggccatggacccccaggacctgcagaacaccgaggtgcccatcgccaccaccgccaagctggtgaacaaggtgatcgagctgctgcccgagaagcacggccagtacggcctggccctgcacctgatcgaggccgtggaggccatcagcctgcccagcctgtag

SEQ ID NO: 174335 - protein, 910 aa, Artificial Sequence
  derived and/or modified sequence
MRRSAAPSQLQGNSFKKPKFIPPGRSNPGLNEEITKLNPDIKLFEGVAINNTFLPSQNDLRICSLNLPSEESTREINNRDNCSGKYCFEAPTLATLDPPHTVHSAPKEVAVSKEQEEKSDSLVKYFSVVWCKPSKKKHKKWEGDAVLIVKGKSFILKNLEGKDIGRGIGYKFKELEKIEEGQTLMICGKEIEVMGVISPDDFSSGRCFQLGGGSTAISHSSQVARKCFSNPFKSVCKPSSKENRQNDFQNCKPRHDPYTPNSLVMPRPDKNHQWVFNKNCFPLVDVVIDPYLVYHLRPHQKEGIIFLYECVMGMRMNGRCGAILADEMGLGKTLQCISLIWTLQCQGPYGGKPVIKKTLIVTPGSLVNNWKKEFQKWLGSERIKIFTVDQDHKVEEFIKSIFYSVLIISYEMLLRSLDQIKNIKFDLLICDEGHRLKNSAIKTTTALISLSCEKRIILTGTPIQNDLQEFFALIDFVNPGILGSLSSYRKIYEEPIILSREPSASEEEKELGERRAAELTCLTGLFILRRTQEIINKYLPPKIENVVFCRPGALQIELYRKLLNSQVVRFCLQGLLENSPHLICIGALKKLCNHPCLLFNSIKEKECSSTCDKNEEKSLYKGLLSVFPADYNPLLFTEKESGKLQVLSKLLAVIHELRPTEKVVLVSNYTQTLNILQEVCKRHGYAYTRLDGQTPISQRQQIVDGFNSQHSSFFIFLLSSKAGGVGLNLIGGSHLILYDIDWNPATDIQAMSRVWRDGQKYPVHIYRLLTTGTIEEKIYQRQISKQGLCGAVVDLTKTSEHIQFSVEELKNLFTLHESSDCVTHDLLDCECTGEEVHTGDSLEKFIVSRDCQLGPHHQKSNSLKPLSMSQLKQWKHFSGDHLNLTDPFLERITENVSFIFQNITTQATGT

SEQ ID NO: 174336 - protein, 125 aa, Artificial Sequence
  derived and/or modified sequence
MRRSAAPSQLQGNSFKKPKFIPPGRSNPGLNEEITKLNPDIKLFEGVAINNTFLPSQNDLRICSLNLPSEESTREINNRDNCSGKYCFEAPTLATLDPPHTVHSAPKEVAVSKEQEEKSDSLVKY

SEQ ID NO: 174337 - protein, 582 aa, Artificial Sequence
  derived and/or modified sequence
MGLGKTLQCISLIWTLQCQGPYGGKPVIKKTLIVTPGSLVNNWKKEFQKWLGSERIKIFTVDQDHKVEEFIKSIFYSVLIISYEMLLRSLDQIKNIKFDLLICDEGHRLKNSAIKTTTALISLSCEKRIILTGTPIQNDLQEFFALIDFVNPGILGSLSSYRKIYEEPIILSREPSASEEEKELGEREQLNLLASLDSLLRRTQEIINKYLPPKIENVVFCRPGALQIELYRKLLNSQVVRFCLQGLLENSPHLICIGALKKLCNHPCLLFNSIKEKECSSTCDKNEEKSLYKGLLSVFPADYNPLLFTEKESGKLQVLSKLLAVIHELRPTEKVVLVSNYTQTLNILQEVCKRHGYAYTRLDGQTPISQRQQIVDGFNSQHSSFFIFLLSSKAGGVGLNLIGGSHLILYDIDWNPATDIQAMSRVWRDGQKYPVHIYRLLTTGTIEEKIYQRQISKQGLCGAVVDLTKTSEHIQFSVEELKNLFTLHESSDCVTHDLLDCECTGEEVHTGDSLEKFIVSRDCQLGPHHQKSNSLKPLSMSQLKQWKHFSGDHLNLTDPFLERITENVSFIFQNITTQATGT

SEQ ID NO: 174338 - DNA, 2733 bp, Artificial Sequence
  derived and/or modified sequence
atgcggcgctccgcagctccctctcaactgcagggtaattcattcaaaaagccaaaattcatccctccaggaagaagcaacccaggcctgaatgaggagatcacaaaactgaaccctgacataaagctgtttgagggagtagccatcaataatactttcttacctagccaaaacgatctgcggatttgcagcctcaatctgccctcagaagaatccaccagggagatcaataacagagataactgcagtggaaagtattgcttcgaggcccccactctagccacactagaccctccccatacagttcatagtgcgcctaaggaggtggctgtaagcaaagaacaagaggaaaagagcgacagtctggttaagtatttttccgtggtgtggtgcaagccgagcaaaaagaaacacaagaagtgggagggtgacgcggttctgattgtgaaggggaagtccttcattctgaaaaacctggaaggtaaagacataggacggggaataggctacaaattcaaagagttagagaaaatagaagaagggcagaccctgatgatctgcgggaaagaaattgaggtgatgggggttatttctccggacgatttcagctccgggcgctgttttcagctgggcggcggctcgaccgcaataagccattccagccaagtcgcacgaaagtgtttcagcaatcctttcaagagcgtatgtaaaccgagctccaaagaaaacaggcaaaacgatttccagaactgtaaaccgaggcatgatccctatactccaaactccctggtgatgccaaggcctgataaaaatcaccagtgggtgtttaataagaactgttttcccctggttgacgtcgtcattgacccttatctagtttaccatctgcgcccgcaccagaaagagggcattatcttcctctatgagtgcgtgatgggcatgcgcatgaatggcaggtgtggcgcaatcctggcagatgagatggggcttggaaaaaccctgcagtgcatttccttgatttggactttacagtgtcagggaccctatggtggtaaacctgtaattaagaagacacttatcgtcactcctgggtccttggtgaataattggaagaaggaattccagaaatggttaggttctgaacgaataaagatcttcacggtggatcaagatcataaagtggaggagtttatcaaatctattttttactcagtgctaatcatatcttatgagatgttattacggagcctggaccagattaaaaatatcaagttcgacctgctgatctgcgacgaaggacacagacttaaaaatagcgccatcaagacaaccacagcactcattagcttgtcctgcgaaaaaagaatcatactcacggggactccaatccagaacgacctgcaggagttcttcgccctgattgactttgttaatccagggatccttgggtccctctccagttacagaaagatttatgaggaacctattatactgtctagggagccatctgctagcgaggaagaaaaggaactcggagagagaagggccgctgagctgacatgcctgactggtctatttatattgcgaagaacacaggaaatcataaataagtacttaccgccaaagatcgaaaacgtggtgttctgccgccctggggccctgcagatcgaactgtatcgcaagttactgaattcacaggtagtgcgtttctgtctccagggcttactggagaacagtccccatctgatttgcatcggagctcttaaaaagctctgtaaccacccttgcttacttttcaactcaataaaggaaaaagagtgttcttccacgtgcgacaaaaacgaggagaagtccttgtacaaaggactcctctcagtgtttccagcagactacaaccctttacttttcacagagaaagagtcgggcaagcttcaagtgctgtccaaactcctggccgtgattcacgagctgagacccactgagaaagtggtgctggtcagcaactatacacagacactgaacattctccaagaagtctgtaagcgccacggctatgcatatactaggcttgacggtcagactcccatatctcagcgccagcagatcgttgacgggttcaattcccaacactcttctttctttatctttctcctttcttcaaaggctggcggagtcggtctgaaccttatcggaggttctcacctaatcctctacgatatcgattggaatccagcaactgatatccaggcaatgtcccgggtatggagagatgggcaaaaataccctgtccacatttacaggttgttgacgaccggcacgattgaggaaaagatttatcagcgacaaatctctaaacagggcctgtgcggggctgtggtcgacctcacaaaaacaagcgagcacattcaattttcagtggaagaactgaagaatctctttaccctgcacgagtcctccgattgtgtgactcatgatctattggactgcgagtgtacgggggaagaagtgcacacgggggactcgttagagaaatttatcgtcagcagagattgtcagctgggcccccatcaccagaagtctaatagcctgaaaccattgagtatgagccaactgaaacagtggaagcactttagtggcgaccatcttaatctcaccgatccattccttgagcgtataactgaaaatgttagtttcattttccagaacatcacaactcaggccacaggtacatag

SEQ ID NO: 174339 - DNA, 378 bp, Artificial Sequence
  derived and/or modified sequence
atgaggaggtctgccgctccgtctcagctccagggaaattcattcaagaagcctaagttcatccctcccgggagatctaatcccggcttaaatgaggaaataacgaagctcaacccagacataaagttgtttgagggcgtcgcaattaataatacattcctccccagtcagaatgatctgcgcatttgtagcctgaacctacctagtgaagaaagcacccgggaaatcaataatcgggacaactgctctggcaagtactgtttcgaagcgcctactctggcaaccctcgaccctccccataccgtacattctgcacccaaggaggtcgctgttagtaaagagcaggaagaaaaatccgattccctggttaagtattag

SEQ ID NO: 174340 - DNA, 2733 bp, Artificial Sequence
  derived and/or modified sequence
atgagaagatctgctgcccccagccagctgcagggcaacagcttcaagaagcccaagttcatccccccaggccgcagcaaccctggcctgaatgaggagatcaccaagctgaacccagacatcaagctgtttgagggcgtggccatcaacaacaccttcctgcccagccagaatgacctgcgcatctgcagcctgaacctgcccagcgaggagagcacccgggagatcaacaacagagacaactgcagcggcaagtactgctttgaggcccccaccctggccaccctggaccccccccacacagtgcacagcgcccccaaggaggtggccgtgtccaaggagcaggaggagaagagtgacagcctggtgaagtacttctctgtggtgtggtgcaagcccagcaagaagaagcacaagaagtgggagggagatgctgtgctgattgtgaagggcaagagcttcatcctgaagaacctggagggcaaggacatcggccggggcatcggctacaagttcaaggagctggagaagattgaggagggccagaccctgatgatctgtgggaaggagattgaggtgatgggcgtcatcagcccagatgacttcagcagcggccgctgcttccagctgggcggcggcagcacagccatcagccacagcagccaggtggccaggaagtgcttcagcaaccccttcaagtctgtgtgcaagcccagcagcaaggagaaccggcagaatgacttccagaactgcaagcccaggcatgacccctacacccccaacagcctggtgatgcccaggccagacaagaaccaccagtgggtgttcaacaagaactgcttccccctggtggatgtggtgattgacccctacctggtgtaccacctgcggccccaccagaaggagggcatcatcttcctgtatgaatgtgtgatgggcatgaggatgaatggccgctgtggggccatcctggctgatgagatgggcctgggcaagaccctgcagtgcatcagcctcatctggaccctgcagtgccagggcccctatggaggcaagcctgtgatcaagaagaccctcatcgtgaccccaggcagcctggtgaacaactggaagaaggagttccagaagtggctgggcagcgagcgcatcaagatcttcaccgtggaccaggaccacaaggtggaggagttcatcaagagcatcttctacagcgtgctgatcatctcctatgagatgctgctgcggagcctggaccagatcaagaacatcaagtttgacctgctgatctgtgatgagggccaccggctgaagaacagcgccatcaagaccaccacagccctgatcagcctgagctgtgagaagaggatcatcctgaccggcacccccatccagaatgacctgcaggagttctttgccctgattgactttgtgaaccctggcatcctgggcagcctgagcagctacaggaagatctatgaggagcccatcatcctgagccgggagcccagcgccagcgaggaggagaaggagctgggggagcggcgggctgctgagctgacctgcctgaccggcctcttcatcctgcggaggacccaggagatcatcaacaagtacctgccccccaagattgaaaatgtggtgttctgcaggcctggggccctgcagatcgagctgtacaggaagctgctgaacagccaggtggtgcgcttctgcctgcagggcctgctggagaacagcccccacctgatctgcattggagccctgaagaagctgtgcaaccacccctgcctgctcttcaacagcatcaaggagaaggagtgcagcagcacctgtgacaagaatgaggagaagagcctgtacaagggcctgctgtctgtgtttcctgctgactacaaccccctgctcttcacagagaaggagagcggcaagctgcaggtgctgagcaagctgctggccgtcatccacgagctgcggcccacagagaaggtggtgctggtgagcaactacacccagaccctgaacatcctgcaggaggtgtgcaagagacatggctacgcctacacccggctggatggccagacccccatcagccagaggcagcagatcgtggatggcttcaacagccagcacagcagcttcttcatcttcctgctgagcagcaaggccggcggcgtgggcctgaacctgattggaggcagccacctgatcctgtatgacatcgactggaacccagccacagacatccaggccatgagccgggtgtggagagatggccagaagtaccctgtgcacatctaccgcctgctgaccaccggcaccatcgaggagaagatctaccagaggcagatcagcaagcagggcctgtgtggggctgtggtggacctgaccaagaccagcgagcacatccagttctctgtggaggagctgaagaacctcttcaccctgcacgagagcagtgactgtgtgacccatgacctgctggactgtgagtgcaccggggaggaggtgcacactggagacagcctggagaagttcatcgtgtcccgggactgccagctgggcccccaccaccagaagagcaacagcctgaagcccctgtccatgagccagctgaagcagtggaagcacttcagcggggaccacctgaacctgacagaccccttcctggagcgcatcacagaaaatgtgtccttcatcttccagaacatcaccacccaggccaccggcacctag

SEQ ID NO: 174341 - DNA, 378 bp, Artificial Sequence
  derived and/or modified sequence
atgagaagatctgctgcccccagccagctgcagggcaacagcttcaagaagcccaagttcatccccccaggccgcagcaaccctggcctgaatgaggagatcaccaagctgaacccagacatcaagctgtttgagggcgtggccatcaacaacaccttcctgcccagccagaatgacctgcgcatctgcagcctgaacctgcccagcgaggagagcacccgggagatcaacaacagagacaactgcagcggcaagtactgctttgaggcccccaccctggccaccctggaccccccccacacagtgcacagcgcccccaaggaggtggccgtgtccaaggagcaggaggagaagagtgacagcctggtgaagtactag

SEQ ID NO: 174342 - DNA, 2733 bp, Artificial Sequence
  derived and/or modified sequence
atgcggcggagcgccgcccccagccagctgcagggcaacagcttcaaaaagcctaagtttatccctccgggccgaagcaaccctggcttgaatgaagagatcaccaaacttaatcctgacattaaactgttcgaaggcgtggcaataaacaatacctttctgccctcccagaatgacctgaggatttgctctctgaacctgcccagtgaagaaagtactcgtgagattaataatcgtgataactgcagcggaaaatactgtttcgaagccccgacccttgccacactggaccccccccacacagtgcattctgcgccaaaggaggtagcagtcagcaaggagcaggaggaaaagtccgattccctcgtaaaatatttctcagtggtctggtgcaaaccttcgaaaaagaagcataaaaaatgggagggagatgctgttctgattgtaaagggaaagtcattcattctgaagaatttggagggcaaagacattggaaggggaattggctacaaattcaaggaactcgaaaaaatcgaggaaggccagacactaatgatctgtggcaaggagatcgaggtaatgggtgtgatttcacccgatgatttctcatctgggcggtgttttcagctgggagggggcagcaccgccatcagtcattcaagccaggtagctcgcaaatgtttctcaaaccctttcaagtcggtttgcaaaccttctagcaaagaaaaccgccaaaatgacttccagaattgcaagccccggcacgatccttatactccaaactcgctcgtgatgccccggcctgacaaaaaccaccagtgggtttttaataagaactgcttccctctggtcgacgtggtgatcgatccctatctcgtttatcatttaaggccccaccaaaaggagggaataatcttcctttatgaatgcgtgatgggaatgcggatgaatgggagatgcggggccatcttagctgatgagatgggattaggcaagacgctgcagtgcatctctttgatatggacactgcaatgccaaggaccatatggcggcaagcctgtcattaaaaagaccttgattgtgacgcctggctccctagtcaacaattggaagaaggaattccaaaagtggcttggctcggagagaataaagatatttacggttgatcaggatcacaaagtggaggagttcatcaaatctatcttttattctgtgcttatcatctcctatgagatgctgttgcggtcactcgatcagatcaagaacataaagtttgatcttctgatatgtgacgaaggtcaccggcttaaaaacagcgctataaaaactacgacagcgttaatctccctgagttgtgagaagcgtattattctgaccgggaccccaattcagaacgacctgcaggaattttttgccttaattgactttgtgaatcccggcatactggggtcgctgtcttcgtaccgtaagatctacgaggagcctattatcctcagccgtgagccgtccgctagtgaagaagaaaaggagctcggcgaacgaagggctgccgaactcacttgtctgaccgggctgttcatactaagacgcacacaggaaatcattaataaatacctgccccctaagattgagaacgtagtcttttgcaggccaggcgcactacagatcgagctgtacagaaagctgctcaattcacaggtggttagattttgcctccaggggttgctggagaattctcctcacctgatttgcataggagcccttaaaaaattatgtaatcatccatgcctcctgtttaacagtatcaaagagaaggagtgttcttcaacttgcgataaaaacgaggagaagagtctgtataagggtcttttgtcagtgttcccggcggactacaaccctctgctgttcaccgaaaaagaatccggtaagctccaagtactgtctaagctgttggcggttatacatgaactgcgccctacagaaaaggtggtcctcgtctcaaactacactcagactctgaatatcctgcaggaggtttgtaagcgccacggctatgcctacacaaggctcgatggacaaactcctatcagccagcgccagcagattgtggatggttttaactcacagcatagttccttttttatcttcctgttgagctctaaggctggcggagtaggcctgaatcttatcgggggaagccacttaattctgtacgatatcgattggaatcccgctaccgacatccaggccatgagtcgggtttggcgcgacggacagaagtacccagtgcatatttatcgattgctaacaactggcaccattgaggagaagatttatcagagacagattagcaaacaaggactgtgcggtgcggtcgttgatctgaccaaaacttccgaacacatccagttctcagtggaggagctgaagaatttgtttactttacacgagtcgtcggattgcgtcacccacgatctcttggattgtgaatgtacgggagaagaagtgcataccggggacagcttggaaaagtttattgtgtctagagactgccagctcggaccccatcaccagaagtcaaacagtcttaagccgttgagcatgtcccagctgaagcaatggaaacacttctccggtgatcacctgaaccttaccgatccgtttctagagcgcatcacagagaacgtctctttcatattccagaacatcactacacaggcgaccgggacgtag

SEQ ID NO: 174343 - DNA, 378 bp, Artificial Sequence
  derived and/or modified sequence
atgcggcggagcgccgcccccagccagctgcagggcaacagcttcaagaaaccgaaatttatacctccagggcgctcaaatcccggactcaacgaagagatcaccaagctgaatcccgacattaagctctttgagggggtggccatcaataatacattcttgccttcccagaacgatttgcggatctgctccttaaatctgccctctgaggaaagcacgcgggaaatcaataaccgtgataattgcagtggaaaatattgcttcgaagccccaacactcgccactctggaccccccacatacagtgcactctgcccccaaggaggtggctgtgtctaaggaacaagaggagaagtcagacagcttagtcaagtattag

SEQ ID NO: 174344 - DNA, 2733 bp, Artificial Sequence
  derived and/or modified sequence
atgagacgaagtgcggcaccttcccagctccaggggaacagttttaaaaaacccaaatttatcccccctgggagatctaacccaggattaaacgaagagattaccaagctaaaccccgatataaagctgtttgagggagtcgcaatcaacaatactttcctccccagtcaaaatgaccttcggatttgcagtttaaacctgccatcggaggaatctactagagagatcaataacagagataattgttctggcaagtactgcttcgaggcacctactctggcaacccttgacccacctcacactgtgcattcagctcctaaagaggtcgctgtgagtaaagagcaagaggagaagtccgactcattggtaaagtatttctctgtggtctggtgcaaaccctccaagaagaagcacaaaaaatgggaaggcgacgccgtgttaatcgtcaaaggcaagagtttcatcctcaaaaatctggagggcaaggacattggcagaggtatcggatacaagttcaaggagcttgagaaaatcgaagaagggcagaccctgatgatttgtgggaaagaaatcgaggtgatgggggtcatcagccccgacgacttttctagtggcaggtgctttcaattaggtggtgggagcaccgccattagccacagcagtcaggttgccagaaaatgtttttctaatcctttcaaatctgtatgcaagccatcttccaaggagaatcggcaaaatgactttcaaaactgtaagcccagacacgatccttatactcctaatagtctggtcatgccaaggcctgataaaaaccaccagtgggttttcaataagaactgctttccgctcgtcgatgtggtcattgatccttacctagtgtaccatctcaggccgcatcagaaagaaggaattattttcctatatgagtgcgtcatgggaatgcgcatgaatggcaggtgtggggctattctcgccgacgagatgggcctgggtaagacactccagtgtatttcattgatctggaccctacagtgccagggcccttatggcggaaagcccgtgataaagaagacattaatagtcacacctggaagtcttgtcaacaattggaagaaagagtttcagaagtggctgggcagtgagcgtatcaagatctttacagtggatcaggaccataaggtggaagagttcatcaagagcatcttttactccgtcctgataattagttacgagatgctgctcagatctcttgatcagataaaaaatatcaaattcgacctgcttatctgtgacgaaggccaccgcctaaagaatagcgccatcaaaacgacaaccgctctgattagccttagctgtgagaaacggatcattttgaccggaactccaattcagaacgatcttcaggaattcttcgccttaatcgactttgttaaccctggcattcttggctccttgagttcttatcggaaaatctatgaagagcctattattctgtcccgcgagccctccgcaagcgaagaggaaaaggaactaggagagagacgagcagctgaactgacttgtctcacaggcttgttcattctgagacgaacgcaagagattatcaacaagtatctgccacctaaaatagaaaacgtcgttttctgtagacctggcgctctgcaaatcgagttatacagaaaactgctgaattcccaggtagtacggttctgtctgcagggccttctggagaattcccctcacctcatctgcatcggcgctctgaaaaaactgtgtaaccacccatgtctcctctttaactccatcaaagaaaaggagtgttccagcacctgcgacaagaatgaagagaaatccttgtacaagggcctgttgtctgtatttccagccgactacaaccccctgctgtttacagaaaaagaaagcggaaaactgcaagtgctgtcaaaactcctcgccgttattcacgaactcaggcccacagagaaggtggtcctggttagcaattacacgcagactctgaatatactgcaagaagtgtgcaagcgacacgggtacgcttacacgcgcctggacgggcagacccccatttcccaacgacaacaaatcgtggatggtttcaactcacagcacagcagcttctttatcttcttgttgtctagcaaagctggcggagtggggctgaatcttatcggaggcagccatttaatactgtacgacattgactggaacccagctaccgatatccaggcaatgtcaagggtttggagggatgggcagaaatatccggtgcatatttacagattactgacaacagggaccatcgaagaaaagatatatcagaggcagatttccaagcaggggctgtgtggggcagtggtagacctgaccaaaacgtctgagcatatacagttctccgtggaagagctaaagaacctcttcactcttcacgagtcttctgattgcgttacgcatgacctcctggactgtgaatgtaccggggaggaggtacatacgggagactctttagagaagttcatcgtgtcacgcgattgtcagctaggaccacatcatcagaaatccaatagtttgaagcccctgtctatgtcccagctgaaacagtggaagcacttcagcggtgaccatttaaatctaacagaccccttcctggagcgtataaccgagaacgtgtcattcatttttcagaacattaccactcaggctaccgggacatag

SEQ ID NO: 174345 - DNA, 378 bp, Artificial Sequence
  derived and/or modified sequence
atgcgtagaagcgcagcgccttctcagctgcagggaaactcttttaagaagcctaagttcatacccccaggccgttccaaccctggccttaacgaagaaatcaccaagttgaaccccgacatcaagctgttcgagggtgtcgcaatcaacaacacctttttacctagccaaaatgatctgcgcatatgcagtctaaaccttccctccgaggagagtactagggaaatcaacaaccgggacaactgctccgggaaatactgctttgaagccccaacgttggccactctcgatccccctcataccgttcattctgctccgaaggaggttgccgtgtcaaaggaacaggaagagaagtccgattctctcgtaaaatattag

SEQ ID NO: 174346 - DNA, 3068 bp, Artificial Sequence
  derived and/or modified sequence
gattggcttcgccgaggcgggatccttgagcttctccggcggcgaggggatagctggttaccagaaggacttctttgcagggccagtggtttctgtcagattttcgccggtcacgactgctgaatatgagacgatctgcagcaccaagtcagttgcaggggaattccttcaaaaaaccaaaatttatacctccaggaagaagtaatccaggtctgaatgaagagattacaaaactgaatccagatataaaattatttgagggtgttgcaattaataacacctttctcccgtcacaaaatgatcttagaatatgcagtttaaatctgcctagtgaagaaagtactagagaaatcaataacagagataattgcagtggaaaatattgttttgaagcacctacactggcaacattagatccacctcatacagttcattcggctcctaaagaagtagcagtgtccaaggaacaagaagagaaatctgatagcctagttaaatatttcagtgttgtttggtgtaagccttcaaagaaaaaacataaaaagtgggaaggtgatgctgttcttattgtaaaaggaaagtcatttatattaaagaatttggaaggcaaagacattggaagaggcattggttataaattcaaagagcttgaaaagattgaagagggccaaacactgatgatttgtggaaaagaaatagaagtcatgggtgtaatctctccagatgacttcagcagtggcaggtgttttcagcttggaggaggaagtactgctatctcgcattcttctcaggttgccaggaaatgtttctctaaccctttcaaaagtgtttgtaaaccaagttcaaaggaaaatagacagaatgatttccaaaattgcaaaccacgccatgacccatatacgccaaattccctcgttatgccacgaccagataagaatcaccagtgggtattcaataagaactgtttccctcttgtggatgtagtgattgatccttaccttgtatatcatcttcgaccacatcagaaagaaggaatcatattcctttatgaatgtgtaatgggaatgagaatgaatggcagatgtggagctattcttgctgatgaaatgggtttagggaagacattgcaatgtatttcgctcatctggaccctgcagtgtcagggaccctatggaggcaagccagtaataaagaagacactaattgtcacacctggaagcttggtgaataattggaagaaagaatttcaaaaatggctaggaagtgaaaggatcaagatatttactgttgatcaggaccacaaagttgaagaattcatcaagtctatattttattctgttcttattatcagttatgaaatgttacttcgttccctggatcaaattaagaatataaaatttgatcttctaatctgtgacgaggggcatcgtttgaagaacagtgccattaagacaactacagccctcattagcctttcttgtgagaaaagaataattctaactggtactccaattcagaatgatctgcaagaattttttgcattaattgattttgtaaatccaggaatattaggctctttgtcatcttataggaaaatatatgaagaacccatcattttatcgagagaaccttctgcttctgaggaagaaaaggagttaggagaaagaagagcagctgaacttacttgcctcactggactctttatccttagaagaacccaagaaattataaataaatatctcccacctaaaatagagaatgttgtcttttgccgaccaggagcactacagattgagctttatcgaaagctgttaaattctcaggttgtcaggttctgccttcaagggttgttggaaaatagtccccatctaatatgtataggagctcttaaaaaactgtgcaatcacccctgccttttgttcaactctataaaggaaaaggaatgtagctcaacttgtgataaaaatgaagaaaagagtctatacaaaggcttgctaagtgtgtttcctgctgactacaaccctctcctgtttactgaaaaggagtcaggaaaactacaggtgttgtccaagctcttagcggttatccacgaacttcgacctactgaaaaggtggtgttggtatccaactatacacaaaccttgaacattttacaagaagtatgtaagcgtcatggatatgcttatacaagacttgatggacaaacaccaatctctcaaaggcagcagattgttgatggctttaacagtcaacactcttctttttttatttttttgttaagttcaaaagctggtggtgtaggacttaacctcattggaggatctcacttaattctctatgacattgattggaatccagccactgacattcaggcaatgtctagagtatggagagatggtcagaaatatcctgtacatatttacagactcctaactacaggtacaatagaagaaaagatctatcaaaggcagatcagtaagcaaggtctttgtggggcagttgtcgacctcaccaagacatctgaacatattcagttttcagtagaagaacttaaaaatttgttcacattacatgaaagttcagattgtgttactcatgatctgcttgactgtgagtgtacaggagaagaagttcatacaggtgattcgttggaaaaattcattgtctctagagattgtcagcttggtccacatcaccagaaatctaactccctgaaacctctttctatgtcccagctgaagcaatggaaacatttttctggagatcatttaaatcttacagatccttttcttgaaagaataacagaaaatgtgtcattcatttttcagaatataaccactcaagctactggcacatagtgaaagattacttctgacattccattgctcttcttttgaaaattagtatggtaattaaatgtactttttgaaaattaatagaattatttaaattacagtatatgttgcaaaatatatcacttttgatacaatagtcaaaattgagtggtttaatgttttgtaaatattaagtgtttaaatgaaaaataaagatgtgcttatatcattgta

SEQ ID NO: 174347 - DNA, 472 bp, Artificial Sequence
  derived and/or modified sequence
tcctccaggcctctgaagaagaaattcagaacaaagaataatagcagttagagttcagtcctgtttcccctaatctgaggtcacgactgctgaatatgagacgatctgcagcaccaagtcagttgcaggggaattccttcaaaaaaccaaaatttatacctccaggaagaagtaatccaggtctgaatgaagagattacaaaactgaatccagatataaaattatttgagggtgttgcaattaataacacctttctcccgtcacaaaatgatcttagaatatgcagtttaaatctgcctagtgaagaaagtactagagaaatcaataacagagataattgcagtggaaaatattgttttgaagcacctacactggcaacattagatccacctcatacagttcattcggctcctaaagaagtagcagtgtccaaggaacaagaagagaaatctgatagcctagttaaatattt

SEQ ID NO: 174348 - DNA, 3040 bp, Artificial Sequence
  derived and/or modified sequence
cttgagcttctccggcggcgaggggatagctggttaccagaaggacttctttgcagggccagtggtttctgtcagattttcgccggtcacgactgctgaatatgagacgatctgcagcaccaagtcagttgcaggggaattccttcaaaaaaccaaaatttatacctccaggaagaagtaatccaggtctgaatgaagagattacaaaactgaatccagatataaaattatttgagggtgttgcaattaataacacctttctcccgtcacaaaatgatcttagaatatgcagtttaaatctgcctagtgaagaaagtactagagaaatcaataacagagataattgcagtggaaaatattgttttgaagcacctacactggcaacattagatccacctcatacagttcattcggctcctaaagaagtagcagtgtccaaggaacaagaagagaaatctgatagcctagttaaatatttcagtgttgtttggtgtaagccttcaaagaaaaaacataaaaagtgggaaggtgatgctgttcttattgtaaaaggaaagtcatttatattaaagaatttggaaggcaaagacattggaagaggcattggttataaattcaaagagcttgaaaagattgaagagggccaaacactgatgatttgtggaaaagaaatagaagtcatgggtgtaatctctccagatgacttcagcagtggcaggtgttttcagcttggaggaggaagtactgctatctcgcattcttctcaggttgccaggaaatgtttctctaaccctttcaaaagtgtttgtaaaccaagttcaaaggaaaatagacagaatgatttccaaaattgcaaaccacgccatgacccatatacgccaaattccctcgttatgccacgaccagataagaatcaccagtgggtattcaataagaactgtttccctcttgtggatgtagtgattgatccttaccttgtatatcatcttcgaccacatcagaaagaaggaatcatattcctttatgaatgtgtaatgggaatgagaatgaatggcagatgtggagctattcttgctgatgaaatgggtttagggaagacattgcaatgtatttcgctcatctggaccctgcagtgtcagggaccctatggaggcaagccagtaataaagaagacactaattgtcacacctggaagcttggtgaataattggaagaaagaatttcaaaaatggctaggaagtgaaaggatcaagatatttactgttgatcaggaccacaaagttgaagaattcatcaagtctatattttattctgttcttattatcagttatgaaatgttacttcgttccctggatcaaattaagaatataaaatttgatcttctaatctgtgacgaggggcatcgtttgaagaacagtgccattaagacaactacagccctcattagcctttcttgtgagaaaagaataattctaactggtactccaattcagaatgatctgcaagaattttttgcattaattgattttgtaaatccaggaatattaggctctttgtcatcttataggaaaatatatgaagaacccatcattttatcgagagaaccttctgcttctgaggaagaaaaggagttaggagaaagagagcagctgaacttacttgcctcactggactctttacttagaagaacccaagaaattataaataaatatctcccacctaaaatagagaatgttgtcttttgccgaccaggagcactacagattgagctttatcgaaagctgttaaattctcaggttgtcaggttctgccttcaagggttgttggaaaatagtccccatctaatatgtataggagctcttaaaaaactgtgcaatcacccctgccttttgttcaactctataaaggaaaaggaatgtagctcaacttgtgataaaaatgaagaaaagagtctatacaaaggcttgctaagtgtgtttcctgctgactacaaccctctcctgtttactgaaaaggagtcaggaaaactacaggtgttgtccaagctcttagcggttatccacgaacttcgacctactgaaaaggtggtgttggtatccaactatacacaaaccttgaacattttacaagaagtatgtaagcgtcatggatatgcttatacaagacttgatggacaaacaccaatctctcaaaggcagcagattgttgatggctttaacagtcaacactcttctttttttatttttttgttaagttcaaaagctggtggtgtaggacttaacctcattggaggatctcacttaattctctatgacattgattggaatccagccactgacattcaggcaatgtctagagtatggagagatggtcagaaatatcctgtacatatttacagactcctaactacaggtacaatagaagaaaagatctatcaaaggcagatcagtaagcaaggtctttgtggggcagttgtcgacctcaccaagacatctgaacatattcagttttcagtagaagaacttaaaaatttgttcacattacatgaaagttcagattgtgttactcatgatctgcttgactgtgagtgtacaggagaagaagttcatacaggtgattcgttggaaaaattcattgtctctagagattgtcagcttggtccacatcaccagaaatctaactccctgaaacctctttctatgtcccagctgaagcaatggaaacatttttctggagatcatttaaatcttacagatccttttcttgaaagaataacagaaaatgtgtcattcatttttcagaatataaccactcaagctactggcacatagtgaaagattacttctgacattccattgctcttcttttgaaaattagtatggtaattaaatgtactttttgaaaattaatagaattatttaaattacagtatatgttgcaaaatatatcacttttgatacaatagtcaaaattgagtggtttaatgttttgtaaatattaagtgtttaaatgaaaaataaagatgtgcttatatcattgt

SEQ ID NO: 174349 - DNA, 2733 bp, Artificial Sequence
  derived and/or modified sequence
atgagaagaagcgccgcccccagccagctgcagggcaacagcttcaagaagcccaagttcatcccccccggcagaagcaaccccggcctgaacgaggagatcaccaagctgaaccccgacatcaagctgttcgagggcgtggccatcaacaacaccttcctgcccagccagaacgacctgagaatctgcagcctgaacctgcccagcgaggagagcaccagagagatcaacaacagagacaactgcagcggcaagtactgcttcgaggcccccaccctggccaccctggaccccccccacaccgtgcacagcgcccccaaggaggtggccgtgagcaaggagcaggaggagaagagcgacagcctggtgaagtacttcagcgtggtgtggtgcaagcccagcaagaagaagcacaagaagtgggagggcgacgccgtgctgatcgtgaagggcaagagcttcatcctgaagaacctggagggcaaggacatcggcagaggcatcggctacaagttcaaggagctggagaagatcgaggagggccagaccctgatgatctgcggcaaggagatcgaggtgatgggcgtgatcagccccgacgacttcagcagcggcagatgcttccagctgggcggcggcagcaccgccatcagccacagcagccaggtggccagaaagtgcttcagcaaccccttcaagagcgtgtgcaagcccagcagcaaggagaacagacagaacgacttccagaactgcaagcccagacacgacccctacacccccaacagcctggtgatgcccagacccgacaagaaccaccagtgggtgttcaacaagaactgcttccccctggtggacgtggtgatcgacccctacctggtgtaccacctgagaccccaccagaaggagggcatcatcttcctgtacgagtgcgtgatgggcatgagaatgaacggcagatgcggcgccatcctggccgacgagatgggcctgggcaagaccctgcagtgcatcagcctgatctggaccctgcagtgccagggcccctacggcggcaagcccgtgatcaagaagaccctgatcgtgacccccggcagcctggtgaacaactggaagaaggagttccagaagtggctgggcagcgagagaatcaagatcttcaccgtggaccaggaccacaaggtggaggagttcatcaagagcatcttctacagcgtgctgatcatcagctacgagatgctgctgagaagcctggaccagatcaagaacatcaagttcgacctgctgatctgcgacgagggccacagactgaagaacagcgccatcaagaccaccaccgccctgatcagcctgagctgcgagaagagaatcatcctgaccggcacccccatccagaacgacctgcaggagttcttcgccctgatcgacttcgtgaaccccggcatcctgggcagcctgagcagctacagaaagatctacgaggagcccatcatcctgagcagagagcccagcgccagcgaggaggagaaggagctgggcgagagaagagccgccgagctgacctgcctgaccggcctgttcatcctgagaagaacccaggagatcatcaacaagtacctgccccccaagatcgagaacgtggtgttctgcagacccggcgccctgcagatcgagctgtacagaaagctgctgaacagccaggtggtgagattctgcctgcagggcctgctggagaacagcccccacctgatctgcatcggcgccctgaagaagctgtgcaaccacccctgcctgctgttcaacagcatcaaggagaaggagtgcagcagcacctgcgacaagaacgaggagaagagcctgtacaagggcctgctgagcgtgttccccgccgactacaaccccctgctgttcaccgagaaggagagcggcaagctgcaggtgctgagcaagctgctggccgtgatccacgagctgagacccaccgagaaggtggtgctggtgagcaactacacccagaccctgaacatcctgcaggaggtgtgcaagagacacggctacgcctacaccagactggacggccagacccccatcagccagagacagcagatcgtggacggcttcaacagccagcacagcagcttcttcatcttcctgctgagcagcaaggccggcggcgtgggcctgaacctgatcggcggcagccacctgatcctgtacgacatcgactggaaccccgccaccgacatccaggccatgagcagagtgtggagagacggccagaagtaccccgtgcacatctacagactgctgaccaccggcaccatcgaggagaagatctaccagagacagatcagcaagcagggcctgtgcggcgccgtggtggacctgaccaagaccagcgagcacatccagttcagcgtggaggagctgaagaacctgttcaccctgcacgagagcagcgactgcgtgacccacgacctgctggactgcgagtgcaccggcgaggaggtgcacaccggcgacagcctggagaagttcatcgtgagcagagactgccagctgggcccccaccaccagaagagcaacagcctgaagcccctgagcatgagccagctgaagcagtggaagcacttcagcggcgaccacctgaacctgaccgaccccttcctggagagaatcaccgagaacgtgagcttcatcttccagaacatcaccacccaggccaccggcacctag

SEQ ID NO: 174350 - DNA, 378 bp, Artificial Sequence
  derived and/or modified sequence
atgagaagaagcgccgcccccagccagctgcagggcaacagcttcaagaagcccaagttcatcccccccggcagaagcaaccccggcctgaacgaggagatcaccaagctgaaccccgacatcaagctgttcgagggcgtggccatcaacaacaccttcctgcccagccagaacgacctgagaatctgcagcctgaacctgcccagcgaggagagcaccagagagatcaacaacagagacaactgcagcggcaagtactgcttcgaggcccccaccctggccaccctggaccccccccacaccgtgcacagcgcccccaaggaggtggccgtgagcaaggagcaggaggagaagagcgacagcctggtgaagtactag

SEQ ID NO: 174351 - protein, 1105 aa, Artificial Sequence
  derived and/or modified sequence
MAATASAGVPATVSEKQEFYQLLKNLINPSCMVRRQAEEIYENIPGLCKTTFLLDAVRNRRAGYEVRQMAAALLRRLLSSGFEEVYPNLPADVQRDVKIELILAVKLETHASMRKKLCDIFAVLARNLIDEDGTNHWPEGLKFLIDSIYSKNVVLWEVALHVFWHFPGIFGTQERHDLDIIKRLLDQCIQDQEHPAIRTLSARAAAAFVLANENNIALFKDFADLLPGILQAVNDSCYQDDDSVLESLVEIADTVPKYLGPYLEDTLQLSLKLCGDSRLSNLQRQLALEVIVTLSETATPMLKKHTNIIAQAVPHILAMMVDLQDDEDWVNADEMEEDDFDSNAVAAESALDRLACGLGGKVVLPMTKEHIMQMLQSPDWKYRHAGLMALSAIGEGCHQQMESILDETVNSVLLFLQDPHPRVRAAACTTLGQMATDFAPNFQKKFHETVIAALLRTMENQGNQRVQSHAASALIIFIEDCPKSLLVLYVDSMVKNLHSVLVIKLQELIRNGTKLALEQLVTTIASVADTIEEKFVPYYDIFMPSLKHIVELAVQKELKLLRGKTIECISHIGLAVGKEKFMQDASNVMQLLLKTQSDLNNMEDDDPQTSYMVSAWARMCKILGKDFQQYLPLVIEPLIKTASAKPDVALLDTQDVENMSDDDGWQFVNLGDQQSFGIKTSGLEAKATACQMLVYYAKELREGFVEYTEQVVKLMVPLLKFYFHDNVRVAAAESMPFLLECARIRGPEYLAQMWQFICDPLIKAIGTEPDTDVLSEIMNSFAKSIEVMGDGCLNDEHLEELGGILKAKLEGHFKNQELRQVKRQEENYDQQVEMSLQDEDECDVYILTKVSDILHSLFSTYKEKILPWFEQLLPLIVNLICSSRPWPDRQWGLCIFDDIIEHCSPTSFKYVEYFRWPMLLNMRDNNPEVRQAAAYGLGVMAQFGGDDYRSLCSEAVPLLVKVIKCANSKTKKNVIATENCISAIGKILKFKPNCVNVDEVLPHWLSWLPLHEDKEEAIQTLSFLCDLIESNHPVVIGPNNSNLPKIISIIAEGKINETINYEDPCAKRLANVVRQVQTSEDLWLECVSQLDDEQQEALQELLNFA

SEQ ID NO: 174352 - DNA, 3318 bp, Artificial Sequence
  derived and/or modified sequence
atggctgcaacggctagcgccggagtacccgccacagtgtccgagaagcaagagttctatcaactgctgaaaaacctgatcaacccaagctgcatggtgaggcgccaggctgaggagatctatgagaatatacccggtctgtgcaagactacttttcttttggatgcagtgcgaaatcgacgggcaggatacgaggtgcggcagatggctgccgctttactccggagactgttgtcttctggtttcgaagaggtatatccgaaccttcctgcagacgtccagcgggacgtaaaaattgaactcattctggcagtgaaactagaaacacacgcctccatgagaaagaaactatgcgacatatttgctgttcttgcaaggaaccttatcgatgaagacgggaccaatcactggcccgaaggtttaaaatttctgatagactcgatctatagcaaaaatgtggtcctgtgggaagtggccctccacgtgttttggcactttccaggtatattcggcacccaagaacggcatgacttggatattatcaagcggctgctggatcagtgtattcaggatcaagagcaccccgccattagaactctgtccgctagagcggctgcagcattcgttctggccaacgagaataacatagcgttatttaaggacttcgcggacctgctgccaggcatccttcaggccgtgaatgactcttgctaccaggatgatgacagcgtgctggaatcactggtcgaaattgctgatacggttcctaagtacctgggaccgtatctggaggacacattgcagctctcactgaagctgtgcggagattcgaggctctcgaacctgcagcgccagctggccctggaggtaattgtgactctgtccgaaaccgccacgccaatgctgaaaaagcacaccaatattatcgcccaggccgtgccgcacatcctggcgatgatggttgacctgcaggacgacgaggactgggtgaacgcggacgagatggaggaggacgatttcgattcaaacgctgtggcagcggaatcagcactcgacagactggcctgtggtttgggaggaaaagttgtgctgccaatgaccaaggagcatattatgcagatgctccagagtccagattggaaatacaggcatgccggcttgatggctttatcagccattggggaaggctgtcatcaacaaatggagtccatcttggacgagacggttaattcagtgctgctcttcctacaggacccccaccccagggtgagagccgcggcgtgtacaaccctgggccagatggccaccgactttgccccaaacttccagaaaaagttccacgagacagtcattgcagcactgctgagaacaatggagaaccaagggaatcagcgggtgcaatcacacgcagcctccgctctcatcatattcatagaggattgtccgaagagcctgctggtcctgtatgtcgactccatggtaaaaaacctccacagcgtgcttgtgatcaaactgcaggaactgatccgcaatggcaccaagcttgccttggagcagctcgtgacgaccatcgcgagcgtggcggatacaatcgaagagaagtttgtaccctactatgacatcttcatgccaagtctgaagcacatcgtcgaattagctgtgcagaaggagctgaaactgctgagggggaagactattgaatgcatctcacacatcggcctggcagttgggaaggagaagttcatgcaagatgcgtcgaacgtgatgcagctgctgttgaaaacccagtcagacctgaataacatggaagacgatgatcctcaaacatcatacatggtcagcgcctgggcacgtatgtgtaagattctgggaaaggacttccaacagtatctgcctctggtcatcgaaccccttattaagactgccagcgccaagccagatgtcgctttgctcgacactcaagacgttgagaacatgtctgatgacgacggatggcagttcgtcaatcttggcgatcagcagtcattcggcatcaagacctctggcttggaagccaaggcgacagcttgccagatgctcgtctactacgcaaaagaactgagggaaggcttcgtggagtacactgaacaagtcgtcaagctcatggtcccactgctaaaattctacttccacgacaacgttcgcgtggccgccgccgaaagcatgccctttcttttagaatgtgcacggatacgagggcctgaatacctagcccagatgtggcaatttatatgcgatccactgataaaagcgatcggcacagagccggacaccgatgtcctgagcgagattatgaattcattcgctaaaagcattgaggttatgggcgacgggtgccttaatgacgagcacctggaggaactgggaggaattctgaaggcaaagttagaaggccacttcaagaaccaggaactaagacaggtcaagcggcaagaggaaaattatgaccagcaagtggagatgtcacttcaggatgaggatgagtgtgacgtttacatcttgactaaagtcagcgacattctgcactcattgttttctacgtacaaagagaagatcctgccttggtttgagcaattactgccgctcattgttaacctgatctgcagctctaggccttggccggacaggcagtggggactttgtatctttgatgatatcattgagcactgtagccctacgagctttaagtacgtggagtacttccggtggcctatgctcctgaacatgagggataacaaccctgaggtgagacaggccgcagcctatggcctgggcgtaatggcccagttcgggggagatgactaccgatccctctgtagtgaggccgttccactgctggttaaagtgatcaagtgtgctaattccaagactaagaagaatgtgatagctactgagaattgtataagcgcaatcggcaaaatactgaagtttaaacctaactgcgtgaacgtggacgaagttctgccccactggctgtcctggctaccgctgcacgaggataaggaggaagctatccaaactctttctttcctatgcgacctcatagagagtaaccaccctgtggtcattgggcctaataactccaaccttccgaagatcatcagcattatcgctgaggggaagatcaacgagaccattaactacgaagacccctgtgcaaagaggctggcgaatgtggttaggcaggtccagacctctgaagacctgtggctcgagtgtgtctcacagctggatgatgagcaacaggaagcgcttcaggaactgctgaacttcgcctag

SEQ ID NO: 174353 - DNA, 3318 bp, Artificial Sequence
  derived and/or modified sequence
atggccgccacagccagcgctggggtgcctgccaccgtgtctgagaagcaggagttctaccagctgctgaagaacctgatcaaccccagctgcatggtgcggcggcaggccgaggagatctatgagaacatccctggcctgtgcaagaccaccttcctgctggatgctgtgaggaacagaagagctggctatgaggtgcggcagatggctgctgccctgctgcggcggctgctgagcagcggctttgaggaggtgtaccccaacctgcctgcagatgtgcagagagatgtgaagattgagctgatcctggccgtgaagctggagacccacgcctccatgaggaagaagctgtgtgacatctttgctgtgctggccaggaacctgattgatgaagatggcaccaaccactggccagagggcctgaagttcctgattgacagcatctacagcaagaatgtggtgctgtgggaggtggccctgcacgtgttctggcacttccctggcatcttcggcacccaggagagacatgacctggacatcatcaagaggctgctggaccagtgcatccaggaccaggagcacccagccatccgcaccctgagcgcccgggctgctgctgcctttgtgctggccaatgaaaacaacatcgccctcttcaaggactttgctgacctgctgcccggcatcctgcaggccgtgaatgacagctgctaccaggatgatgattctgtgctggagagcctggtggagattgctgacacagtgcccaagtacctgggcccctacctggaggacaccctgcagctgagcctgaagctgtgtggggacagccggctgagcaacctgcagaggcagctggccctggaggtgattgtgaccctgtctgaaacagccacccccatgctgaagaagcacaccaacatcatcgcccaggccgtgccccacatcctggccatgatggtggacctgcaggatgatgaggactgggtgaatgctgatgagatggaggaggatgactttgacagcaatgctgtggccgctgagagcgccctggaccggctggcctgtggcctgggcggcaaggtggtgctgcccatgaccaaggagcacatcatgcagatgctgcagagcccagactggaagtacagacatgctggcctgatggccctgagcgccatcggggagggctgccaccagcagatggagagcatcctggatgagaccgtgaacagcgtgctgctcttcctgcaggacccccacccccgggtgcgggccgccgcctgcaccaccctgggccagatggccacagactttgcccccaacttccagaagaagttccatgaaacagtgattgctgccctgctgcggaccatggagaaccagggcaaccagagggtgcagagccacgccgccagcgccctgatcatcttcatcgaggactgccccaagagcctgctggtgctgtatgtggacagcatggtgaagaacctgcacagcgtgctggtgatcaagctgcaggagctgatcagaaatggcaccaagctggccctggagcagctggtgaccaccatcgcctctgtggccgacaccatcgaggagaagtttgtgccctactatgacatcttcatgcccagcctgaagcacatcgtggagctggccgtgcagaaggagctgaagctgctgcggggcaagaccatcgagtgcatcagccacatcggcctggccgtgggcaaggagaagttcatgcaggatgccagcaatgtgatgcagctgctgctgaagacccagagcgacctgaacaacatggaggatgatgacccccagaccagctacatggtgtctgcctgggccaggatgtgcaagatcctgggcaaggacttccagcagtacctgcccctggtgattgagcccctcatcaagacagccagcgccaagccagatgtggccctgctggacacccaggatgtggagaacatgtctgatgatgatggctggcagtttgtgaacctgggggaccagcagagctttggcatcaagaccagcggcctggaggccaaggccacagcctgccagatgctggtgtactatgccaaggagctgcgggagggctttgtggagtacacagagcaggtggtgaagctgatggtgcccctgctgaagttctacttccatgacaacgtgcgggtggccgctgctgagagcatgcccttcctgctggagtgtgcccgcatccggggccctgagtacctggcccagatgtggcagttcatctgtgaccccctcatcaaggccatcggcacagagccagacacagatgtgctgtctgagatcatgaacagctttgccaagagcattgaggtgatgggagatggctgcctgaatgatgagcacctggaggagctgggcggcatcctgaaggccaagctggagggccacttcaagaaccaggagctgcggcaggtgaagaggcaggaggagaactatgaccagcaggtggagatgagcctgcaggatgaagatgaatgtgatgtgtacatcctgaccaaggtgtctgacatcctgcacagcctcttcagcacctacaaggagaagatcctgccctggtttgagcagctgctgcccctcatcgtgaacctgatctgcagcagccggccctggccagaccggcagtggggcctgtgcatctttgatgacatcatcgagcactgcagccccaccagcttcaagtatgtggagtacttccgctggcccatgctgctgaacatgagggacaacaaccctgaggtgcggcaggccgccgcctacggcctgggcgtgatggcccagtttggaggagatgactaccgcagcctgtgcagcgaggccgtgcccctgctggtgaaggtgatcaagtgtgccaacagcaagaccaagaagaatgtgattgccacagagaactgcatcagcgccatcggcaagatcctgaagttcaagcccaactgtgtgaatgtggatgaggtgctgccccactggctgtcctggctgcccctgcacgaggacaaggaggaggccatccagaccctgtccttcctgtgtgacctgattgagagcaaccaccctgtggtgattggccccaacaacagcaacctgcccaagatcatcagcatcatcgccgagggcaagatcaatgagaccatcaactatgaggacccctgtgccaagaggctggccaacgtggtgcggcaggtgcagaccagcgaggacctgtggctggagtgtgtgtcccagctggatgatgagcagcaggaggccctgcaggagctgctgaactttgcctag

SEQ ID NO: 174354 - DNA, 3318 bp, Artificial Sequence
  derived and/or modified sequence
atggccgccaccgccagcgccggcgtgcccgccaccgtgagcgagaagcaggagttctatcagctgctgaagaatctgattaatccttcctgcatggttcgccgccaggccgaggaaatctatgagaacatccccggcctgtgtaaaacaacttttcttctggatgccgtgcgcaaccggcgagctggatacgaggttcgacagatggccgccgccctgttacgacggcttctgtcatcagggtttgaggaggtctatccaaacctacccgcagatgtgcaacgggatgtgaagatcgagctcatacttgccgtgaagttggagacacacgcgtccatgcgcaaaaagctgtgtgacatatttgccgtgctggcaagaaatttaatagacgaggatggcacgaaccactggcccgaggggctaaaatttctcatagactcaatttactcaaagaatgtggtcctctgggaggtggctctgcatgtcttttggcattttccaggcatttttggtacacaagaaaggcacgatttagatattattaagcggcttctcgatcagtgcatccaggatcaggaacacccagccatcagaacgctgtcagccagagctgccgcagcctttgtgctggctaacgagaacaatattgcactgtttaaggatttcgccgaccttttgcctggcatcctccaagctgtgaacgattcttgttatcaagacgatgacagcgtcctggagagcctcgttgagatcgcggatacagtcccaaaatacttagggccctacctcgaagacacattgcaactcagcctcaaactgtgcggcgatagccgcctctctaacctccaaagacaactggcactggaggttattgtgacactttccgaaacagccacccctatgctcaagaaacataccaatatcattgcgcaggccgtgccacacatacttgcaatgatggtcgacctgcaggatgacgaggactgggtcaatgcggatgaaatggaggaagacgatttcgattccaatgcggtcgcagctgagtcagctttagataggcttgcttgtggtctgggtggcaaggttgtgctccctatgactaaagagcacattatgcagatgctgcagtctccagattggaagtatcgccatgccgggctgatggcactgtccgctatcggcgagggttgtcatcagcagatggagtcgatcttggatgagaccgtgaactcagtgttgttgttcctgcaggatccccatccaagagtccgagccgctgcatgcaccacactcggtcagatggccacagatttcgcaccaaattttcagaaaaagttccatgaaactgtgattgcagccctgctgaggactatggaaaaccagggcaaccagcgggtgcagtcacatgccgcctccgccctgattattttcatcgaagattgtcctaaaagcctgctagtgctttacgtggacagcatggtgaagaatctgcactcagttctagtaatcaagttacaagaactcataaggaatggcactaagctggctctggagcagctcgtcactacaattgcgagcgtggctgacactatagaggagaaatttgtaccatattacgatatttttatgccgtcactcaaacatattgtcgaactcgcagtgcagaaagagttgaagctcctgcggggcaaaactattgagtgcatatcccacattggcctcgcagtgggaaaggagaagtttatgcaagacgcttccaacgtcatgcaactgctccttaaaacgcaaagcgacctcaacaacatggaggatgacgacccccagaccagctatatggtcagtgcgtgggcaagaatgtgcaagattcttggcaaggatttccagcaatacttgcccttagtgatagagcccctgatcaagaccgcttctgcaaaacctgatgtcgctcttctggatacacaggacgttgaaaatatgtctgatgatgacggttggcagttcgtaaatcttggcgatcagcagtccttcggcataaagaccagtgggctggaagctaaggcaacagcttgccagatgttggtatattacgccaaagagttgcgcgagggatttgtggaatatacagagcaagtcgtgaaactgatggtcccacttctcaagttctactttcacgataacgttagagtggccgccgccgaaagcatgccattcctgctggaatgtgccagaatacggggccccgagtatctcgctcaaatgtggcagtttatttgcgaccccctcatcaaagctattgggaccgagcccgacacagatgtcctcagtgaaattatgaatagttttgcaaagagcatcgaggtcatgggagacgggtgcctgaatgacgaacacctggaagaactgggaggaatcttgaaggcaaagctcgagggtcactttaaaaaccaggaactcagacaagtaaagcgacaggaggaaaattacgaccagcaagtggaaatgagcctccaggatgaagacgagtgcgacgtgtacatactgacgaaagtcagcgatattttgcactctctgttttctacttataaggaaaagatacttccatggtttgagcagctgttacccttgatcgtcaatctgatctgctccagcagaccttggcccgatcgccagtggggcttgtgtatttttgatgatataatagaacattgttcacccacctcatttaaatacgtagagtatttccggtggccaatgctcctgaatatgagggacaataaccctgaagtgcgccaggccgccgcgtacggtctcggcgtaatggctcagttcggaggtgacgactatcgttccctttgttcggaggccgtgcctctgttggtgaaagtgattaaatgcgccaactctaaaactaaaaaaaatgtcatcgctaccgagaactgcatatctgcaatcggtaaaatcctcaaatttaagccaaactgtgtgaacgtggacgaagtcctgccccactggttgagctggcttcctctacacgaggataaggaagaagctattcaaacactgtcgttcctgtgtgacttgatcgagtctaaccaccctgtcgtcatcggccccaataactcaaacctgccaaagattatttcgattattgcggaaggcaaaattaatgaaacaatcaactatgaggatccctgcgccaagaggctggctaatgtggtgaggcaagtacaaacctctgaagatttatggctggagtgtgtgtcccagttagatgacgaacagcaggaggccttacaagagctgttaaactttgcttag

SEQ ID NO: 174355 - DNA, 3318 bp, Artificial Sequence
  derived and/or modified sequence
atggcggcaaccgcatcagccggtgtcccggcaacggtgtctgagaaacaggagttttaccagctgttgaaaaatctaatcaatcctagttgcatggtgcggagacaagccgaggagatctatgaaaacattcctggactgtgtaagacaacttttctgctggacgctgtccgcaatcggagggctgggtacgaggttcgccagatggctgccgctctcttgaggaggctgctatctagcggatttgaagaagtataccctaatcttcccgcagatgtgcaaagggacgtgaagatcgaacttatcctcgccgtgaagcttgaaacacacgcttctatgaggaaaaagctgtgcgacattttcgcagtgttggcacgcaacctgatcgacgaagatggcaccaatcactggccagagggactgaagttcctgatagattccatttattctaaaaatgtggtgctgtgggaggtcgcgctccacgtgttttggcactttcctggcatctttggaacgcaggaaaggcacgatttggatattataaagcgcctgcttgaccaatgcatccaggatcaggagcaccccgcaatcagaacgctgagcgcaagggccgcagcagcctttgtgctggccaacgagaataatattgcactttttaaggatttcgctgacttgttgcccggaattctccaggccgtgaatgattcttgttaccaggacgatgattccgtgttagaatcattggtggaaatcgccgatactgttcctaaatacctaggaccctatctcgaggacacactccagctcagtctcaaactctgcggagactccagactgtctaatcttcagagacagttggctctggaggtgatcgtcactttatcagaaacggccactccaatgctgaaaaagcataccaacattatcgcccaagcggttccccatatcctggctatgatggtcgatcttcaagatgatgaggattgggtcaacgctgacgagatggaagaagacgacttcgacagcaacgctgtagccgcagaatccgcattagacagactggcatgcgggcttggcggtaaagtcgtcttgccgatgaccaaggaacacataatgcagatgctgcagtctccggattggaagtatcgccacgcgggactgatggccttgtcggctatcggtgaagggtgtcaccagcagatggagtctattcttgacgaaaccgtcaactctgtactgctttttttgcaggatccacaccctcgcgtgagagcggctgcctgcaccaccctcggtcagatggcaaccgactttgctcctaacttccagaagaagttccatgagaccgtgatcgccgctctgttgaggaccatggagaatcaggggaaccagagagtacagtcacatgctgcatctgctctgataatattcatcgaggattgccctaagtctctactggtcctgtacgtcgatagtatggtgaaaaatttgcactcagtcctcgtgattaagctccaggagctgattcgtaatgggaccaagttagctttagagcagctggtcaccacaatagcttctgtggctgacacaattgaggaaaaatttgtgccctattacgacatctttatgccttccctgaagcacatagtagaactcgctgttcagaaggaactgaagttgcttagaggtaaaacaatcgagtgcatctctcatatcgggctcgccgtaggaaaggagaaattcatgcaagatgccagtaatgttatgcagttgttactgaaaacacagtcggacctcaacaatatggaggacgacgacccccaaacaagttatatggtcagcgcctgggcgagaatgtgtaaaatcctggggaaagacttccagcagtatctcccccttgttattgaacccttgatcaaaaccgcatccgcaaagccagatgtagccctcctcgatacgcaggacgtcgaaaatatgagcgatgatgatgggtggcaattcgtgaatctcggcgatcaacaaagcttcggtatcaagacttccgggcttgaggctaaggcaaccgcctgtcagatgctggtgtattatgctaaggaactgagggaagggtttgtggagtacactgagcaggtagtgaaactgatggtcccactgctaaaattctactttcatgacaacgtacgggttgcagcagctgagagcatgccctttctcctggagtgtgccagaattcggggtcccgagtacctggcacagatgtggcagtttatctgtgaccctttgatcaaagccatcgggaccgaaccagatacagatgtgctgagcgagatcatgaatagcttcgccaagtcaattgaagtcatgggagacggctgtctgaacgatgagcacctcgaagagcttgggggaattctgaaggctaagctggagggccactttaagaaccaggagttaagacaggtgaaacgccaggaggaaaactacgaccagcaggtggaaatgtccttacaggacgaagacgagtgcgacgtgtacattctgaccaaagtttcagacatcttgcattctctttttagtacatacaaggaaaagatcctcccatggtttgaacaactgcttcctcttattgtgaatcttatttgttcctctaggccttggcctgatcgccagtggggcctatgcatcttcgacgacatcatagagcactgttcaccaacttcgtttaagtacgttgaatacttcaggtggcccatgttgttgaacatgcgggacaacaatcccgaagttcgacaggccgcagcctacggcctaggtgtcatggcacagtttggtggggacgattataggtcattatgttccgaagcagtgcccttactggtcaaggttattaaatgcgctaactcaaaaaccaagaagaatgtcatcgccactgagaattgcatctcagccattgggaagatcctgaagttcaagcctaactgtgtgaatgtggatgaggtgctgccacactggctctcatggctgcccctgcatgaggataaagaggaagcaatccaaaccctctcttttctgtgcgatctgatcgaatctaaccatcctgttgtaattggtcccaacaatagcaacttgcctaagattatctctattatcgccgagggaaaaattaatgagactattaactatgaagatccttgcgccaaacgactcgctaatgtagtacgccaagtccagacttccgaggacttatggttggagtgcgtgtcacagctggatgatgagcagcaagaggcattacaagagctccttaattttgcatag

SEQ ID NO: 174356 - DNA, 4576 bp, Artificial Sequence
  derived and/or modified sequence
gacagagcgcaatggcggcaaccgcgtctgcaggggtgccggcgaccgtgtcagaaaagcaagagttttaccagcttctgaagaacctgatcaatccaagctgtatggtgcggaggcaagcagaggaaatctatgaaaatatcccaggtctgtgtaagactaccttcctcttagatgccgtcagaaatagaagagcaggttatgaggtgagacaaatggctgccgcactgctacgacggcttttgtcctctgggtttgaggaggtttatccaaatctgcctgctgatgttcagagagatgtcaagattgaactgattctggctgttaagttagaaacacatgctagcatgaggaaaaaactttgtgatatttttgcagtgctggccaggaatttgatagatgaggatggcactaaccactggccggaaggtctgaagtttcttattgattcaatctactccaaaaatgtggttctatgggaagttgcacttcacgttttctggcactttcctgggatttttgggacccaagagcggcatgatttggatatcatcaaacggttgttggaccagtgtattcaagatcaagaacatccagcaatcaggacattatccgctagagctgcagctgcatttgtacttgctaatgagaataatattgctcttttcaaagactttgcagacttgcttcctggaatcttacaggctgtgaatgactcatgctaccaggatgatgattcagtgctagaatcccttgttgagattgcagataccgtacctaagtacttgggtccttatttagaagatactctacagttgagtttgaagttatgtggagactctaggcttagtaatctgcagcgccagctggccctcgaagttatagtgaccttgtctgaaactgccactccgatgttgaaaaaacatacaaatattattgcacaggcagttcctcatatattagcaatgatggttgatctacaagatgatgaggactgggtaaatgctgatgaaatggaagaagatgattttgacagcaatgcagttgctgcggagagtgcactagacagactggcttgtgggcttggtggaaaagttgttttaccaatgaccaaggagcatatcatgcagatgcttcagagccctgactggaagtatcgacatgctggattaatggccttatctgccattggagaaggatgccatcaacaaatggaatcaattctagatgaaacagttaactccgttttgctttttcttcaggatcctcatccaagggtgagggctgcagcctgtactacacttggacagatggctacagattttgcacctaatttccaaaagaaatttcatgaaacagtgattgcagctctgttacgtaccatggaaaatcaaggtaatcagcgtgtgcaatcacatgcagcttctgctcttattatttttattgaagactgccctaaatcattgctagttctatatgtggatagtatggtgaaaaatctacattccgtcttggtgattaaacttcaagagttgattcggaatggaactaagttggctttggaacaacttgtgacaaccattgcatcagttgcagatacaatagaagaaaaatttgtcccatattatgatatattcatgccctcactaaagcacattgttgagcttgctgttcagaaggaactcaagcttctgagaggaaaaactatcgagtgcattagccatattggtcttgctgttgggaaggaaaaatttatgcaagatgcatcaaatgtgatgcagctgttgttgaagacacaatcagacttaaataatatggaagatgatgaccctcagacctcttacatggtttcagcatgggctagaatgtgtaaaattcttggaaaagattttcaacagtaccttccactggttatcgagcctcttattaagactgcttcagctaaacctgatgttgctctcttagacacacaggatgtggaaaatatgagtgacgatgatggctggcaatttgtaaatcttggagaccagcagagttttggaattaaaacttcaggacttgaagcaaaagcaactgcttgccaaatgttggtttactatgctaaggagttaagggaagggtttgtggaatatacagaacaagttgtgaagctgatggttcctttactgaaattttatttccatgacaatgttcgagtggcagcagcagagtccatgccttttctcctggaatgtgcaagaattcgtggcccagagtatcttgcacagatgtggcaattcatatgtgaccccttaatcaaggctattggtactgaaccagatacagatgtgctctcagaaataatgaattcttttgcaaagtccattgaagttatgggagatggttgccttaatgatgaacacttggaagaactgggaggaatactgaaagcaaaacttgaagggcactttaaaaaccaagaattgagacaggtgaaaagacaggaagaaaactatgatcaacaggttgagatgtctctgcaagatgaggatgaatgtgatgtttatattctgaccaaagtatcagatattttgcactcattatttagtacttataaggaaaagattttaccatggtttgaacaactacttccattaattgtaaatctaatttgttcaagtaggccatggccagacagacagtggggattgtgcatatttgatgacatcatagagcactgcagtccaacttcatttaaatatgtagaatattttcggtggccaatgctactaaatatgcgagataacaaccctgaagtcaggcaagctgctgcttatggcctgggtgtcatggcacagtttggtggagatgattatcgttctttatgttcagaagctgttccacttctggtaaaagttattaagtgtgcaaattccaaaaccaaaaaaaatgtcattgctacagagaactgtatctcagcaatagggaagattttgaagtttaagcctaactgtgtaaatgtagatgaagttcttccacactggttatcatggcttccactgcatgaagataaagaggaagctattcagactttgagttttctctgtgacctaattgaaagtaaccacccagttgtaattggtccaaataattccaatcttcccaaaataatcagtataattgcagaaggaaaaattaatgagactattaactatgaggatccttgtgccaaacgcctagctaatgtcgtgcgtcaggtacagacttctgaagatttatggttggaatgtgtatcacaacttgatgatgaacagcaggaagccttacaggagttgctaaattttgcttgaagcactttaatataacttgaatattatctattataaaagtaactacaaataagtgttgtgaatagattttattataaatcagagaactgttttctccctgctaagcagtttatagttcttctccatgtttctccagaattaatcagtgttagtcctctgtttatctcgcatgttttatcttccaaacacagaccttggtgataacctgtgcttcaaactgtcttaaacaatgtttgtcacctttcccctagttgatgtaaagtatataaattgttgctatttgtttgaactattattgatgctagccaagcagtatacttgatgtgaagatgtcatgctatcacaatatgctaagagctcacaaaaataagatagaatttccaggacaaacatctttggaattgtgagtgaaggatatagtggcaggcttgtccctctttaattaatactcttggtatttgtggtgatgggaggatgctgttactaggagagttttgagatactgcagtggatgtgggatgtatatgaacttcttcataatgtactcctgggaactgggtaggacatatccatattgtagttcccaaggtgtctggttgagagttagagaacttttaaatttctttagccagacaggtctctatttttttaagttatccaggactccaagaaccatagttactgaaaagggagtcctgatacatctaatattggtagcatgtaacagtgtttgacaaagagtaagtaagcagtattcttgggagtcagtgttatgtgtttcagcagagtattattttgtatatgtatgccattttctccctgcaaagcagctcaacaagagaaaaagctctagttatagggcttaaattgatttctatttcaaataatttcctaagagattctagagtagaactgaagagtattctattggaaaagtgaaaggaaagaaatgtaattttctttgaacatgaaaaagaaaacaactttgagagtagtcatttagcagtagatgtgcattattatgagaaaacagttctataagtccagggttaattatattaattggaatgtcagtctttaatgtcgagcttattgtagggtagaaaagagctttctactcagctaacgattactcattgatccaaaacttaaatacatctataatttcctggggctattgtgagtactgtgtatgtatttagcaaatatttaagacctagtaagtgctcaataaattgtagctgtta

SEQ ID NO: 174357 - DNA, 3318 bp, Artificial Sequence
  derived and/or modified sequence
atggccgccaccgccagcgccggcgtgcccgccaccgtgagcgagaagcaggagttctaccagctgctgaagaacctgatcaaccccagctgcatggtgagaagacaggccgaggagatctacgagaacatccccggcctgtgcaagaccaccttcctgctggacgccgtgagaaacagaagagccggctacgaggtgagacagatggccgccgccctgctgagaagactgctgagcagcggcttcgaggaggtgtaccccaacctgcccgccgacgtgcagagagacgtgaagatcgagctgatcctggccgtgaagctggagacccacgccagcatgagaaagaagctgtgcgacatcttcgccgtgctggccagaaacctgatcgacgaggacggcaccaaccactggcccgagggcctgaagttcctgatcgacagcatctacagcaagaacgtggtgctgtgggaggtggccctgcacgtgttctggcacttccccggcatcttcggcacccaggagagacacgacctggacatcatcaagagactgctggaccagtgcatccaggaccaggagcaccccgccatcagaaccctgagcgccagagccgccgccgccttcgtgctggccaacgagaacaacatcgccctgttcaaggacttcgccgacctgctgcccggcatcctgcaggccgtgaacgacagctgctaccaggacgacgacagcgtgctggagagcctggtggagatcgccgacaccgtgcccaagtacctgggcccctacctggaggacaccctgcagctgagcctgaagctgtgcggcgacagcagactgagcaacctgcagagacagctggccctggaggtgatcgtgaccctgagcgagaccgccacccccatgctgaagaagcacaccaacatcatcgcccaggccgtgccccacatcctggccatgatggtggacctgcaggacgacgaggactgggtgaacgccgacgagatggaggaggacgacttcgacagcaacgccgtggccgccgagagcgccctggacagactggcctgcggcctgggcggcaaggtggtgctgcccatgaccaaggagcacatcatgcagatgctgcagagccccgactggaagtacagacacgccggcctgatggccctgagcgccatcggcgagggctgccaccagcagatggagagcatcctggacgagaccgtgaacagcgtgctgctgttcctgcaggacccccaccccagagtgagagccgccgcctgcaccaccctgggccagatggccaccgacttcgcccccaacttccagaagaagttccacgagaccgtgatcgccgccctgctgagaaccatggagaaccagggcaaccagagagtgcagagccacgccgccagcgccctgatcatcttcatcgaggactgccccaagagcctgctggtgctgtacgtggacagcatggtgaagaacctgcacagcgtgctggtgatcaagctgcaggagctgatcagaaacggcaccaagctggccctggagcagctggtgaccaccatcgccagcgtggccgacaccatcgaggagaagttcgtgccctactacgacatcttcatgcccagcctgaagcacatcgtggagctggccgtgcagaaggagctgaagctgctgagaggcaagaccatcgagtgcatcagccacatcggcctggccgtgggcaaggagaagttcatgcaggacgccagcaacgtgatgcagctgctgctgaagacccagagcgacctgaacaacatggaggacgacgacccccagaccagctacatggtgagcgcctgggccagaatgtgcaagatcctgggcaaggacttccagcagtacctgcccctggtgatcgagcccctgatcaagaccgccagcgccaagcccgacgtggccctgctggacacccaggacgtggagaacatgagcgacgacgacggctggcagttcgtgaacctgggcgaccagcagagcttcggcatcaagaccagcggcctggaggccaaggccaccgcctgccagatgctggtgtactacgccaaggagctgagagagggcttcgtggagtacaccgagcaggtggtgaagctgatggtgcccctgctgaagttctacttccacgacaacgtgagagtggccgccgccgagagcatgcccttcctgctggagtgcgccagaatcagaggccccgagtacctggcccagatgtggcagttcatctgcgaccccctgatcaaggccatcggcaccgagcccgacaccgacgtgctgagcgagatcatgaacagcttcgccaagagcatcgaggtgatgggcgacggctgcctgaacgacgagcacctggaggagctgggcggcatcctgaaggccaagctggagggccacttcaagaaccaggagctgagacaggtgaagagacaggaggagaactacgaccagcaggtggagatgagcctgcaggacgaggacgagtgcgacgtgtacatcctgaccaaggtgagcgacatcctgcacagcctgttcagcacctacaaggagaagatcctgccctggttcgagcagctgctgcccctgatcgtgaacctgatctgcagcagcagaccctggcccgacagacagtggggcctgtgcatcttcgacgacatcatcgagcactgcagccccaccagcttcaagtacgtggagtacttcagatggcccatgctgctgaacatgagagacaacaaccccgaggtgagacaggccgccgcctacggcctgggcgtgatggcccagttcggcggcgacgactacagaagcctgtgcagcgaggccgtgcccctgctggtgaaggtgatcaagtgcgccaacagcaagaccaagaagaacgtgatcgccaccgagaactgcatcagcgccatcggcaagatcctgaagttcaagcccaactgcgtgaacgtggacgaggtgctgccccactggctgagctggctgcccctgcacgaggacaaggaggaggccatccagaccctgagcttcctgtgcgacctgatcgagagcaaccaccccgtggtgatcggccccaacaacagcaacctgcccaagatcatcagcatcatcgccgagggcaagatcaacgagaccatcaactacgaggacccctgcgccaagagactggccaacgtggtgagacaggtgcagaccagcgaggacctgtggctggagtgcgtgagccagctggacgacgagcagcaggaggccctgcaggagctgctgaacttcgcctag

SEQ ID NO: 174358 - protein, 482 aa, Artificial Sequence
  derived and/or modified sequence
MSEIRKDTLKAILLELECHFTWNLLKEDIDLFEVEDTIGQQLEFLTTKSRLALYNLLAYVKHLKGQNKDALECLEQAEEIIQQEHSDKEEVRSLVTWGNYAWVYYHMDQLEEAQKYTGKIGNVCKKLSSPSNYKLECPETDCEKGWALLKFGGKYYQKAKAAFEKALEVEPDNPEFNIGYAITVYRLDDSDREGSVKSFSLGPLRKAVTLNPDNSYIKVFLALKLQDVHAEAEGEKYIEEILDQISSQPYVLRYAAKFYRRKNSWNKALELLKKALEVTPTSSFLHHQMGLCYRAQMIQIKKATHNRPKGKDKLKVDELISSAIFHFKAAMERDSMFAFAYTDLANMYAEGGQYSNAEDIFRKALRLENITDDHKHQIHYHYGRFQEFHRKSENTAIHHYLEALKVKDRSPLRTKLTSALKKLSTKRLCHNALDVQSLSALGFVYKLEGEKRQAAEYYEKAQKIDPENAEFLTALCELRLSI

SEQ ID NO: 174359 - protein, 434 aa, Artificial Sequence
  derived and/or modified sequence
MSEIRKDTLKAILLELECHFTWNLLKEDIDLFEVEDTIGQQLEFLTTKSRLALYNLLAYVKHLKGQNKDALECLEQAEEIIQQEHSDKEEVRSLVTWGNYAWVYYHMDQLEEAQKYTGKIGNVCKKLSSPSNYKLECPETDCEKGWALLKFGGKYYQKAVTLNPDNSYIKVFLALKLQDVHAEAEGEKYIEEILDQISSQPYVLRYAAKFYRRKNSWNKALELLKKALEVTPTSSFLHHQMGLCYRAQMIQIKKATHNRPKGKDKLKVDELISSAIFHFKAAMERDSMFAFAYTDLANMYAEGGQYSNAEDIFRKALRLENITDDHKHQIHYHYGRFQEFHRKSENTAIHHYLEALKVKDRSPLRTKLTSALKKLSTKRLCHNALDVQSLSALGFVYKLEGEKRQAAEYYEKAQKIDPENAEFLTALCELRLSI

SEQ ID NO: 174360 - DNA, 1449 bp, Artificial Sequence
  derived and/or modified sequence
atgagcgagatcagaaaggacaccctgaaggccatcctgctggagctggagtgccacttcacctggaacctgctgaaggaggacatcgacctgttcgaggtggaggacaccatcggccagcagctggagttcctgaccaccaagagcagactggccctgtacaacctgctggcctacgtgaagcacctgaagggccagaacaaggacgccctggagtgcctggagcaggccgaggagatcatccagcaggagcacagcgacaaggaggaggtgagaagcctggtgacctggggcaactacgcctgggtgtactaccacatggaccagctggaggaggcccagaagtacaccggcaagatcggcaacgtgtgcaagaagctgagcagccccagcaactacaagctggagtgccccgagaccgactgcgagaagggctgggccctgctgaagttcggcggcaagtactaccagaaggccaaggccgccttcgagaaggccctggaggtggagcccgacaaccccgagttcaacatcggctacgccatcaccgtgtacagactggacgacagcgacagagagggcagcgtgaagagcttcagcctgggccccctgagaaaggccgtgaccctgaaccccgacaacagctacatcaaggtgttcctggccctgaagctgcaggacgtgcacgccgaggccgagggcgagaagtacatcgaggagatcctggaccagatcagcagccagccctacgtgctgagatacgccgccaagttctacagaagaaagaacagctggaacaaggccctggagctgctgaagaaggccctggaggtgacccccaccagcagcttcctgcaccaccagatgggcctgtgctacagagcccagatgatccagatcaagaaggccacccacaacagacccaagggcaaggacaagctgaaggtggacgagctgatcagcagcgccatcttccacttcaaggccgccatggagagagacagcatgttcgccttcgcctacaccgacctggccaacatgtacgccgagggcggccagtacagcaacgccgaggacatcttcagaaaggccctgagactggagaacatcaccgacgaccacaagcaccagatccactaccactacggcagattccaggagttccacagaaagagcgagaacaccgccatccaccactacctggaggccctgaaggtgaaggacagaagccccctgagaaccaagctgaccagcgccctgaagaagctgagcaccaagagactgtgccacaacgccctggacgtgcagagcctgagcgccctgggcttcgtgtacaagctggagggcgagaagagacaggccgccgagtactacgagaaggcccagaagatcgaccccgagaacgccgagttcctgaccgccctgtgcgagctgagactgagcatctag

SEQ ID NO: 174361 - DNA, 1305 bp, Artificial Sequence
  derived and/or modified sequence
atgagcgagatcagaaaggacaccctgaaggccatcctgctggagctggagtgccacttcacctggaacctgctgaaggaggacatcgacctgttcgaggtggaggacaccatcggccagcagctggagttcctgaccaccaagagcagactggccctgtacaacctgctggcctacgtgaagcacctgaagggccagaacaaggacgccctggagtgcctggagcaggccgaggagatcatccagcaggagcacagcgacaaggaggaggtgagaagcctggtgacctggggcaactacgcctgggtgtactaccacatggaccagctggaggaggcccagaagtacaccggcaagatcggcaacgtgtgcaagaagctgagcagccccagcaactacaagctggagtgccccgagaccgactgcgagaagggctgggccctgctgaagttcggcggcaagtactaccagaaggccgtgaccctgaaccccgacaacagctacatcaaggtgttcctggccctgaagctgcaggacgtgcacgccgaggccgagggcgagaagtacatcgaggagatcctggaccagatcagcagccagccctacgtgctgagatacgccgccaagttctacagaagaaagaacagctggaacaaggccctggagctgctgaagaaggccctggaggtgacccccaccagcagcttcctgcaccaccagatgggcctgtgctacagagcccagatgatccagatcaagaaggccacccacaacagacccaagggcaaggacaagctgaaggtggacgagctgatcagcagcgccatcttccacttcaaggccgccatggagagagacagcatgttcgccttcgcctacaccgacctggccaacatgtacgccgagggcggccagtacagcaacgccgaggacatcttcagaaaggccctgagactggagaacatcaccgacgaccacaagcaccagatccactaccactacggcagattccaggagttccacagaaagagcgagaacaccgccatccaccactacctggaggccctgaaggtgaaggacagaagccccctgagaaccaagctgaccagcgccctgaagaagctgagcaccaagagactgtgccacaacgccctggacgtgcagagcctgagcgccctgggcttcgtgtacaagctggagggcgagaagagacaggccgccgagtactacgagaaggcccagaagatcgaccccgagaacgccgagttcctgaccgccctgtgcgagctgagactgagcatctag

SEQ ID NO: 174362 - DNA, 1449 bp, Artificial Sequence
  derived and/or modified sequence
atgagcgaaatcagaaaagacaccctgaaggctatcctcttggaacttgagtgccacttcacatggaaccttctgaaagaggacatcgatctatttgaagtggaagacaccatcgggcagcaattggaatttctcactacaaaatcaaggttggctctgtataatttgctggcctacgtaaaacacctaaaggggcagaataaagatgctcttgagtgtctggagcaagctgaggagatcatccagcaagagcattctgacaaagaggaagtgagatcactggtgacatggggcaattatgcatgggtctattatcacatggaccaactggaggaagctcagaaatataccggcaagatcggaaacgtgtgtaaaaaactatccagcccatccaactacaaactcgaatgccctgagaccgactgtgagaaaggctgggctctgctgaagttcgggggaaagtactatcagaaagctaaagctgcttttgagaaggcccttgaggtggaacccgataatcccgagtttaatatcggctatgcaatcaccgtgtaccgtctagacgatagcgatcgagagggatcggtgaagagtttcagccttggccccctgcgcaaagccgtcacattgaatcctgacaatagctacattaaggtcttcctggctctgaagctccaggatgtccacgctgaagctgaaggtgagaaatatatagaggaaattctggatcaaatctcgagccagccttacgtcttacgatacgccgccaagttttaccgccggaaaaattcatggaacaaggccctcgagttgcttaagaaagcactggaggtcaccccgactagcagtttccttcatcaccagatggggctatgctatcgcgctcagatgatccaaatcaagaaagccacacacaacagaccaaagggaaaagacaaattgaaggtggacgaacttatatccagtgccatcttccatttcaaggctgccatggagagggacagtatgttcgcgtttgcatacactgatctggcgaatatgtacgctgaaggcggccaatactcaaacgctgaggacatattcagaaaggccctgcgactggagaatattactgacgaccacaaacatcagatacactatcattacgggcgcttccaagagtttcacagaaaatctgaaaacaccgccatccatcactacctcgaggccttaaaggtgaaggaccgatctccactacgtacaaaactgacttccgccctgaagaaactgtctactaagcgattgtgtcacaatgccttggacgtgcagagccttagcgccctcggtttcgtgtacaagctggagggggaaaagcgacaggctgcagaatattacgagaaagcccagaagattgatcccgagaatgcggagttcctgacagctttatgcgagttgcgacttagcatttag

SEQ ID NO: 174363 - DNA, 1305 bp, Artificial Sequence
  derived and/or modified sequence
atgagcgagatccgaaaagacacgctaaaagcgatcctcttggagctggaatgccactttacttggaatcttttaaaggaagatatagacctgttcgaggtcgaagatacaattggtcaacagttggagtttctgaccactaagagtagattagcactgtacaacctgctcgcttatgtcaaacacttgaaaggacagaataaggacgctctagagtgcttagaacaggccgaggagattatccaacaggagcactcagataaagaggaagttcggtccttagttacctggggaaactatgcttgggtgtattaccacatggatcagcttgaggaagctcagaagtacacaggaaagataggcaatgtgtgcaaaaaactgagttccccatcaaactacaaactggagtgccctgagaccgactgtgaaaaaggatgggctctgcttaaattcggcggcaaatactatcagaaggccgtgaccctgaaccccgataactcctatattaaggtgtttctggccctgaagctccaggatgtacacgccgaagccgagggcgagaagtatattgaagagatcctcgaccagatctcaagccagccctacgtgctgcggtacgcggcaaagttctatcgaaggaagaacagttggaacaaagccctcgaactgctgaaaaaggcactggaagtcacacccacatctagttttctgcatcatcaaatgggactctgttatagggcccagatgattcagattaagaaggcaacacataataggcccaaaggaaaggacaaattgaaagtggacgaactgatttcttcagccatatttcactttaaggccgcaatggaaagagactcaatgttcgccttcgcatacaccgacctggcaaacatgtatgcggagggcgggcagtactccaacgcagaggacatcttccggaaggcactcagactggagaatattaccgacgaccacaaacatcagatccactaccattatggacgcttccaggagtttcatcgaaagagcgagaatactgcaattcaccattatctcgaagcactgaaggttaaggacagatcaccattgcgcactaagctcaccagtgccctaaagaagctgtctacgaaacgactgtgccacaacgcattggatgtgcagtcgctgtctgcattaggctttgtttataaactcgagggcgagaagcgacaggcagccgagtattacgaaaaagcacaaaagatcgacccggagaacgctgaattccttaccgccctttgtgagctgcggctgtccatatag

SEQ ID NO: 174364 - DNA, 1449 bp, Artificial Sequence
  derived and/or modified sequence
atgtctgagatcaggaaggacaccctgaaggccatcctgctggagctggagtgccacttcacctggaacctgctgaaggaggacatcgacctgtttgaggtggaggacaccatcggccagcagctggagttcctgaccaccaagagccggctggccctgtacaacctgctggcctacgtgaagcacctgaagggccagaacaaggatgccctggagtgcctggagcaggccgaggagatcatccagcaggagcacagcgacaaggaggaggtgcgcagcctggtgacctggggcaactatgcctgggtgtactaccacatggaccagctggaggaggcccagaagtacacaggcaagattggaaatgtgtgcaagaagctgagcagccccagcaactacaagctggagtgcccagagacagactgtgagaagggctgggccctgctgaagtttggaggcaagtactaccagaaggccaaggccgcctttgagaaggccctggaggtggagccagacaaccctgagttcaacatcggctacgccatcaccgtgtaccgcctggatgacagcgaccgggagggctctgtgaagagcttcagcctgggccccctgaggaaggctgtgaccctgaacccagacaacagctacatcaaggtgttcctggccctgaagctgcaggatgtgcacgccgaggccgagggggagaagtacatcgaggagatcctggaccagatcagcagccagccctacgtgctgcgctatgctgccaagttctacagaaggaagaacagctggaacaaggccctggagctgctgaagaaggccctggaggtgacccccaccagcagcttcctgcaccaccagatgggcctgtgctaccgggcccagatgatccagatcaagaaggccacccacaaccggcccaagggcaaggacaagctgaaggtggatgagctgatcagcagcgccatcttccacttcaaggccgccatggagcgggacagcatgtttgcctttgcctacacagacctggccaacatgtatgcagagggcggccagtacagcaatgctgaggacatcttcaggaaggccctgcggctggagaacatcacagatgaccacaagcaccagatccactaccactacggccgcttccaggagttccacaggaagtcagaaaatacagccatccaccactacctggaggccctgaaggtgaaggacaggagccccctgcggaccaagctgaccagcgccctgaagaagctgagcaccaagaggctgtgccacaatgccctggatgtgcagagcctgagcgccctgggctttgtgtacaagctggagggggagaagaggcaggccgctgagtactatgagaaggcccagaagattgatcctgaaaatgctgagttcctgacagccctgtgtgagctgcggctgagcatctag

SEQ ID NO: 174365 - DNA, 1305 bp, Artificial Sequence
  derived and/or modified sequence
atgtctgagatcaggaaggacaccctgaaggccatcctgctggagctggagtgccacttcacctggaacctgctgaaggaggacatcgacctgtttgaggtggaggacaccatcggccagcagctggagttcctgaccaccaagagccggctggccctgtacaacctgctggcctacgtgaagcacctgaagggccagaacaaggatgccctggagtgcctggagcaggccgaggagatcatccagcaggagcacagcgacaaggaggaggtgcgcagcctggtgacctggggcaactatgcctgggtgtactaccacatggaccagctggaggaggcccagaagtacacaggcaagattggaaatgtgtgcaagaagctgagcagccccagcaactacaagctggagtgcccagagacagactgtgagaagggctgggccctgctgaagtttggaggcaagtactaccagaaggctgtgaccctgaacccagacaacagctacatcaaggtgttcctggccctgaagctgcaggatgtgcacgccgaggccgagggggagaagtacatcgaggagatcctggaccagatcagcagccagccctacgtgctgcgctatgctgccaagttctacagaaggaagaacagctggaacaaggccctggagctgctgaagaaggccctggaggtgacccccaccagcagcttcctgcaccaccagatgggcctgtgctaccgggcccagatgatccagatcaagaaggccacccacaaccggcccaagggcaaggacaagctgaaggtggatgagctgatcagcagcgccatcttccacttcaaggccgccatggagcgggacagcatgtttgcctttgcctacacagacctggccaacatgtatgcagagggcggccagtacagcaatgctgaggacatcttcaggaaggccctgcggctggagaacatcacagatgaccacaagcaccagatccactaccactacggccgcttccaggagttccacaggaagtcagaaaatacagccatccaccactacctggaggccctgaaggtgaaggacaggagccccctgcggaccaagctgaccagcgccctgaagaagctgagcaccaagaggctgtgccacaatgccctggatgtgcagagcctgagcgccctgggctttgtgtacaagctggagggggagaagaggcaggccgctgagtactatgagaaggcccagaagattgatcctgaaaatgctgagttcctgacagccctgtgtgagctgcggctgagcatctag

SEQ ID NO: 174366 - DNA, 4015 bp, Artificial Sequence
  derived and/or modified sequence
atctgattcaatctccagtttcctgttcttgctggggctggggtctctcctttaacaaagacacgccgcgcggccgagtccaggggctgcagaggcctggcgcgcgcacgcgcacgcgcacgcccaccgcgcggcttcccgcggtccccggtgctgaggagagagcgatccgagggactgcgccgcccggacggcctgcagagcgctgccatcatgagtgaaattcgtaaggacaccttgaaggccattctgttggagttagaatgtcattttacatggaatttacttaaggaagacattgatctgtttgaggtagaagatacaattgggcaacagcttgaatttcttaccacaaaatctagacttgctctttataacctattggcctatgtgaaacacctaaaaggccaaaataaagacgcccttgagtgcttggaacaagcagaagaaataatccagcaagaacactcagacaaagaagaagtacgaagcctggtcacttggggaaactatgcctgggtgtattatcacatggaccagcttgaagaagctcagaagtatacaggtaagatagggaatgtctgtaagaaattgtccagtccttctaactacaagttggagtgtcctgagactgactgtgagaaaggctgggcactcttgaaatttggaggaaagtattatcaaaaggctaaagcggcttttgagaaggctctggaagtggagcctgacaatccagaatttaacatcggctatgctatcacagtgtatcggctggatgattctgatagagaagggtctgtaaagagcttttctctggggcctttgagaaaggctgttaccctgaacccagataacagctatattaaggtttttctggcactgaagcttcaagatgtacatgcagaagctgaaggggaaaagtatattgaagaaatcctggaccaaatatcatcccagccttacgtccttcgttatgcagccaagttctataggagaaaaaattcctggaacaaagctctcgaacttttaaaaaaggccttggaggtgacaccaacttcttctttcctgcatcaccagatgggactttgctacagggcacaaatgatccaaatcaagaaggccacacacaacagacctaaaggaaaggataaactaaaggttgatgagctgatttcatctgctatatttcatttcaaagcagccatggaacgagactctatgtttgcatttgcctacacagacctggccaacatgtacgctgaaggaggccagtatagcaatgctgaggacattttccggaaagctcttcgtctggagaacataaccgatgatcacaaacatcagatccattaccactatggccgctttcaggaatttcaccgtaaatcagaaaatactgccatccatcattatttagaagccttaaaggtcaaagacagatcaccccttcgcaccaaactgacaagtgctctgaagaaattgtctaccaagagactttgtcacaatgctttagatgtgcagagtttaagtgccctagggtttgtttacaagctggaaggagaaaagaggcaagctgctgagtactatgagaaggcacaaaagatagatccagaaaatgcagaattcctgactgctctctgtgagctccgactttccatttaaatacatactctaggaaattagctctaagtttttcccttcattttgggttctcctgtttgttttttttttattattttaatcccttgtttattatagagctaatatttattgaatagttattgtgtaccaagcattgtgctaaatactttatatgcattatgatgaatcttgtgcggttttctttctttttttctttttaattaaaatactataatccattgagaaatagcaatattctagctattgtaacttctaaaaatggtatggccattagatctgtgctttttatctctgctctttgaatttctcatattatatagtaaatatattcctacgtaaacctttgatacctagatcaggaatactcttccaggagtacaaaattacattattgatagttaagctcttaattgtgtagcttgcaaaagacagcactttttagttacagatgttttgactttgatgaggatatttagctatcaatctaatagtcacctaaaatatcttttttgttggaaaaaagtttataataaaaaagtttgtcatctctagtgacttcaataaagaaaaaactagaagaggagaaaaaggatttcctcaaattttaaatatgtaacttcagggattcaatccccaaatgtttattaagtagctagaaataattatgtggaaaaaaatgaataatggaaaatagtgagtctcaaattgttctctttttttttttaactaaaacaaatctgcaatgaatctagatgcaattaattttattccttccaactaaaattacaatatttttaggttaaaattattgagatataaagcagccattgggaaattgggagaaatgataaacaaatggaaaaagaagatgtccctaacctacacccatagattaccaaggtttcagtgtactagttttgaatctgttctgaatggagtttttataccctcaatttctggcctttggctattttagcatttcaaagtgacttctatgaagctttttttttaatgtgaaattttcagaatgttgtttttttcatgtagatactccaggaagagttaagcactgctttcagttttaatatccaccttgaggggtcgctgcttgagggctcttatcccaggggactttttaattcggatgttacttaatgtggcttctctaatgtagtttctttgattaccgactacacaattatgtaccatcacagtattagtggaaaagtaccatgtgatttaattctccattcctccaatgtaactcttaaaattattatgtatgtgtgtgtgttttactttttgttttttatcatctttaaaatttctattatggtttgattattataaaaataatgaattctcactgtaaatttcaaaaaaaaattacaaaagtatgtgaatttaaaaatgagagcagtcctctcaccctaccacagttccacaccctcaaggtaaacttataacttataatttgatatgtaaacttccagatcttttttctatgcgtaatcagacatacatatatactgcagtgtatctcacgtattaatttttaaaaatcttttgttttacttaattctgtttttattattattattattttgtttgatctattaaggaagaacaaggaagggaatgatctttactcaagaatttcagaaagtcagcactgaagtcctgacctatcagtagacacatttgtccctttcagatattttaggatattctagcaaagcaggccatttctcccacctgaaagtacataacttctatcacttgccacataattaaaagaactcacattaagcggttactcagacagttaatcatagaaaagattatttgcttcatcagttcatagaaaagattatttgcttcatcagttaacttgtttttataaatcagggctgtgttcatacacagaaggggcctgagatttctgcactttaaacaagctcctcctaggtgaggatgctgtggctgttctaattacattttgagtagtaaggtctacagcattgttcctcaaacttggctacgtattggaatcacctaaaaagttaaaacaaaacatggatgtctgggtcccgccccatagagaatgacttaattggcatggggtgcagtccaggcatcatgatttttagatttcccagttggaacttgtgcagcaaagtttgggagctactgatggacatgtgaaaagtaagtataaatggaataaaattaattaggctaataggcttaacccaggaaatcctaagttccttgaatatccagtttgcatttggactcctcatcatatacttggtatataatactctaataaaagctgcctgagttgaattgt

SEQ ID NO: 174367 - DNA, 1513 bp, Artificial Sequence
  derived and/or modified sequence
actgcgccgcccggacggcctgcagagcgctgccatcatgagtgaaattcgtaaggacaccttgaaggccattctgttggagttagaatgtcattttacatggaatttacttaaggaagacattgatctgtttgaggtagaagatacaattgggcaacagcttgaatttcttaccacaaaatctagacttgctctttataacctattggcctatgtgaaacacctaaaaggccaaaataaagacgcccttgagtgcttggaacaagcagaagaaataatccagcaagaacactcagacaaagaagaagtacgaagcctggtcacttggggaaactatgcctgggtgtattatcacatggaccagcttgaagaagctcagaagtatacaggtaagatagggaatgtctgtaagaaattgtccagtccttctaactacaagttggagtgtcctgagactgactgtgagaaaggctgggcactcttgaaatttggaggaaagtattatcaaaaggctgttaccctgaacccagataacagctatattaaggtttttctggcactgaagcttcaagatgtacatgcagaagctgaaggggaaaagtatattgaagaaatcctggaccaaatatcatcccagccttacgtccttcgttatgcagccaagttctataggagaaaaaattcctggaacaaagctctcgaacttttaaaaaaggccttggaggtgacaccaacttcttctttcctgcatcaccagatgggactttgctacagggcacaaatgatccaaatcaagaaggccacacacaacagacctaaaggaaaggataaactaaaggttgatgagctgatttcatctgctatatttcatttcaaagcagccatggaacgagactctatgtttgcatttgcctacacagacctggccaacatgtacgctgaaggaggccagtatagcaatgctgaggacattttccggaaagctcttcgtctggagaacataaccgatgatcacaaacatcagatccattaccactatggccgctttcaggaatttcaccgtaaatcagaaaatactgccatccatcattatttagaagccttaaaggtcaaagacagatcaccccttcgcaccaaactgacaagtgctctgaagaaattgtctaccaagagactttgtcacaatgctttagatgtgcagagtttaagtgccctagggtttgtttacaagctggaaggagaaaagaggcaagctgctgagtactatgagaaggcacaaaagatagatccagaaaatgcagaattcctgactgctctctgtgagctccgactttccatttaaatacatactctaggaaattagctctaagtttttcccttcattttgggttctcctgtttgttttttttttattattttaatcccttgtttattatagagctaatatttattgaatagttattgtgtaccaagcattgtgctaaatactttatatgcattatgatgaatcttg

SEQ ID NO: 174368 - DNA, 1449 bp, Artificial Sequence
  derived and/or modified sequence
atgagcgagatccggaaggacaccctgaaggccatcctgctggagttggaatgtcactttacgtggaacctgctgaaggaggatatcgaccttttcgaggtagaggacaccatcggacagcagttggagttcctgaccaccaaaagtaggcttgccctttataatcttctcgcctacgtgaagcacctgaaggggcaaaacaaggatgcactggagtgcctggagcaggccgaggagataattcagcaggagcattctgataaggaagaagtgcggtctcttgtcacttggggtaactatgcttgggtgtattatcatatggatcagctggaggaggcacagaaatatacggggaaaattggcaacgtgtgtaaaaaactgagttccccctcaaattacaagctggaatgccccgagaccgattgtgaaaagggctgggccctcctgaagttcggtggaaagtactatcagaaggccaaggcagctttcgagaaggcactcgaggtggagcctgataaccccgaattcaatatcgggtacgctatcaccgtgtaccggttagatgatagcgacagggaggggtcagttaagtccttcagcctggggcctctgagaaaggctgtcacactcaatccagacaattcatacattaaggtgttcttggctttgaagcttcaggatgtacacgcagaggccgaaggcgagaaatatatagaggaaatcctggaccagatttcaagtcaaccgtacgtgctgcgttatgcagccaagttttatagaagaaagaattcctggaacaaggccttagagctcttaaagaaggccttggaagtcacacccacgtcttccttcttgcatcatcagatgggcttatgctatagagcgcagatgatacagattaagaaggcaacgcacaatcgcccaaaagggaaagataagttgaaggttgatgaattgatttcaagtgcaatatttcatttcaaagccgcgatggaaagggacagcatgtttgcctttgcatacacagatctcgccaatatgtatgcggagggcggccagtattctaacgcggaggacatcttccgaaaggcactccgactcgaaaatatcaccgacgaccataagcatcagatccattatcattacgggagatttcaagaattccatcgcaagtctgagaataccgccatacaccattacttggaggcactgaaggtcaaggatcgctccccacttcgcacaaaactgacatctgcactaaaaaagctgagcacaaaaagattgtgtcataacgctcttgatgtgcaaagcctctccgctctgggctttgtttataagctcgaaggcgagaaacgtcaggctgccgaatattacgaaaaggcccagaagatagatcccgagaatgcagagttcctgacagccttgtgtgagctacgcttaagtatatag

SEQ ID NO: 174369 - DNA, 1305 bp, Artificial Sequence
  derived and/or modified sequence
atgagcgagatccggaaggacaccctgaaggccatcctgctggagctcgagtgtcactttacatggaacctcttaaaggaggatatcgacctgttcgaggtggaggacacaatcggccagcaacttgagtttctcacgaccaaatcacgtctggcattatacaatttgctggcgtacgtgaagcaccttaagggccagaataaggacgcgcttgagtgcctggagcaagctgaagagatcattcaacaggagcactccgacaaagaggaagtccgcagcttagtgacctggggcaactacgcctgggtttactatcatatggaccagttggaggaagcccagaagtataccggcaaaatcgggaacgtttgcaaaaaactatcctcaccaagtaattacaagctggagtgcccagaaacggattgcgagaaagggtgggcattattgaaatttggagggaaatactaccagaaagcggtcacactgaaccctgataacagttacattaaggtgtttctcgctcttaagctccaggacgttcatgctgaggcagaaggggaaaaatacattgaggagatcctggaccaaatttcctctcagccttacgtgctccggtacgctgcaaaattctacaggagaaagaactcatggaacaaggccctggagctgctgaagaaggcgctggaagtcaccccaactagttccttccttcaccatcaaatgggtctgtgttatcgggcgcagatgattcagattaaaaaggctacacacaataggccaaaaggtaaagataagctcaaggtcgatgaactcattagttctgcaattttccactttaaggctgctatggagcgggactccatgttcgcctttgcctacacagacttggctaacatgtatgcggaaggcggtcaatatagcaatgctgaagatatcttcaggaaagcattaaggctggagaacatcaccgatgatcacaagcaccagatccactaccattacggccgattccaggagtttcaccggaagtctgagaacacagccatccatcactatcttgaagctttaaaggtgaaggacaggtccccactccggaccaaactaacatcagcactgaagaagcttagtaccaagagactatgccataacgctcttgatgttcagagcctttcagcgctcggatttgtctataagcttgagggcgagaagagacaggcagcagagtattatgagaaggcccagaaaattgatcctgaaaatgctgagtttctgaccgcactgtgcgaactaaggctcagcatttag

SEQ ID NO: 174370 - DNA, 1449 bp, Artificial Sequence
  derived and/or modified sequence
atgtctgaaatccggaaggatacccttaaagcaattctgctcgaactggaatgccacttcacctggaacctcttaaaagaggatatagatctgtttgaggtggaagacacgatagggcagcagctggagtttctgacaactaagtcacgtctggcattatacaacctgctggcatacgtaaaacatctaaaaggccagaacaaggatgcactcgagtgtctcgagcaagcagaggagatcattcagcaagaacattcagataaggaagaagttaggtccctggtgacttggggcaattatgcatgggtctattatcacatggatcaattagaggaagctcagaaatatacgggcaagattggaaacgtgtgcaaaaagctctcatcaccttctaattacaagctggaatgccccgagactgactgtgagaaaggatgggctttgctgaagttcggcggaaagtattaccaaaaggctaaggctgcttttgagaaagcactagaagttgagccagataatcctgagttcaatatcggctatgccatcacagtctacaggcttgatgattccgatcgtgaggggagtgttaagagtttctccctaggccctttgcgaaaagccgtaaccctaaatccggataacagttatataaaagtgttccttgccctaaagctccaggacgttcacgcggaagctgaaggcgagaagtatattgaagagatcctggaccaaattagctcccagccatatgtcctgcgttacgctgccaagttttacagaagaaagaacagctggaataaggcactggaactcctgaagaaggcgctcgaagtaactcctacaagttccttcctgcatcaccaaatggggctttgttaccgcgctcaaatgatccagattaagaaggccactcacaaccggccaaaggggaaagataagctgaaggtggatgagctgattagttctgcaatctttcattttaaagcggcaatggaaagagattccatgtttgcctttgcatatactgacttggccaacatgtatgccgagggaggccagtattccaacgccgaggatatctttaggaaagctctgaggctggaaaatattacagatgaccacaagcatcagattcattaccactatggcaggtttcaagagttccacaggaaaagtgaaaacaccgccattcaccattatttagaagccctcaaggtgaaagataggagtcccctgcgaacaaagctgacatccgctctaaaaaagctatccacgaaacggctgtgccataatgccctcgacgttcaatcactgtcggcactcggtttcgtgtataagctggaaggtgaaaagcgacaggccgcagagtattatgagaaggcgcaaaagatcgatcctgagaatgctgagtttctcaccgccttgtgcgagctgcgtctgtcaatatag

SEQ ID NO: 174371 - DNA, 1305 bp, Artificial Sequence
  derived and/or modified sequence
atgagcgagatccgcaaggatacgttgaaggccattctgctcgagctcgaatgccacttcacttggaaccttttaaaggaggacattgacctgtttgaggtggaagataccatcgggcaacagctcgaatttctgacaaccaaatctcgacttgctctatacaatctgcttgcctatgtaaagcatctcaaagggcagaataaggatgccctggagtgtctcgagcaagctgaggagattatccagcaagaacactccgataaggaggaagtccggagcttggtgacctggggcaactacgcttgggtatattaccacatggaccagctggaagaagcccaaaaatacacaggcaaaatcgggaacgtatgcaagaagctgtccagcccttctaattataagttggagtgccctgagaccgattgcgaaaaaggctgggcccttctgaaattcgggggaaagtactatcagaaggcggtgactttaaatcctgacaacagttacatcaaggtgttcctagccttgaagctccaagatgtacatgccgaggccgagggcgagaaatacattgaagaaattctggatcaaatcagcagccaaccctacgtgctccgttatgcagcaaagttttaccgccgtaaaaactcatggaataaagcactggaacttcttaaaaaagccctggaagttactccgacgagctcattcctgcatcaccagatgggactctgctacagagcccaaatgattcagataaaaaaagccactcacaaccggccaaagggcaaggataaactgaaagtagacgagctgatttcaagcgcaatttttcatttcaaagcggcaatggaaagggacagcatgtttgcatttgcgtacactgatctggcgaacatgtatgccgagggaggtcaatattctaatgccgaggatatatttcggaaagccctgcgtctggagaacatcacagatgatcacaaacaccagatccactaccactatggacgctttcaggagtttcataggaagagcgaaaacaccgcaatccatcactacttggaagccctcaaggtgaaggaccgaagtccgttgcgcactaaactcacatctgccctcaaaaaactgagtacaaaacgcttgtgccacaacgccctggacgtgcagtctctgtccgccctgggcttcgtctacaagctcgaaggggaaaagcgtcaagccgcagagtactacgagaaggcgcagaagattgaccccgaaaacgcggagtttctgacggccctctgtgagcttcggctttctatatag

SEQ ID NO: 174372 - protein, 277 aa, Artificial Sequence
  derived and/or modified sequence
MSKSLKKLVEESREKNQPEVDMSDRGISNMLDVNGLFTLSHITQLVLSHNKLTMVPPNIAELKNLEVLNFFNNQIEELPTQISSLQKLKHLNLGMNRLNTLPRGFGSLPALEVLDLTYNNLSENSLPGNFFYLTTLRALYLSDNDFEILPPDIGKLTKLQILSLRDNDLISLPKEIGELTQLKELHIQGNRLTVLPPELGNLDLTGQKQVFKAENNPWVTPIADQFQLGVSHVFEYIRSETYKYLYGRHMQANPEPPKKNNDKSKKISRKPLAAKNR

SEQ ID NO: 174373 - protein, 224 aa, Artificial Sequence
  derived and/or modified sequence
MVPPNIAELKNLEVLNFFNNQIEELPTQISSLQKLKHLNLGMNRLNTLPRGFGSLPALEVLDLTYNNLSENSLPGNFFYLTTLRALYLSDNDFEILPPDIGKLTKLQILSLRDNDLISLPKEIGELTQLKELHIQGNRLTVLPPELGNLDLTGQKQVFKAENNPWVTPIADQFQLGVSHVFEYIRSETYKYLYGRHMQANPEPPKKNNDKSKKISRKPLAAKNR

SEQ ID NO: 174374 - DNA, 834 bp, Artificial Sequence
  derived and/or modified sequence
atgtccaaaagtcttaagaaactggtagaggagtctcgggaaaaaaatcagccagaagtcgacatgtctgacaggggcatctccaacatgctggacgtgaatggcttgtttacactatcacacatcactcaacttgtgctgtcgcacaataagttaaccatggtgccccccaatattgccgaactgaagaatttggaggtcctgaacttctttaacaaccagatcgaggaactccctactcagatatctagtctgcagaagttgaagcacctgaacctcggaatgaatcgcctgaacactctacctcgaggcttcggaagtttgcctgcattggaggtcctcgatctcacatacaataacctgtctgaaaatagtctgcctggtaattttttttatctgactaccctcagagcactgtacctgagcgacaatgatttcgaaatcctgcctcccgatatcgggaaactaacgaagctacagattctgagtcttagggacaatgatttgatctcccttccaaaagagatcggggaactgacccaactgaaagaactccatatccaggggaaccgtctcactgtactgccacccgaattggggaatctggacctgactggtcagaaacaggtgttcaaggctgagaacaacccatgggtgactcccatcgctgaccaattccagctcggcgtgagccacgtgtttgaatatattcgttcggagacttacaaatatttgtatggccgccacatgcaggcaaatccggagccaccaaagaagaacaatgacaagagtaaaaagatttctagaaagcctctggccgctaaaaaccgatag

SEQ ID NO: 174375 - DNA, 834 bp, Artificial Sequence
  derived and/or modified sequence
atgtccaagtctctgaagaaactggtcgaggaatctagagagaaaaaccagccggaggtcgacatgagcgaccggggcatttccaatatgcttgacgtcaacgggctgttcactctgtcgcatattacccagctggtgttgtcccacaacaagctcacgatggttccgcctaacattgcagagctgaagaacttggaggtgctaaatttttttaacaaccagatcgaagagctgccaacccaaatcagttctctgcaaaagctcaagcacttaaacctgggaatgaaccgcctaaacaccctgcccagaggctttgggtcactgcctgccctcgaagtcctggatctaacttataataacctatctgagaacagcttacccggaaacttcttctatctgaccactctgagagccctgtacctgtctgacaacgactttgagattctgccaccggacataggcaagcttaccaaactgcaaatcctaagtcttcgtgataacgaccttatctccctaccaaaggagatcggcgagctaactcagttgaaagagctccacatacagggcaaccgcctgactgttttaccccccgaattgggcaacctcgacctgacggggcagaagcaggtttttaaagctgaaaacaatccttgggtcactccaattgccgaccaatttcaactgggggtgtcccacgtgttcgagtacatccgcagcgaaacctacaaatatctgtatggccgacatatgcaggctaacccagagccgccaaagaaaaataatgataagagcaagaaaatctcgcgtaagccactggctgctaagaaccgctag

SEQ ID NO: 174376 - DNA, 834 bp, Artificial Sequence
  derived and/or modified sequence
atgagcaagagcctgaagaagctggtggaggagagccgggagaagaaccagcctgaggtggacatgtctgaccggggcatcagcaacatgctggatgtgaatggcctcttcaccctgagccacatcacccagctggtgctgagccacaacaagctgaccatggtgccccccaacattgctgagctgaagaacctggaggtgctgaacttcttcaacaaccagatcgaggagctgcccacccagatcagcagcctgcagaagctgaagcacctgaacctgggcatgaaccggctgaacaccctgccccggggcttcggcagcctgcctgccctggaggtgctggacctgacctacaacaacctgtctgagaacagcctgcccggcaacttcttctacctgaccaccctgcgggccctgtacctgagtgacaatgactttgagatcctgcccccagacatcggcaagctgaccaagctgcagatcctgagcctgcgggacaatgacctgatcagcctgcccaaggagatcggggagctgacccagctgaaggagctgcacatccagggcaaccggctgactgtgctgcccccagagctgggcaacctggacctgaccggccagaagcaggtgttcaaggccgagaacaacccctgggtgacccccatcgctgaccagttccagctgggcgtgagccacgtgtttgagtacatccgctctgagacctacaagtacctgtatggccgccacatgcaggccaaccctgagccccccaagaagaacaatgacaagagcaagaagatcagcaggaagcccctggccgccaagaacagatag

SEQ ID NO: 174377 - DNA, 834 bp, Artificial Sequence
  derived and/or modified sequence
atgagcaagagcctgaagaagctggtggaggagagccgggagaagaaccaaccagaggtggatatgtcggatcgcggcattagtaacatgttggacgtaaacggcctttttacattgtcacacatcacgcagctggtgctaagtcataacaaacttacaatggtacctcccaatatcgcagaactgaagaatttggaggtcctcaattttttcaataatcaaatcgaagagttgcctacacaaataagcagcttgcagaagctgaagcacttgaatctggggatgaataggcttaatacccttcctcgcgggtttggctcactgccagctctagaagtgttagatttgacctacaacaacctgtccgagaattcattgcccggtaacttcttttatcttacaactctgagagctctgtacctctctgataatgactttgaaatacttccacccgacatcggcaagctgacaaagctgcagatattgtccctccgggataatgacttgatatccctgcccaaggagatcggagagctcacacagttaaaagagttacatatccagggtaacaggctgacagttctaccgcctgagctcggcaacctggatctcaccgggcagaaacaagtctttaaggccgagaacaacccctgggtgacaccgatagcagatcagtttcagctgggcgtcagccatgttttcgagtacatccggtccgagacttacaagtatctgtatgggcgtcatatgcaggcgaatcccgagccccccaaaaaaaataacgacaagtccaagaaaatcagccggaaacccctcgcagccaagaaccgctag

SEQ ID NO: 174378 - DNA, 834 bp, Artificial Sequence
  derived and/or modified sequence
atgagcaagagcctgaagaagctggtggaggagagccgggagaagaaccagcccgaggtggatatgtctgaccggggaatttctaatatgttagatgtcaacgggttgttcactcttagtcacatcactcaactcgtgctgtcccacaataagttgaccatggtgccccccaacatcgctgagctgaagaatctcgaagtgctaaacttctttaacaaccagattgaggaactgcctacccagatctcttctttgcaaaaactcaaacacctgaacttggggatgaaccggctgaataccttgccacgtggctttgggtcactgccagcactcgaagtcttagatttgacatataacaacctttctgagaatagtctaccgggaaacttcttctacctgaccacactccgtgcgctgtacttatccgacaatgacttcgagattcttccgcctgacattggcaaactgactaagctccagatactgtcactgcgcgataatgatcttatctctttgcccaaagagatcggagagctgactcagttaaaagagttgcacattcagggaaatcgtctgacggtcctgccccccgaattagggaaccttgacctgacgggccagaagcaggtgttcaaagcagagaataacccttgggtaacaccaatcgccgatcaatttcaactcggtgtgagccacgtgtttgagtacattcgatccgaaacttacaaatacctctatggcaggcatatgcaggcgaaccccgaacctccaaagaagaataacgacaaaagcaaaaaaattagcaggaaaccactcgccgcgaagaatagatag

SEQ ID NO: 174379 - DNA, 834 bp, Artificial Sequence
  derived and/or modified sequence
atgtccaagagcttgaagaaactggttgaagagagcagagaaaagaaccagcctgaggtggatatgagcgataggggcatttctaacatgctagacgttaatggactgttcactctgtctcatataacacagctcgtgctgtctcacaataagctgaccatggtgccacccaatatcgcggaacttaagaatctcgaagtattgaacttcttcaacaatcaaattgaagagctgccaacccaaatttcaagcctccagaagctgaagcacctcaatctggggatgaacagactgaatactcttccccgtgggtttgggtcattgccagccctcgaggttctggatctcacttataataaccttagcgagaacagcctgcccggaaattttttttacctgactacactacgggctctctatctgagtgacaatgatttcgagattctgcccccagacattggaaaattgacaaagttgcagattctgagcctcagggacaatgatttaatatccctgcccaaagaaattggtgagctaacgcagctcaaggaactgcatatccaggggaatagattgacagtactcccccctgaattaggaaacctggaccttaccggtcagaagcaggtatttaaagccgagaacaacccctgggtgaccccgattgcggaccagtttcaactaggtgtttcccacgtgttcgaatacatccggtcagagacctataagtatctttacgggagacatatgcaagccaacccggaaccacccaaaaagaacaacgacaagtctaagaagatatcaaggaaaccactggcagctaagaaccgctag

SEQ ID NO: 174380 - DNA, 834 bp, Artificial Sequence
  derived and/or modified sequence
atgagtaaaagcctcaaaaagctcgttgaggaatcccgtgagaagaaccaaccagaggttgacatgtctgatagaggaatcagcaatatgctggatgtgaatgggctgttcacactcagccatatcacgcagctagtgctctctcataataaactgacaatggtcccgcctaacatcgcagagcttaagaatcttgaggtgctcaatttttttaacaaccagatagaggagctgcccacacaaatttcatcgcttcagaagctgaagcacctgaacctgggcatgaacaggctgaacaccctgcccaggggcttcggaagcctgcccgcacttgaagtactcgatctgacttataacaacctgagtgagaattctctgcctgggaacttcttttatctaaccacactgagagctctctatctctctgacaacgactttgaaatcttgccaccagacatcgggaaactcacaaaattgcaaatcttgtctctgcgggacaatgatctgatttccctccctaaggaaatcggcgagctgactcagcttaaagaactgcacatacaagggaatcggctgactgtcctccctcctgagctaggcaacctcgatctgactggtcagaagcaggtgttcaaggcagaaaataatccttgggttaccccaatcgcggatcagtttcaattaggcgtgtcacatgttttcgaatacatcagatccgaaacctataagtacctatacggtcgtcacatgcaagcaaatcccgaacccccaaagaagaataatgacaagtctaagaagatcagcaggaagcctctggccgctaaaaatcggtag

SEQ ID NO: 174381 - DNA, 3834 bp, Artificial Sequence
  derived and/or modified sequence
gcctggccctggagacacgtctggagagctgttctcctaatatgggtagggtcgggcgtggagctggcagcggcgctgtgtgcgcctgcgcggggcgccgagacagggcgtgttcgctgttcagtgccggtgttgcagggagtgagggcagctggagtgcgttctgccgaagcttgtggttgcacgcccatcgtcttaggggctaccttccgtgaccatgtccaagtctctgaagaagttggtggaggagagccgggagaagaaccagcccgaggtggacatgagtgaccggggcatctccaacatgctggatgtcaacggcctctttaccttatcccatatcacacaactggtcctcagccataacaagctaacaatggtgccaccgaacatcgcagaactgaagaatttggaggtgctcaacttttttaataaccaaatcgaggagctgcccacacagatcagtagccttcagaaactcaaacacctgaaccttggcatgaacaggctgaacactttgccacgaggcttcggctccctgccagctcttgaggttctggacttgacgtacaacaacttgagcgaaaattctcttcctggaaacttcttctacctgaccaccctgcgtgcactctatctaagtgacaacgattttgaaatcctgccgccagatattgggaagctcacaaagttgcagatactcagccttagggataacgacctgatctcgctgcctaaggaaatcggggagcttacccagcttaaagagctccacattcaggggaaccgcctcaccgttctgcccccagaactaggaaacttggatttaactggccagaagcaggtattcaaagcagagaacaatccctgggtgacccccattgcagaccagttccagcttggcgtgtcccatgtttttgagtatatccgttctgagacatacaaatacctctacggcagacacatgcaggccaacccagaaccaccgaagaagaataatgacaaatcgaaaaagatcagccggaaacccctggcagccaagaacagataaggaagggattggcatcggctggccttccagcaccttctctctccaacacttcattctctcttgccctgtctctcaaataaacccaatgctgcgtgtgaggccttttttatttttcttttcactctctttctaatgcttcccaccttaccttttagattcttttgctaggtgggagattgttataaggtctttaaaccatttccatttgtttctttaacattaccaaaagcagggaacaaagctcttattcaactgcgaattccatagtgggctctggcttttcttgaatagatatcacaaggttgcttattatcaaaagaataattaaaatcatgtaaccatttaaatgtcactgttaacacttttcactctttctgttgattcacctaactcattattttgctttattaaaagtcttccttcaccaccgagatatgctaatttaacttacaaatgattttaataaaatcttgagtttgtatcacatgttacttattgactcagaataaaagaacagtctgatcttggggtataacacattttcatttacttttctcccccaaaatcatcttatccaattttattggttatacatgataaacttttcatgaaagaaatgcaaaattaaatcacagttcgtttcttctcacattaatttgtcaagttttttttttctttgaagactttctaaattaggaagcagaaaaacaaatctctaggagattctgccaaaggattttggaaagtagcattccttcgccgaagaaatggtgatttctgccaggggctggtagacaagaactgtgaaagagagagagaaaaaacctcaactgtgtattttgtcacggcggaaaatctgctcgcatcgaagcattcttctaagcgacttcgatgccaaggaagttgtgtaaatgtgcacgcgctacaccacacccagggtggaaaccacagttgcagagtcattaaacaatcaattgtttgtttaacatctgtgataggcagctttccttcttttcaacagtgatacctacgaaaatcaaaataaatgcaagctgaggttttgtgctcactgaaagggctgtcaaccccagaaggccgacacaaaaaaaatggtatgtgaagatgcaccgtcttttcaaatggcctgggagagtcaaatggcctgggagagggggcctgcccttctctgctgtgtcctttcggcttcccagttgagctcccaagaccaggacccactggggcatataaaatctctgctgtatcctttcggcttcccagttgagctcccaagaccaggacccactggggcatataaaaaagtcaaaaatcaaaatcaaacaacaagttctgagttacttaggaaacagacttcgcatttcaatcagagaggccacagagcaaggtctaaacttctggcttctagacaaattcctgatagaacatttaaatgtgggaagtggcttccccaggtcccatcccctgtttagggatagagttgatatcatttttataggtgccatgtatgcctctgcctgaatttttttaattgacttttgagcttttgagattgcacgagggagaacaaggcctttgctgttgtggataggaaagacttaacctaaaattaaaccagcaagaaagcattagtaaaaatctaacaatatgaagggctcttatgagtcatttttttcaaaagatgaaaactccagaaacgcacaggaacgaaatacctcccagaaacatgaagcaatcatcgaagactcactggtaatatttttaaaaagtatacagatcaaagcaaaaagaagccatgtgtaacaaagagaaatgtgcaaatattttttaaggcagtattaagtgcaagaggagtaacatgaaataaacattctttcacatggctactgggaatataaatttcgctccagaaaggccgtagcagtttgacgataggtggcaaaaccttaagattgtgtactggggcccagaatttttatttctaggaatgtatcctgaggaaattatccgagatccccacaaactgcaatgtttaggaattgtccttatagcattgcatacacaagaaaaacagagaaaagcctgatccctgtcagtggaaaaggggttcaatgaattacggtgtgtctgcatgaggcttttatgacattaaaaattgttgaacaacggccaggcacagtggctcatgcctgtaatcctaacactttgggaggccaaggtgggaagattgcctgagctcaggagtttgagaccagcctgggcaacacggtgaaaccccgtctctactaaaatacaaaaaattagccgggcgtcgcagcatgcgcctgtagtcccagctgctcaggaggctgaggcaggagaattgattgaacccgggaggcagaggttgcactgagctgagattaagccaccgcactccagcctgggcgacagagcaagattccgttcccaagaaaaaaaaattgttcaacaataagggcaaagggagagaatcataacatctgattaaacagaaaaagcaagatttttaaaactaactatataaggatggtcccagctgtgtcaaaaggaagcttgtttgtaatacgtgtgcataaaaattaaatagaggtgaacacaattattttaaggcagttaaattatctctgtattgtgaactaagactttctagaattttacttattcattctgtacttaaattttttctaatgaacacatatacttttgtaatcagaaaatattaaatgcatgtatttttcaaaatcaaa

SEQ ID NO: 174382 - DNA, 955 bp, Artificial Sequence
  derived and/or modified sequence
ggcagcggcgctgtgtgcgcctgcgcggggcgccgagacagggcgtgttcgctgttcagtgccggtgttgcagggagtgagggcagctggagtgcgttctgccgaagcttgtggttgcacgcccatcgtcttaggggctaccttccgtgttaccttatcccatatcacacaactggtcctcagccataacaagctaacaatggtgccaccgaacatcgcagaactgaagaatttggaggtgctcaacttttttaataaccaaatcgaggagctgcccacacagatcagtagccttcagaaactcaaacacctgaaccttggcatgaacaggctgaacactttgccacgaggcttcggctccctgccagctcttgaggttctggacttgacgtacaacaacttgagcgaaaattctcttcctggaaacttcttctacctgaccaccctgcgtgcactctatctaagtgacaacgattttgaaatcctgccgccagatattgggaagctcacaaagttgcagatactcagccttagggataacgacctgatctcgctgcctaaggaaatcggggagcttacccagcttaaagagctccacattcaggggaaccgcctcaccgttctgcccccagaactaggaaacttggatttaactggccagaagcaggtattcaaagcagagaacaatccctgggtgacccccattgcagaccagttccagcttggcgtgtcccatgtttttgagtatatccgttctgagacatacaaatacctctacggcagacacatgcaggccaacccagaaccaccgaagaagaataatgacaaatcgaaaaagatcagccggaaacccctggcagccaagaacagataaggaagggattggcatcggctggccttccagcaccttctctctccaacacttcattctctcttgccctgtctctcaaataaa

SEQ ID NO: 174383 - DNA, 3919 bp, Artificial Sequence
  derived and/or modified sequence
gggcagctggagtgcgttctgccgaagcttgtggttgcacgcccatcgtcttaggggctaccttccgtggtgagtgtgtgcggtgttgcacttggggttgcttctcgctgcgtggccgcagcggggctgaacccttcccactccatcccctccccgcacccggaccagcccctgggacgccctcggacgcccacccgctccaaccctggggaagcctcagagtggcagcgaaggcctcttgcctttccgcctctgcgcttgctgtcatcgcccacgtgctttgttgttgttcggtgcagaccatgtccaagtctctgaagaagttggtggaggagagccgggagaagaaccagcccgaggtggacatgagtgaccggggcatctccaacatgctggatgtcaacggcctctttaccttatcccatatcacacaactggtcctcagccataacaagctaacaatggtgccaccgaacatcgcagaactgaagaatttggaggtgctcaacttttttaataaccaaatcgaggagctgcccacacagatcagtagccttcagaaactcaaacacctgaaccttggcatgaacaggctgaacactttgccacgaggcttcggctccctgccagctcttgaggttctggacttgacgtacaacaacttgagcgaaaattctcttcctggaaacttcttctacctgaccaccctgcgtgcactctatctaagtgacaacgattttgaaatcctgccgccagatattgggaagctcacaaagttgcagatactcagccttagggataacgacctgatctcgctgcctaaggaaatcggggagcttacccagcttaaagagctccacattcaggggaaccgcctcaccgttctgcccccagaactaggaaacttggatttaactggccagaagcaggtattcaaagcagagaacaatccctgggtgacccccattgcagaccagttccagcttggcgtgtcccatgtttttgagtatatccgttctgagacatacaaatacctctacggcagacacatgcaggccaacccagaaccaccgaagaagaataatgacaaatcgaaaaagatcagccggaaacccctggcagccaagaacagataaggaagggattggcatcggctggccttccagcaccttctctctccaacacttcattctctcttgccctgtctctcaaataaacccaatgctgcgtgtgaggccttttttatttttcttttcactctctttctaatgcttcccaccttaccttttagattcttttgctaggtgggagattgttataaggtctttaaaccatttccatttgtttctttaacattaccaaaagcagggaacaaagctcttattcaactgcgaattccatagtgggctctggcttttcttgaatagatatcacaaggttgcttattatcaaaagaataattaaaatcatgtaaccatttaaatgtcactgttaacacttttcactctttctgttgattcacctaactcattattttgctttattaaaagtcttccttcaccaccgagatatgctaatttaacttacaaatgattttaataaaatcttgagtttgtatcacatgttacttattgactcagaataaaagaacagtctgatcttggggtataacacattttcatttacttttctcccccaaaatcatcttatccaattttattggttatacatgataaacttttcatgaaagaaatgcaaaattaaatcacagttcgtttcttctcacattaatttgtcaagttttttttttctttgaagactttctaaattaggaagcagaaaaacaaatctctaggagattctgccaaaggattttggaaagtagcattccttcgccgaagaaatggtgatttctgccaggggctggtagacaagaactgtgaaagagagagagaaaaaacctcaactgtgtattttgtcacggcggaaaatctgctcgcatcgaagcattcttctaagcgacttcgatgccaaggaagttgtgtaaatgtgcacgcgctacaccacacccagggtggaaaccacagttgcagagtcattaaacaatcaattgtttgtttaacatctgtgataggcagctttccttcttttcaacagtgatacctacgaaaatcaaaataaatgcaagctgaggttttgtgctcactgaaagggctgtcaaccccagaaggccgacacaaaaaaaatggtatgtgaagatgcaccgtcttttcaaatggcctgggagagtcaaatggcctgggagagggggcctgcccttctctgctgtgtcctttcggcttcccagttgagctcccaagaccaggacccactggggcatataaaatctctgctgtatcctttcggcttcccagttgagctcccaagaccaggacccactggggcatataaaaaagtcaaaaatcaaaatcaaacaacaagttctgagttacttaggaaacagacttcgcatttcaatcagagaggccacagagcaaggtctaaacttctggcttctagacaaattcctgatagaacatttaaatgtgggaagtggcttccccaggtcccatcccctgtttagggatagagttgatatcatttttataggtgccatgtatgcctctgcctgaatttttttaattgacttttgagcttttgagattgcacgagggagaacaaggcctttgctgttgtggataggaaagacttaacctaaaattaaaccagcaagaaagcattagtaaaaatctaacaatatgaagggctcttatgagtcatttttttcaaaagatgaaaactccagaaacgcacaggaacgaaatacctcccagaaacatgaagcaatcatcgaagactcactggtaatatttttaaaaagtatacagatcaaagcaaaaagaagccatgtgtaacaaagagaaatgtgcaaatattttttaaggcagtattaagtgcaagaggagtaacatgaaataaacattctttcacatggctactgggaatataaatttcgctccagaaaggccgtagcagtttgacgataggtggcaaaaccttaagattgtgtactggggcccagaatttttatttctaggaatgtatcctgaggaaattatccgagatccccacaaactgcaatgtttaggaattgtccttatagcattgcatacacaagaaaaacagagaaaagcctgatccctgtcagtggaaaaggggttcaatgaattacggtgtgtctgcatgaggcttttatgacattaaaaattgttgaacaacggccaggcacagtggctcatgcctgtaatcctaacactttgggaggccaaggtgggaagattgcctgagctcaggagtttgagaccagcctgggcaacacggtgaaaccccgtctctactaaaatacaaaaaattagccgggcgtcgcagcatgcgcctgtagtcccagctgctcaggaggctgaggcaggagaattgattgaacccgggaggcagaggttgcactgagctgagattaagccaccgcactccagcctgggcgacagagcaagattccgttcccaagaaaaaaaaattgttcaacaataagggcaaagggagagaatcataacatctgattaaacagaaaaagcaagatttttaaaactaactatataaggatggtcccagctgtgtcaaaaggaagcttgtttgtaatacgtgtgcataaaaattaaatagaggtgaacacaattattttaaggcagttaaattatctctgtattgtgaactaagactttctagaattttacttattcattctgtacttaaattttttctaatgaacacatatacttttgtaatcagaaaatattaaatgcatgtatttttcaaaatcaaa

SEQ ID NO: 174384 - DNA, 834 bp, Artificial Sequence
  derived and/or modified sequence
atgagcaagagcctgaagaagctggtggaggagagcagagagaagaaccagcccgaggtggacatgagcgacagaggcatcagcaacatgctggacgtgaacggcctgttcaccctgagccacatcacccagctggtgctgagccacaacaagctgaccatggtgccccccaacatcgccgagctgaagaacctggaggtgctgaacttcttcaacaaccagatcgaggagctgcccacccagatcagcagcctgcagaagctgaagcacctgaacctgggcatgaacagactgaacaccctgcccagaggcttcggcagcctgcccgccctggaggtgctggacctgacctacaacaacctgagcgagaacagcctgcccggcaacttcttctacctgaccaccctgagagccctgtacctgagcgacaacgacttcgagatcctgccccccgacatcggcaagctgaccaagctgcagatcctgagcctgagagacaacgacctgatcagcctgcccaaggagatcggcgagctgacccagctgaaggagctgcacatccagggcaacagactgaccgtgctgccccccgagctgggcaacctggacctgaccggccagaagcaggtgttcaaggccgagaacaacccctgggtgacccccatcgccgaccagttccagctgggcgtgagccacgtgttcgagtacatcagaagcgagacctacaagtacctgtacggcagacacatgcaggccaaccccgagccccccaagaagaacaacgacaagagcaagaagatcagcagaaagcccctggccgccaagaacagatag

SEQ ID NO: 174385 - protein, 227 aa, Artificial Sequence
  derived and/or modified sequence
IINGSDCDMHTQPWQAALLLRPNQLYCGAVLVHPQWLLTAAHCRKKVFRVRLGHYSLSPVYESGQQMFQGVKSIPHPGYSHPGHSNDLMLIKLNRRIRPTKDVRPINVSSHCPSAGTKCLVSGWGTTKSPQVHFPKVLQCLNISVLSQKRCEDAYPRQIDDTMFCAGDKAGRDSCQGDSGGPVVCNGSLQGLVSWGDYPCARPNRPGVYTNLCKFTKWIQETIQANS

SEQ ID NO: 174386 - protein, 293 aa, Artificial Sequence [sequence omitted]

SEQ ID NO: 174387 - DNA, 882 bp, Artificial Sequence
  derived and/or modified sequence
atggccaccgccagacccccctggatgtgggtgctgtgcgccctgatcaccgccctgctgctgggcgtgaccgagcacgtgctggccaacaacgacgtgagctgcgaccaccccagcaacaccgtgcccagcggcagcaaccaggacctgggcgccggcgccggcgaggacgccagaagcgacgacagcagcagcagaatcatcaacggcagcgactgcgacatgcacacccagccctggcaggccgccctgctgctgagacccaaccagctgtactgcggcgccgtgctggtgcacccccagtggctgctgaccgccgcccactgcagaaagaaggtgttcagagtgagactgggccactacagcctgagccccgtgtacgagagcggccagcagatgttccagggcgtgaagagcatcccccaccccggctacagccaccccggccacagcaacaacctgatgctgatcaagctgaacagaagaatcagacccaccaaggacgtgagacccatcaacgtgagcagccactgccccagcgccggcaccaagtgcctggtgagcggctggggcaccaccaagagcccccaggtgcacttccccaaggtgctgcagtgcctgaacatcagcgtgctgagccagaagagatgcgaggacgcctaccccagacagatcgacgacaccatgttctgcgccggcgacaaggccggcagagacagctgccagggcgacagcggcggccccgtggtgtgcaacggcagcctgcagggcctggtgagctggggcgactacccctgcgccagacccaacagacccggcgtgtacaccaacctgtgcaagttcaccaagtggatccaggagaccatccaggccaacagctag

SEQ ID NO: 174388 - DNA, 882 bp, Artificial Sequence
  derived and/or modified sequence
atggcaacagccaggcctccatggatgtgggtactgtgcgcactaattactgcattattgctgggggttacagagcatgtgttagcaaataacgacgtcagctgtgatcatcccagcaacacagtcccgtcgggctcgaatcaggatctgggcgctggggccggcgaagacgcgcggagtgatgatagttcttccagaatcatcaacggcagcgattgcgatatgcacacccagccgtggcaagccgctctgctgctcaggccgaaccagctctactgcggcgcagtgctagtgcaccctcagtggctgctcacagctgcacactgcaggaagaaggtctttcgggtgcgcctcggccattacagcttaagcccagtttacgagagtggccaacagatgttccagggtgtgaagtccattcctcacccaggctactcacatccaggtcactccaacaacctgatgctgatcaagttaaaccggagaatccgcccgaccaaagatgtacggcctatcaacgtgtcttcccactgccctagcgcgggcaccaagtgcctggtgtctgggtggggtacaaccaaatctccccaagtgcattttccgaaagtactccagtgcctgaacatcagcgtcctgtcacagaagagatgtgaggacgcatacccccggcaaatcgacgacactatgttctgcgcaggcgacaaagctggccgggactcttgtcagggggattctgggggaccagttgtctgtaacggttctcttcaaggcttagtgtcttggggtgattacccctgtgctcgccctaataggccaggagtttacacaaatctatgtaaattcacaaaatggatacaggagaccatccaggccaactcctag

SEQ ID NO: 174389 - DNA, 882 bp, Artificial Sequence
  derived and/or modified sequence
atggccactgctaggcccccctggatgtgggtgctatgtgctctgatcacagctctgcttttgggcgtgactgaacacgtcctcgctaacaacgatgtgagctgtgaccatccctcaaacacagtaccatctggatcgaatcaagatttgggagcgggggccggggaagatgcccgaagtgacgacagctcttcacgcattattaacggcagtgattgcgacatgcacacacaaccctggcaggcagccctgttgctgcgccccaaccagctgtactgcggagctgtgctcgttcacccacagtggctgctaacggcggcacactgccggaagaaggtcttcagagtcagactcggtcactactcgctcagcccggtttatgagagcggccaacagatgttccaaggcgtaaagtctatcccacaccccgggtacagccatccaggtcatagtaacaatctgatgctgatcaagctcaaccggaggattagaccgactaaagacgtgcggcccattaacgtctcctcccattgccctagtgcggggaccaaatgcctcgtgagcggatggggcaccactaaatcccctcaggtgcattttcccaaggtcctgcagtgcctcaacatcagtgtgctgtctcaaaagaggtgcgaggacgcatatcccaggcagattgatgacacaatgttttgcgcaggtgataaagctggtcgggatagctgtcaaggagatagtggcggacctgtggtctgcaacggtagcctgcagggtttggtttcgtggggcgactacccctgtgctcgccctaaccgccccggggtctacactaatctgtgcaaatttactaagtggatccaggagaccattcaggcaaatagctag

SEQ ID NO: 174390 - DNA, 882 bp, Artificial Sequence
  derived and/or modified sequence
atggctaccgcccgtcccccttggatgtgggtgctctgtgccttgataaccgcccttctactgggggtcacggaacatgtgctagccaataatgacgtctcttgtgaccatccctctaatactgtccctagcgggagcaatcaggacctcggggctggcgctggagaagatgcacgttcagatgactcatccagccgcattatcaatggcagcgactgtgacatgcacactcaaccttggcaggctgcgctgcttctcagacccaaccagctttactgtggcgcagtactggtgcacccccaatggctgctgactgctgcccactgtcgcaaaaaggtgttcagagtgcgattgggccactattcactttctcccgtatacgaaagcggtcaacagatgtttcaaggggtaaagtcaatccctcatccaggttactctcatcccgggcactccaataacctgatgctgatcaaactcaatcggaggatacgcccaacaaaagacgtccgtccgattaatgtcagctcacattgcccttccgctggcaccaaatgtcttgtgtctggctggggcacaacgaaaagcccccaggtacactttcctaaggttcttcagtgccttaacatctccgtgctatcacagaaaagatgtgaggacgcttaccctcgtcagattgatgacacaatgttttgtgcgggtgataaagccggacgcgactcctgtcagggagacagcggtgggcctgttgtgtgcaacggttccctgcagggcctagtgtcttggggtgactacccatgcgccaggcccaaccggcccggggtctacactaacctgtgcaaattcacaaagtggatacaggagactatccaggctaactcgtag

SEQ ID NO: 174391 - DNA, 882 bp, Artificial Sequence
  derived and/or modified sequence
atggccacagcccggcccccctggatgtgggtgctgtgtgccctgatcacagccctgctgctgggcgtgacagagcacgtgctggccaacaatgatgtgtcctgtgaccaccccagcaacacagtgcccagcggcagcaaccaggacctgggcgctggggccggggaggatgcccggagtgatgacagcagcagccgcatcatcaatggaagtgactgtgacatgcacacccagccctggcaggccgccctgctgctgcggcccaaccagctgtactgtggggctgtgctggtgcacccccagtggctgctgacagctgcccactgcaggaagaaggtgttccgggtgcggctgggccactacagcctgagccctgtgtatgaaagtggccagcagatgttccagggcgtgaagagcatcccccaccctggctacagccaccctggccacagcaacaacctgatgctgatcaagctgaacagacgcatccggcccaccaaggatgtgcggcccatcaacgtgagcagccactgccccagcgctggcaccaagtgcctggtgtctggctggggcaccaccaagagcccccaggtgcacttccccaaggtgctgcagtgcctgaacatctctgtgctgagccagaagagatgtgaagatgcctacccccggcagattgatgacaccatgttctgtgccggggacaaggccggccgggacagctgccagggcgacagcggcggccctgtggtgtgcaatggcagcctgcagggcctggtgtcctggggagactacccctgtgcccggcccaacagacctggggtgtacaccaacctgtgcaagttcaccaagtggatccaggagaccatccaggccaacagctag

SEQ ID NO: 174392 - DNA, 882 bp, Artificial Sequence
  derived and/or modified sequence
atggccaccgcccggcccccctggatgtgggtgctgtgcgccctgatcacagcactgctcctcggcgtgaccgaacacgtactcgccaataacgacgtgtcttgcgaccacccatctaacactgtaccatctggtagcaatcaggacctgggtgccggggcgggggaagacgctcggtctgacgacagcagctcacgtatcattaacggctctgattgtgacatgcacacccagccttggcaggcagcccttctcctgcggccaaatcagctctattgcggcgccgtcctggtgcacccccagtggcttctgacagcagctcactgtaggaagaaggtttttcgcgttagacttggccattactcactgagccccgtttatgagtccggacagcagatgttccagggcgtgaagtccattccacaccctggttatagtcatcctggtcattccaataatctcatgctaattaagctgaacagacggatccgtccaaccaaggacgtcaggcctatcaacgtttcatcacattgcccctctgctgggaccaagtgcctggtctctggttggggaaccaccaagtcaccccaggtccatttccctaaggtcctccagtgcctaaatatctccgtcctttcacagaagcgatgtgaggatgcttacccgagacaaattgacgacacaatgttttgcgctggtgataaggctggccgtgattcgtgccaaggcgatagtggcggtcctgtcgtttgcaacggctctctgcagggactggtctcatggggggactatccatgcgccaggcccaatcgacctggcgtctatactaacctatgtaagtttactaaatggatacaggagactattcaagctaattcctag

SEQ ID NO: 174393 - DNA, 882 bp, Artificial Sequence
  derived and/or modified sequence
atggccaccgcccggcccccctggatgtgggtgctgtgcgccctgattacggcactgttactgggggttaccgaacacgtgttggcgaacaatgatgtgtcttgcgatcatccctcaaacactgtgccgtcgggctctaaccaagacctgggcgccggggctggtgaagatgctcgaagtgacgactccagtagccggatcattaatggctcggactgcgatatgcatacccagccttggcaggcagccttgcttctgaggcccaaccagctatattgtggcgcagtcctcgtgcacccacagtggctgctcacagcagctcactgccgcaagaaggtattcagggtgagattggggcactattcactgtcccctgtgtatgagagcggccaacaaatgtttcagggcgtgaagtcgatccctcacccaggctactcacaccctggccatagcaacaacctgatgttgataaaacttaataggcgcatccggccaaccaaagacgtgcggcccatcaacgtcagcagccattgcccttcagcaggcactaagtgtctggttagtggttggggaactacaaagagcccccaggtacactttcctaaagtgcttcagtgcttaaacatcagcgtcctctcccagaagcgatgcgaagacgcatatccgaggcagattgacgacacaatgttctgcgcgggggataaggcaggtcgggacagttgccagggagacagcggcggcccagtggtgtgcaacggatctctgcagggcttggttagctggggcgactacccttgtgcgcggcccaacaggccgggagtatacaccaatttatgcaaattcactaagtggattcaggagacaatccaagccaactcatag

SEQ ID NO: 174394 - DNA, 882 bp, Artificial Sequence
  derived and/or modified sequence
atggccaccgcccggcccccctggatgtgggtgctgtgcgccctgatcactgctctgttactgggcgtcaccgaacatgtccttgccaataatgatgtgtcttgtgaccatcctagcaatacggttccgtccggcagcaatcaagacctgggcgccggggctggtgaggatgcacggagtgatgattcatccagtcgaatcataaatggatctgactgtgatatgcacactcaaccgtggcaagccgcactattgcttagacccaatcagttgtactgcggtgcagtgttagtacatcctcagtggcttctgactgctgcccactgtaggaagaaagtgttccgagtgcggctagggcattactctctgtcaccagtgtacgagagcggacaacagatgtttcagggggttaagtctatcccccaccctgggtatagccatcctgggcatagcaataacctcatgctgataaagcttaataggcgaattcgtccaaccaaggatgtgaggcccattaacgtgtcgtcccactgcccatctgccgggactaagtgtctagtcagtggctggggcactaccaaatctccgcaggttcatttcccgaaggtactccagtgcctcaacatttccgtgctgtcccaaaaacgatgcgaagacgcctatcctcggcagatcgatgacactatgttctgcgcgggcgacaaagccgggagggactcctgccagggtgactctggcggcccagtggtctgcaacggttcattgcagggcctcgtctcttggggggattacccctgcgccagacctaatcgccccggcgtttatactaacttgtgtaaatttactaagtggatccaggagaccattcaagccaacagttag

SEQ ID NO: 174395 - DNA, 882 bp, Artificial Sequence
  derived and/or modified sequence
atggcgactgccaggccaccctggatgtgggtgctgtgcgcgctgatcacagctctgcttttaggcgtgaccgagcacgtgctcgctaataatgacgtgtcatgtgatcatccttcaaataccgtgcctagcgggtctaatcaagatctaggagctggcgcaggagaggatgccaggtccgacgactccagcagccggatcattaacggctccgattgtgacatgcatactcaaccctggcaggcagccttactgctccgcccaaaccagctgtactgtggagctgtgctggtccacccccaatggctcctgaccgctgcacactgtcggaaaaaagtattccgggttcggctgggccattactctctgtcaccagtgtatgagtcagggcagcaaatgtttcagggagtcaagtcgattcctcatccgggttacagccacccgggacacagcaacaacttgatgctcatcaaacttaacaggagaatccgccctactaaggacgttaggccaattaatgtgtcatcccactgccctagcgccggaaccaagtgcctggttagtggatggggcacaacaaaaagccctcaggtacattttccaaaggttctgcagtgcttgaatatatctgtgctctcccagaaaagatgtgaggacgcctatccccgacagattgatgacacgatgttctgcgcaggagacaaagcaggtagggacagctgccagggagacagcggcggacccgtcgtgtgtaatggtagccttcagggtcttgtgtcttggggcgactacccttgtgctcggcctaaccgcccaggagtctacacaaacctgtgcaaattcacaaagtggatccaggaaaccatacaggctaactcttag

SEQ ID NO: 174396 - DNA, 882 bp, Artificial Sequence
  derived and/or modified sequence
atggccacggccaggcctccttggatgtgggtcctgtgcgcactgattaccgcattattgctgggcgtgacagaacacgtactggctaacaacgatgtatcttgtgaccacccctcaaacactgtgccatcaggatcaaaccaggacctgggggctggtgccggagaggatgcacggtcggacgattcaagctcacggatcattaatggttccgactgcgacatgcatacacagccatggcaggcagcactattactgcgtcctaatcagctttactgcggcgctgtgctcgtacacccacagtggctcctgacggctgcccattgtagaaaaaaggtcttccgcgtgagattaggtcactacagcctgtcgcctgtctatgagtccggacaacaaatgtttcagggggtgaagagcattccccatccgggatactctcacccgggtcactccaacaacctgatgctgatcaaactcaaccgccgtatcagacctaccaaggacgtgaggcctatcaacgtgtcgagccactgcccatcggccggaactaaatgtttagttagcggctggggaacaactaaaagcccccaagttcactttcccaaagtgctgcagtgtctcaatatctcagtcctgagtcagaagcgttgtgaagacgcttaccctcgccaaatcgacgacaccatgttctgtgcaggtgataaagccggaagggattcctgccaaggtgattccggcggtcctgttgtttgcaatggttctctgcagggccttgtctcctggggggattatccatgcgcacgccctaataggcccggtgtgtataccaacctctgtaagtttactaagtggatccaggaaaccatccaggcaaattcctag

SEQ ID NO: 174397 - DNA, 882 bp, Artificial Sequence
  derived and/or modified sequence
atggcaactgcgagaccaccttggatgtgggtgctgtgcgctctcatcactgctctgctgctgggagtaactgagcatgttctcgcgaacaatgatgtgtcctgcgatcatccaagcaacaccgtgccgtctgggtcaaatcaggacttgggggcaggggctggtgaggatgcgaggagcgacgactcatctagcagaatcattaatgggtccgattgcgacatgcacacacagccttggcaggccgcactcctgcttcgcccaaaccaattatactgtggcgcagtgctagtgcacccacaatggcttctgaccgctgcccactgcagaaagaaagtcttcagagttagactgggccactatagcttatcccctgtgtacgagagtgggcaacagatgtttcaaggagtaaagagtattccccacccgggatactcccatcccggacattccaacaatttgatgctgatcaagctcaaccgaaggattcgccctactaaggacgtcagacctattaacgtgagtagtcattgtccgagtgccggtactaagtgcctggtgtcaggctggggcaccactaagagcccacaggtacattttcccaaggtcctgcagtgcctgaatatctccgtgctcagtcaaaaacgctgtgaggacgcatatccgagacagatcgacgataccatgttttgcgcgggagacaaggctggacgagacagttgccaaggggacagtggaggccctgtggtgtgcaatgggagcctccagggtttggtgtcatggggggactatccatgtgccagaccgaatcgcccaggcgtttacaccaacctttgcaaattcaccaaatggatccaggagaccatccaggctaactcgtag

SEQ ID NO: 174398 - DNA, 1561 bp, Artificial Sequence
  derived and/or modified sequence
gccccagggagcagtgggtggttataactcaggcccggtgcccagagcccaggaggaggcagtggccaggaaggcacaggcctgagaagtctgcggctgagctgggagcaaatcccccaccccctacctgggggacagggcaagtgagacctggtgagggtggctcagcaggcagggaaggagaggtgtctgtgcgtcctgcacccacatctttctctgtcccctccttgccctgtctggaggctgctagactcctatcttctgaattctatagtgcctgggtctcagcgcagtgccgatggtggcccgtccttgtggttcctctctacctggggaaataaggtgcagcggccatggctacagcaagacccccctggatgtgggtgctctgtgctctgatcacagccttgcttctgggggtcacagagcatgttctcgccaacaatgatgtttcctgtgaccacccctctaacaccgtgccctctgggagcaaccaggacctgggagctggggccggggaagacgcccggtcggatgacagcagcagccgcatcatcaatggatccgactgcgatatgcacacccagccgtggcaggccgcgctgttgctaaggcccaaccagctctactgcggggcggtgttggtgcatccacagtggctgctcacggccgcccactgcaggaagaaagttttcagagtccgtctcggccactactccctgtcaccagtttatgaatctgggcagcagatgttccagggggtcaaatccatcccccaccctggctactcccaccctggccactctaacaacctcatgctcatcaaactgaacagaagaattcgtcccactaaagatgtcagacccatcaacgtctcctctcattgtccctctgctgggacaaagtgcttggtgtctggctgggggacaaccaagagcccccaagtgcacttccctaaggtcctccagtgcttgaatatcagcgtgctaagtcagaaaaggtgcgaggatgcttacccgagacagatagatgacaccatgttctgcgccggtgacaaagcaggtagagactcctgccagggtgattctggggggcctgtggtctgcaatggctccctgcagggactcgtgtcctggggagattacccttgtgcccggcccaacagaccgggtgtctacacgaacctctgcaagttcaccaagtggatccaggaaaccatccaggccaactcctgagtcatcccaggactcagcacaccggcatccccacctgctgcagggacagccctgacactcctttcagaccctcattccttcccagagatgttgagaatgttcatctctccagcccctgaccccatgtctcctggactcagggtctgcttcccccacattgggctgaccgtgtctctctagttgaaccctgggaacaatttccaaaactgtccagggcgggggttgcgtctcaatctccctggggcactttcatcctcaagctcagggcccatcccttctctgcagctctgacccaaatttagtcccagaaataaactgagaagtgg

SEQ ID NO: 174399 - DNA, 1426 bp, Artificial Sequence
  derived and/or modified sequence
gccccagggagcagtgggtggttataactcaggcccggtgcccagagcccaggaggaggcagtggccaggaaggcacaggcctgagaagtctgcggctgagctgggagcaaatcccccaccccctacctgggggacaggtgcctgggtctcagcgcagtgccgatggtggcccgtccttgtggttcctctctacctggggaaataaggtgcagcggccatggctacagcaagacccccctggatgtgggtgctctgtgctctgatcacagccttgcttctgggggtcacagagcatgttctcgccaacaatgatgtttcctgtgaccacccctctaacaccgtgccctctgggagcaaccaggacctgggagctggggccggggaagacgcccggtcggatgacagcagcagccgcatcatcaatggatccgactgcgatatgcacacccagccgtggcaggccgcgctgttgctaaggcccaaccagctctactgcggggcggtgttggtgcatccacagtggctgctcacggccgcccactgcaggaagaaagttttcagagtccgtctcggccactactccctgtcaccagtttatgaatctgggcagcagatgttccagggggtcaaatccatcccccaccctggctactcccaccctggccactctaacaacctcatgctcatcaaactgaacagaagaattcgtcccactaaagatgtcagacccatcaacgtctcctctcattgtccctctgctgggacaaagtgcttggtgtctggctgggggacaaccaagagcccccaagtgcacttccctaaggtcctccagtgcttgaatatcagcgtgctaagtcagaaaaggtgcgaggatgcttacccgagacagatagatgacaccatgttctgcgccggtgacaaagcaggtagagactcctgccagggtgattctggggggcctgtggtctgcaatggctccctgcagggactcgtgtcctggggagattacccttgtgcccggcccaacagaccgggtgtctacacgaacctctgcaagttcaccaagtggatccaggaaaccatccaggccaactcctgagtcatcccaggactcagcacaccggcatccccacctgctgcagggacagccctgacactcctttcagaccctcattccttcccagagatgttgagaatgttcatctctccagcccctgaccccatgtctcctggactcagggtctgcttcccccacattgggctgaccgtgtctctctagttgaaccctgggaacaatttccaaaactgtccagggcgggggttgcgtctcaatctccctggggcactttcatcctcaagctcagggcccatcccttctctgcagctctgacccaaatttagtcccagaaataaactgagaagtgg

SEQ ID NO: 174400 - DNA, 1365 bp, Artificial Sequence
  derived and/or modified sequence
aatgtgccccagggagcagtgggtggttataactcaggcccggtgcccagagcccaggaggaggcagtggccaggaaggcacaggcctgagaagtctgcggctgagctgggagcaaatcccccaccccctacctgggggacagggtgcagcggccatggctacagcaagacccccctggatgtgggtgctctgtgctctgatcacagccttgcttctgggggtcacagagcatgttctcgccaacaatgatgtttcctgtgaccacccctctaacaccgtgccctctgggagcaaccaggacctgggagctggggccggggaagacgcccggtcggatgacagcagcagccgcatcatcaatggatccgactgcgatatgcacacccagccgtggcaggccgcgctgttgctaaggcccaaccagctctactgcggggcggtgttggtgcatccacagtggctgctcacggccgcccactgcaggaagaaagttttcagagtccgtctcggccactactccctgtcaccagtttatgaatctgggcagcagatgttccagggggtcaaatccatcccccaccctggctactcccaccctggccactctaacaacctcatgctcatcaaactgaacagaagaattcgtcccactaaagatgtcagacccatcaacgtctcctctcattgtccctctgctgggacaaagtgcttggtgtctggctgggggacaaccaagagcccccaagtgcacttccctaaggtcctccagtgcttgaatatcagcgtgctaagtcagaaaaggtgcgaggatgcttacccgagacagatagatgacaccatgttctgcgccggtgacaaagcaggtagagactcctgccagggtgattctggggggcctgtggtctgcaatggctccctgcagggactcgtgtcctggggagattacccttgtgcccggcccaacagaccgggtgtctacacgaacctctgcaagttcaccaagtggatccaggaaaccatccaggccaactcctgagtcatcccaggactcagcacaccggcatccccacctgctgcagggacagccctgacactcctttcagaccctcattccttcccagagatgttgagaatgttcatctctccagcccctgaccccatgtctcctggactcagggtctgcttcccccacattgggctgaccgtgtctctctagttgaaccctgggaacaatttccaaaactgtccagggcgggggttgcgtctcaatctccctggggcactttcatcctcaagctcagggcccatcccttctctgcagctctgacccaaatttagtcccagaaataaactgagaagtggaa

SEQ ID NO: 174401 - protein, 398 aa, Artificial Sequence
  derived and/or modified sequence
MSGSSLPSALALSLLLVSGSLLPGPGAAQNAGFVKSPMSETKLTGDAFELYCDVVGSPTPEIQWWYAEVNRAESFRQLWDGARKRRVTVNTAYGSNGVSVLRITRLTLEDSGTYECRASNDPKRNDLRQNPSITWIRAQATISVLQKPRIVTSEEVIIRDSPVLPVTLQCNLTSSSHTLTYSYWTKNGVELSATRKNASNMEYRINKPRAEDSGEYHCVYHFVSAPKANATIEVKAAPDITGHKRSENKNEGQDATMYCKSVGYPHPDWIWRKKENGMPMDIVNTSGRFFIINKENYTELNIVNLQITEDPGEYECNATNAIGSASVVTVLRVRSHLAPLWPFLGILAEIIILVVIIVVYEKRKRPDEVPDDDEPAGPMKTNSTNNHKDKNLRQRNTN

SEQ ID NO: 174402 - protein, 193 aa, Artificial Sequence
  derived and/or modified sequence
MSGSSLPSALALSLLLVSGSLLPGPGAAQNAAPDITGHKRSENKNEGQDATMYCKSVGYPHPDWIWRKKENGMPMDIVNTSGRFFIINKENYTELNIVNLQITEDPGEYECNATNAIGSASVVTVLRVRSHLAPLWPFLGILAEIIILVVIIVVYEKRKRPDEVPDDDEPAGPMKTNSTNNHKDKNLRQRNTN

SEQ ID NO: 174403 - DNA, 1197 bp, Artificial Sequence
  derived and/or modified sequence
atgagcggaagcagcttacccagcgctctcgcactatctctacttctggtctctgggtctttactgcctggaccaggcgcggctcagaatgctggattcgtgaagtcccctatgtccgagaccaagcttacaggagacgcttttgaactgtattgcgatgttgtcgggagccctacaccagagatccagtggtggtatgcagaggtgaatagagcagagagcttccggcaactgtgggatggtgccaggaaacgcagggttacggtaaacaccgcctatggaagcaacggagtgtccgtgttgcgaatcactcggttaacattggaggactcagggacttatgagtgtagagcctctaacgaccccaaacgtaatgacttgagacagaacccatctattacgtggatccgagcccaggccaccatttcggtcctccagaagccgcgcatcgttacgtccgaggaagtgattattcgggactctcccgtgctccccgtgactctacagtgcaatcttacgtcctcatctcatacccttacgtacagctattggaccaaaaacggagtggagttaagcgccacaaggaaaaatgcctcgaacatggagtatcgtattaacaagccacgcgcagaagacagcggcgagtatcactgcgtttaccatttcgtgtccgcccctaaggctaacgctacaatcgaggtcaaggccgcccccgacatcacaggccataagcggagtgagaacaagaacgagggacaggatgcaaccatgtattgtaaatctgtcggataccctcaccccgattggatttggagaaaaaaggaaaatggcatgcccatggatattgtgaatacatccggacggttcttcataattaataaggagaactacactgagcttaacatagtgaatttgcaaatcacggaggaccccggagaatatgagtgtaatgcaacaaatgcaattgggtcagcaagtgtggtgactgtgctgcgcgttagatcgcatttggccccactgtggccctttctgggcattctcgcggagatcatcattttggtggtgattatagtggtgtacgaaaaacggaagagaccagacgaagtccccgacgacgacgaacctgccggtccaatgaagaccaactccaccaacaaccataaggataagaacctgagacagagaaacaccaattag

SEQ ID NO: 174404 - DNA, 1197 bp, Artificial Sequence
  derived and/or modified sequence
atgagcggcagcagcctgcccagcgccctggccctgagcctgctgctggtgtctggcagcctgctgcccggccctggagctgcccagaatgccggctttgtgaagagccccatgtctgagaccaagctgactggagatgcctttgagctgtactgtgatgtggtgggcagccccaccccagagatccagtggtggtatgcagaggtgaacagagctgagagcttccggcagctgtgggatggagccaggaagagaagagtgacagtgaacacagcctacggcagcaatggagtgtctgtgctgcgcatcacccggctgaccctggaggacagcggcacctatgaatgtcgggccagcaatgaccccaagagaaatgacctgcggcagaaccccagcatcacctggatccgggcccaggccaccatctctgtgctgcagaagccccgcatcgtgaccagcgaggaggtgatcatccgggacagccctgtgctgcctgtgaccctgcagtgcaacctgaccagcagcagccacaccctgacctacagctactggaccaagaatggagtggagctgagcgccaccaggaagaatgccagcaacatggagtaccgcatcaacaagcccagggcagaagattctggagagtaccactgtgtgtaccactttgtgtctgcccccaaggccaatgccaccatcgaggtgaaggccgccccagacatcaccggccacaagagaagtgagaacaagaatgaaggccaggatgccaccatgtactgcaagtctgtgggctacccccacccagactggatctggaggaagaaggaaaatggcatgcccatggacatcgtgaacaccagcggccgcttcttcatcatcaacaaggagaactacacagagctgaacatcgtgaacctgcagatcacagaagatcctggagaatatgaatgtaatgccaccaatgccatcggcagcgcctctgtggtgacagtgctgcgggtgcgcagccacctggcccccctgtggcccttcctgggcatcctggccgagatcatcatcctggtggtgatcatcgtggtgtatgagaagaggaagaggccagatgaggtgcctgatgatgatgagcccgccggccccatgaagaccaacagcaccaacaaccacaaggacaagaacctgcggcagaggaacaccaactag

SEQ ID NO: 174405 - DNA, 1197 bp, Artificial Sequence
  derived and/or modified sequence
atgagcggcagcagcctgcccagcgccctggccctgagcctgctgcttgtgtcagggtcactcctgcctggccctggtgccgctcagaacgcaggctttgttaaaagcccaatgtccgagacgaagctcacgggggatgcattcgagctctattgtgatgtggtaggtagtcccacccccgagatccaatggtggtacgccgaagtgaaccgcgcggaatcctttcggcaactgtgggatggcgcccgcaaacggagggtcaccgtcaacactgcctatggctcaaacggggtgtcggttctgcggataactaggttgaccctagaggatagcggaacttacgagtgtcgtgctagcaacgatccaaaacggaatgacttacgtcagaacccgagtataacatggattcgggcacaggcaactatcagtgtgctacagaaacccagaattgtaacgtccgaggaggtcataatccgcgatagtcctgtgctccccgtgaccctccagtgcaacctgacgtccagctcgcacaccctaacatactcctactggacaaagaatggcgttgaactcagtgccacacgtaagaatgctagcaacatggaataccgtataaataagccccgtgcagaagacagtggagaataccactgcgtgtatcacttcgttagcgctcctaaggcgaacgccaccatagaagtgaaagccgctcctgacatcactggccacaaacgtagtgaaaacaaaaatgaaggccaggatgccacaatgtactgtaaatcggtcggatatccacacccggattggatatggagaaaaaaggaaaatggtatgcctatggacatcgtcaacactagcggccgttttttcattatcaacaaagagaattacacggagcttaatattgtgaacctccagatcacggaggacccaggtgagtacgagtgcaatgccaccaacgccataggttctgcgtctgtcgtaaccgtgttgagggtgcgatcacatctcgctcccctgtggccttttctcgggattcttgccgagataatcatattagtcgtgatcattgtggtctacgagaagaggaagcggcctgatgaggtcccagacgacgacgaacctgccggacccatgaagaccaattcaaccaacaaccacaaggacaagaacctacgccaacgcaacaccaattag

SEQ ID NO: 174406 - DNA, 2444 bp, Artificial Sequence
  derived and/or modified sequence
cacgacccggagcgaaggtctcgcgaggcctgggcgctgcggcggcaggaggaggacggggaaggacggagccgagccgcggctgcctccctcgctcactccctcgcgcactcgcccgccccctccctccctcccctcccttccccggccccggctctggccccggcccattcgctgttgggtcttctgctagggaggatgtcgggttcgtcgctgcccagcgccctggccctctcgctgttgctggtctctggctccctcctcccagggccaggcgccgctcagaacgctgggtttgtcaagtcgcccatgtcagaaactaagctcacgggggacgcctttgagctgtactgtgacgtggtcgggagccccacgccagagatccagtggtggtacgcagaagtcaaccgggcagagtctttcagacagctgtgggacggtgctcggaagcgccgtgtcaccgtaaacaccgcctacgggtcaaacggcgtgagtgtgctgagaataacccggctcaccttggaggactctgggacttacgagtgcagggccagcaacgaccccaagaggaatgacttgaggcaaaacccctccataacatggattcgagcccaggccaccataagcgtccttcagaagccaaggattgtcaccagtgaagaggtcattattcgagacagccctgttctccctgtcaccctgcagtgtaacctcacctccagctctcacacccttacatacagctactggacaaagaatggggtggaactgagtgccactcgtaagaatgccagcaacatggagtacaggatcaataagccgagagctgaggattcaggcgaataccactgcgtatatcactttgtcagcgctcctaaagcaaacgccaccattgaagtgaaagccgctcctgacatcactggccataaacggagtgagaacaagaatgaagggcaggatgccactatgtattgcaagtcagttggctacccccacccagactggatatggcgcaagaaggagaacgggatgcccatggacattgtcaatacctctggccgcttcttcatcatcaacaaggaaaattacactgagttgaacattgtgaacctgcagatcacggaagaccctggcgagtatgaatgtaatgccaccaacgccattggctccgcctctgttgtcactgtcctcagggtgcggagccacctggccccactctggcctttcttgggaattctggctgaaattatcatccttgtggtgatcattgttgtgtatgagaagaggaagaggccagatgaggttcctgacgatgatgaaccagctggaccaatgaaaaccaactctaccaacaatcacaaagataaaaacttgcgccagagaaacacaaattaagtactgcttacaatatctttaggttcctgaaactggtggcaacatgacctgctaaaattttctgcttggacctctttggttctctcccctttcaagtgagcaacaccacaatgactgtctaaagcatgccttatttagcctctcctgtaagggtgatctagccaggtacattttaaacaatgcttcagtgtagaaggtgtaaactattttgggcttgatgtgctgtgaatgttgcttttttttttcctttgttaaaatatttaaatagaagtgaaaaggtcctctgaggatcagatcatgcatgcgccattttttacttaatgcagctgttaaattggcaaagctctaaaatgcactgctgccatctagtgatacacttttgtaaagtacagcaaaacctacagatatatacagtatataaatatatatatatatatatttatatttttgggggtgggagaaatccaaaataaagtaaatgcttgtttcatttttaagctgctgatattcattccttattgtatgttgtcagatgaggaaattgtgcagttctggtacataaagatgagtaatataaactgaaatctataattttaagggcttaacctgtgactttaataagctggaacagtccactgaatgggtataatgaattgcagtatatacgtatgattgctttttaagtgattatcttttcttctgttaagtcatgtaaattcataaatccttttgcactgatgtgttgaaccttattcttgtacattcattcaatcaaggcaaacttttataatttttcttttgtttccaatgaccttgaaatgttatagcatggtaatattctatgcaactatagttatactttttggtttgacactgtattttttcacattgatttactggttgatgatagattttataacctaacggttctcatgcggtgcgtaattgtagatgcatgtacttgtgtgttttgtgtaattattgaagtgcaatgatgtataaaaaagtggattcacctgtttttaaaaataaaacattgataaaaggtg

SEQ ID NO: 174407 - DNA, 1197 bp, Artificial Sequence
  derived and/or modified sequence
atgtcaggttcttccctacctagtgcactggctctcagcttgctccttgtctctggaagcctgctcccaggccctggggctgcccagaacgcaggctttgtaaagtctcctatgtctgaaactaagttgaccggggatgccttcgagttatactgcgacgtcgtgggcagtcccacccctgagatccagtggtggtatgccgaggtcaacagggcagagagctttcgccaactctgggatggtgccagaaagcgtcgggtgaccgtgaacacggcttatggttctaatggtgtttctgtgctgagaattacccggctgacccttgaggacagcggaacgtatgagtgtcgggctagcaatgaccccaaaagaaacgacttacggcagaatccctcaattacatggatcagagctcaggcgacaatctcagtgctgcagaaaccacgaatcgtgaccagcgaggaggttattattagggattcgcccgttcttccggtaactctccagtgtaacctgacgagtagctctcacacactgacgtatagttattggacaaagaatggcgtggaactgagcgcaactcggaagaacgcttccaacatggaatacaggatcaacaaaccacgggcagaagatagcggggagtatcactgcgtgtaccattttgtgtctgctcccaaagctaacgctacaattgaagtgaaagctgcccctgacatcactgggcacaagcgctccgagaataagaacgagggacaggacgctactatgtactgtaaatcagttgggtatccccatccggactggatttggagaaagaaggagaatggtatgccaatggatatagtgaacacctcaggacgtttcttcattatcaacaaggagaattacacagagctgaatatagtgaatttgcagattacggaagacccgggagaatatgagtgtaatgccacaaacgccattggatcagccagtgtggtaacagtcttaagagtaaggagccacctcgcccctctgtggcccttccttgggatactcgcagaaattatcatcctggtggtaataatcgtcgtgtatgaaaagcgtaaaagacccgacgaggtgcctgatgacgacgagcccgctgggccaatgaaaaccaactcaaccaacaatcacaaagacaagaatttacgccagagaaacacaaattag

SEQ ID NO: 174408 - DNA, 1197 bp, Artificial Sequence
  derived and/or modified sequence
atgagcggcagcagcctgcccagcgccctggccctgagcctgctgctggtgagcggcagcctgctgcccggccccggcgccgcccagaacgccggcttcgtgaagagccccatgagcgagaccaagctgaccggcgacgccttcgagctgtactgcgacgtggtgggcagccccacccccgagatccagtggtggtacgccgaggtgaacagagccgagagcttcagacagctgtgggacggcgccagaaagagaagagtgaccgtgaacaccgcctacggcagcaacggcgtgagcgtgctgagaatcaccagactgaccctggaggacagcggcacctacgagtgcagagccagcaacgaccccaagagaaacgacctgagacagaaccccagcatcacctggatcagagcccaggccaccatcagcgtgctgcagaagcccagaatcgtgaccagcgaggaggtgatcatcagagacagccccgtgctgcccgtgaccctgcagtgcaacctgaccagcagcagccacaccctgacctacagctactggaccaagaacggcgtggagctgagcgccaccagaaagaacgccagcaacatggagtacagaatcaacaagcccagagccgaggacagcggcgagtaccactgcgtgtaccacttcgtgagcgcccccaaggccaacgccaccatcgaggtgaaggccgcccccgacatcaccggccacaagagaagcgagaacaagaacgagggccaggacgccaccatgtactgcaagagcgtgggctacccccaccccgactggatctggagaaagaaggagaacggcatgcccatggacatcgtgaacaccagcggcagattcttcatcatcaacaaggagaactacaccgagctgaacatcgtgaacctgcagatcaccgaggaccccggcgagtacgagtgcaacgccaccaacgccatcggcagcgccagcgtggtgaccgtgctgagagtgagaagccacctggcccccctgtggcccttcctgggcatcctggccgagatcatcatcctggtggtgatcatcgtggtgtacgagaagagaaagagacccgacgaggtgcccgacgacgacgagcccgccggccccatgaagaccaacagcaccaacaaccacaaggacaagaacctgagacagagaaacaccaactag

SEQ ID NO: 174409 - protein, 403 aa, Artificial Sequence
  derived and/or modified sequence
MSGRVGDLSPRQKEALAKFRENVQDVLPALPNPDDYFLLRWLRARSFDLQKSEAMLRKHVEFRKQKDIDNIISWQPPEVIQQYLSGGMCGYDLDGCPVWYDIIGPLDAKGLLFSASKQDLLRTKMRECELLLQECAHQTTKLGRKVETITIIYDCEGLGLKHLWKPAVEAYGEFLCMFEENYPETLKRLFVVKAPKLFPVAYNLIKPFLSEDTRKKIMVLGANWKEVLLKHISPDQVPVEYGGTMTDPDGNPKCKSKINYGGDIPRKYYVRDQVKQQYEHSVQISRGSSHQVEYEILFPGCVLRWQFMSDGADVGFGIFLKTKMGERQRAGEMTEVLPNQRYNSHLVPEDGTLTCSDPGIYVLRFDNTYSFIHAKKVNFTVEVLLPDKASEEKMKQLGAGTPK

SEQ ID NO: 174410 - protein, 329 aa, Artificial Sequence
  derived and/or modified sequence
MLRKVIQQYLSGGMCGYDLDGCPVWYDIIGPLDAKGLLFSASKQDLLRTKMRECELLLQECAHQTTKLGRKVETITIIYDCEGLGLKHLWKPAVEAYGEFLCMFEENYPETLKRLFVVKAPKLFPVAYNLIKPFLSEDTRKKIMVLGANWKEVLLKHISPDQVPVEYGGTMTDPDGNPKCKSKINYGGDIPRKYYVRDQVKQQYEHSVQISRGSSHQVEYEILFPGCVLRWQFMSDGADVGFGIFLKTKMGERQRAGEMTEVLPNQRYNSHLVPEDGTLTCSDPGIYVLRFDNTYSFIHAKKVNFTVEVLLPDKASEEKMKQLGAGTPK

SEQ ID NO: 174411 - DNA, 1212 bp, Artificial Sequence
  derived and/or modified sequence
atgtccggacgcgttggcgacctttctccacggcagaaagaggccctggcaaagttccgtgagaacgtacaggacgtgctgccagctctgcctaatccagatgactatttccttcttcgatggcttagagcaaggtctttcgatctgcagaagtccgaagcaatgctccggaagcacgtcgaatttagaaagcagaaggacattgataatattatatcgtggcagcctcctgaggtgatccagcagtatctgagcgggggtatgtgcgggtacgacctggacggttgtcccgtctggtatgatattataggacccttagacgctaaggggcttctcttcagcgcctcaaagcaggacctgctgagaaccaagatgcgggaatgcgaactgctgctgcaggaatgtgcccaccagactaccaaacttggtcggaaagtcgagaccataaccataatctatgattgtgaggggctggggttgaaacatctgtggaagcccgcagtagaagcatacggggagtttctgtgtatgttcgaagagaattaccccgagactctgaagagactcttcgtagtaaaagctccaaaactgtttcctgtggcatacaacctgattaaaccatttctgagcgaggacacgcgcaaaaagataatggtgctgggagccaactggaaagaagtattattaaaacatatcagtccagatcaggtacctgtcgagtatggcggaacaatgaccgatccggacggaaacccaaaatgcaaatctaaaatcaactacggaggagacatcccgcgcaagtattatgtacgggaccaggtcaaacagcaatacgagcattccgtgcaaattagtcgggggtccagtcaccaggtagaatacgagattctgtttcccgggtgcgtcttgaggtggcagttcatgtctgatggcgcggatgtggggttcggaatatttctgaagacaaaaatgggggaacgacagagagcgggcgaaatgactgaggtgttgccaaaccaaagatacaacagtcacctggtgccagaagacggcacactcacttgctccgaccctggtatctatgtgctcagatttgacaacacctattctttcatccacgctaagaaggttaacttcacggtggaagtccttctgccagataaagctagcgaagaaaagatgaagcaactcggcgccggcaccccaaaatag

SEQ ID NO: 174412 - DNA, 1212 bp, Artificial Sequence
  derived and/or modified sequence
atgagcggccgggtgggggacctgagcccccggcagaaggaggccctggccaagttcagagaaaatgtgcaggatgtgctgcctgccctgcccaacccagatgactacttcctgctgcgctggctgcgggcccggagctttgacctgcagaagtctgaggccatgctgaggaagcacgtggagttcaggaagcagaaggacatcgacaacatcatctcctggcagcccccagaggtgatccagcagtacctgagcggcggcatgtgtggctatgacctggatggctgccctgtgtggtatgacatcatcggccccctggatgccaagggcctgctcttcagcgccagcaagcaggacctgctgcggaccaagatgagagaatgtgagctgctgctgcaggagtgtgcccaccagaccaccaagctgggcaggaaggtggagaccatcaccatcatctatgactgtgagggcctgggcctgaagcacctgtggaagccagctgtggaggcctatggagagttcctgtgcatgtttgaggagaactacccagagaccctgaagaggctgtttgtggtgaaggcccccaagctgtttcctgtggcctacaacctgatcaagcccttcctgtctgaggacaccaggaagaagatcatggtgctgggcgccaactggaaggaggtgctgctgaagcacatcagcccagaccaggtgcctgtggagtatggaggcaccatgacagatcctgatggcaaccccaagtgcaagagcaagatcaactacggcggggacatccccaggaagtactacgtgcgggaccaggtgaagcagcagtatgagcacagcgtgcagatcagccggggcagcagccaccaggtggagtatgagatcctcttccctggctgtgtgctgcgctggcagttcatgtctgatggagcagatgtgggcttcggcatcttcctgaagaccaagatgggagagcggcagagagctggggagatgacagaggtgctgcccaaccagcgctacaacagccacctggtgcctgaagatggcaccctgacctgcagcgaccccggcatctacgtgctgcgctttgacaacacctacagcttcatccacgccaagaaggtgaacttcaccgtggaggtgctgctgcctgacaaggccagcgaggagaagatgaagcagctgggcgccggcacccccaagtag

SEQ ID NO: 174413 - DNA, 1212 bp, Artificial Sequence
  derived and/or modified sequence
atgagcggccgggtgggcgacctgagcccccggcagaaggaggcccttgccaaattccgcgagaatgtgcaagacgtccttccagcattacccaaccctgacgactattttctccttaggtggcttagggcgaggtcttttgatctgcagaagtccgaggctatgttgcgtaagcatgtggaattccggaaacagaaagacattgataacatcatctcctggcagcctccagaagttatacagcagtatctttcgggcggtatgtgcggttacgatctggatggctgccctgtttggtacgatattattggacccctcgacgcgaaaggcctcctcttcagcgcctccaagcaggaccttctgaggacgaagatgagagagtgcgagctgttgctgcaggagtgcgctcatcaaacaaccaaactgggcagaaaggtggaaaccatcacaattatatacgactgcgaaggtctgggattgaaacacttatggaagccagccgtcgaagcctacggagaatttttgtgcatgtttgaggaaaattacccggagaccctcaagcggctcttcgttgtcaaggcccccaagctgttccctgttgcctataatctgatcaagccttttctctccgaggacactaggaaaaaaatcatggtgctcggggccaattggaaagaggttttgctcaagcacatcagtccggaccaggtacctgtggaatacggaggcacaatgacagatcccgacgggaatcctaaatgtaagagtaaaattaattatggtggtgatatcccccgcaaatattacgtgcgggaccaggtgaagcagcaatatgaacactctgtgcaaattagtagaggcagctctcaccaggtcgagtatgaaatcctgttcccagggtgtgtcctgagatggcagtttatgtcggatggtgctgacgtggggttcgggattttcctcaaaacgaaaatgggagagaggcagagagctggcgagatgaccgaggttttaccaaaccagcgctacaatagccatttggtcccagaagacggaaccctcacttgttcagacccaggaatatacgtacttcggttcgacaacacctattcattcattcacgcgaagaaggtgaatttcacagtggaggtacttcttccggataaggcgtcagaagagaagatgaaacagctgggagcaggaacacccaagtag

SEQ ID NO: 174414 - DNA, 1212 bp, Artificial Sequence
  derived and/or modified sequence
atgtcgggacgggtgggagaccttagtcccagacagaaagaagcactggcgaagtttagggagaatgtacaggacgtccttcccgctcttcctaacccggacgactactttctcctaaggtggcttagagcccgtagtttcgatctgcaaaaatctgaagccatgttacgcaagcacgtggaattccggaaacagaaagatatcgacaacataatctcctggcagcctccggaagtcatacaacagtatcttagcggtgggatgtgcgggtatgacctggacggatgcccggtttggtatgatattataggacccctggacgcaaaaggattgctgtttagcgcatccaagcaggatctcctccgtacaaaaatgagagagtgtgagttactcctgcaggagtgcgctcatcaaacgaccaaactgggcaggaaggtggagaccatcaccattatttacgattgcgagggcctagggctgaagcacctctggaaacccgctgttgaagcctatggtgaatttctgtgtatgtttgaggaaaactatcctgaaacgttaaagcggctattcgttgttaaggccccaaagttgtttcccgtggcttacaaccttatcaaaccctttttgtctgaggacacacgcaaaaagatcatggtgctgggcgcaaattggaaggaagtcctgctgaaacatatctcccccgatcaggttccagttgagtatggagggacaatgaccgatccagatgggaatcctaaatgtaagtccaagatcaattatggcggtgacatcccgaggaagtactatgtgcgggaccaagtcaagcagcagtacgaacacagtgtccaaatttcaagagggtcttcacaccaagtcgaatatgagattctgttcccaggttgtgtattacgatggcagtttatgagtgatggagccgatgtggggttcggcattttcctgaagactaagatgggagagagacagcgagcaggcgagatgacagaggtcttgccaaatcagaggtacaactcacatcttgtccccgaggatggcactctcacatgttccgatcccggaatttacgtgctcaggttcgataatacatacagcttcattcacgctaaaaaggtgaactttacagtggaggtgctcctcccagataaagcttcagaggaaaaaatgaaacaattgggtgctggcacgccaaaatag

SEQ ID NO: 174415 - DNA, 3679 bp, Artificial Sequence
  derived and/or modified sequence
acacttgctcgcctcctgcctgggtctctgacttcaggagggcggagggggcccgtgtcagagccttccgcgccccagcgcatcgctccctactccgcctctcgggatcctttaagaggcggggcttggctgccagctccgcggcccgggcaaaaggctgggactttactccgggtggcggcgaggacgagtctgtgctccatcagctgccgcacccgccgcctcccgcccccaaaccccatccccgcggttgagccacgatgagcggcagagtcggcgatctgagccccaggcagaaggaggcattggccaagtttcgggagaatgtccaggatgtgctgccggccctgccgaatccagatgactattttctcctgcgttggctccgagccagaagcttcgacctgcagaagtcggaggccatgctccggaagcatgtggagttccgaaagcaaaaggacattgacaacatcattagctggcagcctccagaggtgatccaacagtatctgtcagggggtatgtgtggctatgacctggatggctgcccagtctggtacgacataattggacctctggatgccaagggtctgctgttctcagcctccaaacaggacctgctgaggaccaagatgcgggagtgtgagctgcttctgcaagagtgtgcccaccagaccacaaagttggggaggaaggtggagaccatcaccataatttatgactgcgaggggcttggcctcaagcatctctggaagcctgctgtggaggcctatggagagtttctctgcatgtttgaggaaaattatcccgaaacactgaagcgtctttttgttgttaaagcccccaaactgtttcctgtggcctataacctcatcaaacccttcctgagtgaggacactcgtaagaagatcatggtcctgggagcaaattggaaggaggttttactgaaacatatcagccctgaccaggtgcctgtggagtatgggggcaccatgactgaccctgatggaaaccccaagtgcaaatccaagatcaactacgggggtgacatccccaggaagtattatgtgcgagaccaggtgaaacagcagtatgaacacagcgtgcagatttcccgtggctcctcccaccaagtggagtatgagatcctcttccctggctgtgtcctcaggtggcagtttatgtcagatggagcggatgttggttttgggattttcctgaagaccaagatgggagagaggcagcgggcaggggagatgacagaggtgctgcccaaccagaggtacaactcccacctggtccctgaagatgggaccctcacctgcagtgatcctggcatctatgtcctgcggtttgacaacacctacagcttcattcatgccaagaaggtcaatttcactgtggaggtcctgcttccagacaaagcctcagaagagaagatgaaacagctgggggcaggcaccccgaaataacaccttctcctatagcaggcctggccccctcagtgtctccctgtcaatttctaccccttgtagcagtcattttcgcacaaccctgaagcccaaagaaactgggctggaggacagacctcaggagctttcatttcagttaggcagaggaagagcgactgcagtgggtctccgtgtctatcaaatacctaaggagtccccaggagctggctggccatcgtgataggatctgtctgtcctgtaaactgtgccaacttcacctgtccagggacagcgaagctgggggtggcggggggcatgtaccacagggtggcagcagggaaaaaaattagaaaagggtgaaagattgggacttaacacttcagggaagtcagctgccggggagaaacttgctcctaaatgaacacataagtttagatcgcaatgaggagtagcagggtagctggttgctagagttacggtggggatcagaaactcttccaaacattttagcactgaggctggggtagcttttggcttttcccaggtctcaggaggtggcctgagtcagcacacatcttcccactcggtagacaggctggcctctccctcactttgagactttggcaactcctgggccacacggcctgcctctttgattactaatgattgtcagtgactcagagcttcctgggacttcgggtacccacccgctgttctccatgcaaacaaagcgccagggaaatgacccacagggatcgcagctgcagggagggccagggaggttgggggtgggagtgaatgctaaaagcagatcgtccagtgcccttttcagtgctaccggcctctcaccaagcagtcctccatgtgagcaaccccgagacaaaaatgctaagtgggatcaagagagcagcactcggagagggtgtttgccagtctgagtgtcccgcggtgcccgccaacccgcttcctgactgacctgagcaaggtcttactaagcagtcccatctctgtgggaggcatgcaacgcgtgcagggagttcaggtgccggtcggcgtagccaggcctggaggccccccaggcaggaggccgcccaaaggcggggccggcgtctcgcagactaggggctgggggcggccacagacggcctcgaaaccacagcccttaccccaatcccacgagccccgccaacgaaccacaggtgctgggctttagagaacatgggaaggcggccccagacctgcgggaacgcctttccctcagagccaggccccggccccgtctgggaagctcatcttgcgaagctgagggagctcagggcaaaggccaggctagcgcggaccggaaggggccgaggctgcacgggcctctgccagaacgctcaggacatcccggcctgggtttacaacgctgttaggaaaattaaccaatgaataaagcaacgttcagtgcgcagggagtgaaattcaatgcccaccgctaggctcctcgctgcctctcactcaagaggcccaaactcagacggcgtcagggacccggacccagcagccgtttcacgccaatagatagggcgcatgcgcagaaatcctcctcggctctctagcgtgagctttcccaaggggccacgcccagcttgccttctgattggtccagctggtgggttgtcttccgccatctttgatcagggcactaaggatgctccccacggccttcacagtgacggcggagaccctgccccgccagctgctcagtacgtgccgcgtagcccgtgcgagccaagtgtgagtccgggcgagcgcctgcggagctagcactgggcccagaatgagagggaggcggaggagcagcgatcacgtggttttagggactgtctaataattccacgccagcattgccggtgtttcagggggtgggaaccgctgcgttccccatcaacttttctcccacccaccaccctccccaacctacaagcccagctcagcttgaggtaactgctgaccggactgtcctatacagccctacaagacagaggcgcctagggctgaaagcgggggcctccgtagggagccagcgggggcctcaatagttactcattttctctacctttgatgaaaataagagctaattcttaataaggcctaccgggtatcacgcaaaaaccctgtgcttactattacactttgggttgttgcaaagattaaaggaaataagccgtgcaaagcgcttaaga

SEQ ID NO: 174416 - DNA, 2631 bp, Artificial Sequence
  derived and/or modified sequence
gctccgcggcccgggcaaaaggctgggactttactccgggtggcggcgaggacgagtctgtgctccatcagctgccgcacccgccgcctcccgcccccaaaccccatccccgcggttgagccacgatgagcggcagagtcggcgatctgagccccaggcagaaggaggcattggccaagccagaagcttcgacctgcagaagtcggaggccatgctccggaaggtgatccaacagtatctgtcagggggtatgtgtggctatgacctggatggctgcccagtctggtacgacataattggacctctggatgccaagggtctgctgttctcagcctccaaacaggacctgctgaggaccaagatgcgggagtgtgagctgcttctgcaagagtgtgcccaccagaccacaaagttggggaggaaggtggagaccatcaccataatttatgactgcgaggggcttggcctcaagcatctctggaagcctgctgtggaggcctatggagagtttctctgcatgtttgaggaaaattatcccgaaacactgaagcgtctttttgttgttaaagcccccaaactgtttcctgtggcctataacctcatcaaacccttcctgagtgaggacactcgtaagaagatcatggtcctgggagcaaattggaaggaggttttactgaaacatatcagccctgaccaggtgcctgtggagtatgggggcaccatgactgaccctgatggaaaccccaagtgcaaatccaagatcaactacgggggtgacatccccaggaagtattatgtgcgagaccaggtgaaacagcagtatgaacacagcgtgcagatttcccgtggctcctcccaccaagtggagtatgagatcctcttccctggctgtgtcctcaggtggcagtttatgtcagatggagcggatgttggttttgggattttcctgaagaccaagatgggagagaggcagcgggcaggggagatgacagaggtgctgcccaaccagaggtacaactcccacctggtccctgaagatgggaccctcacctgcagtgatcctggcatctatgtcctgcggtttgacaacacctacagcttcattcatgccaagaaggtcaatttcactgtggaggtcctgcttccagacaaagcctcagaagagaagatgaaacagctgggggcaggcaccccgaaataacaccttctcctatagcaggcctggccccctcagtgtctccctgtcaatttctaccccttgtagcagtcattttcgcacaaccctgaagcccaaagaaactgggctggaggacagacctcaggagctttcatttcagttaggcagaggaagagcgactgcagtgggtctccgtgtctatcaaatacctaaggagtccccaggagctggctggccatcgtgataggatctgtctgtcctgtaaactgtgccaacttcacctgtccagggacagcgaagctgggggtggcggggggcatgtaccacagggtggcagcagggaaaaaaattagaaaagggtgaaagattgggacttaacacttcagggaagtcagctgccggggagaaacttgctcctaaatgaacacataagtttagatcgcaatgaggagtagcagggtagctggttgctagagttacggtggggatcagaaactcttccaaacattttagcactgaggctggggtagcttttggcttttcccaggtctcaggaggtggcctgagtcagcacacatcttcccactcggtagacaggctggcctctccctcactttgagactttggcaactcctgggccacacggcctgcctctttgattactaatgattgtcagtgactcagagcttcctgggacttcgggtacccacccgctgttctccatgcaaacaaagcgccagggaaatgacccacagggatcgcagctgcagggagggccagggaggttgggggtgggagtgaatgctaaaagcagatcgtccagtgcccttttcagtgctaccggcctctcaccaagcagtcctccatgtgagcaaccccgagacaaaaatgctaagtgggatcaagagagcagcactcggagagggtgtttgccagtctgagtgtcccgcggtgcccgccaacccgcttcctgactgacctgagcaaggtcttactaagcagtcccatctctgtgggaggcatgcaacgcgtgcagggagttcaggtgccggtcggcgtagccaggcctggaggccccccaggcaggaggccgcccaaaggcggggccggcgtctcgcagactaggggctgggggcggccacagacggcctcgaaaccacagcccttaccccaatcccacgagccccgccaacgaaccacaggtgctgggctttagagaacatgggaaggcggccccagacctgcgggaacgcctttccctcagagccaggccccggccccgtctgggaagctcatcttgcgaagctgagggagctcagggcaaaggccaggctagcgcggaccggaaggggccgaggctgcacgggcctctgccagaacgctcaggacatcccggcctgggtttacaacgctgttaggaaaattaaccaatgaataaagcaacgttcagtgcg

SEQ ID NO: 174417 - DNA, 1212 bp, Artificial Sequence
  derived and/or modified sequence
atgagcggcagagtgggcgacctgagccccagacagaaggaggccctggccaagttcagagagaacgtgcaggacgtgctgcccgccctgcccaaccccgacgactacttcctgctgagatggctgagagccagaagcttcgacctgcagaagagcgaggccatgctgagaaagcacgtggagttcagaaagcagaaggacatcgacaacatcatcagctggcagccccccgaggtgatccagcagtacctgagcggcggcatgtgcggctacgacctggacggctgccccgtgtggtacgacatcatcggccccctggacgccaagggcctgctgttcagcgccagcaagcaggacctgctgagaaccaagatgagagagtgcgagctgctgctgcaggagtgcgcccaccagaccaccaagctgggcagaaaggtggagaccatcaccatcatctacgactgcgagggcctgggcctgaagcacctgtggaagcccgccgtggaggcctacggcgagttcctgtgcatgttcgaggagaactaccccgagaccctgaagagactgttcgtggtgaaggcccccaagctgttccccgtggcctacaacctgatcaagcccttcctgagcgaggacaccagaaagaagatcatggtgctgggcgccaactggaaggaggtgctgctgaagcacatcagccccgaccaggtgcccgtggagtacggcggcaccatgaccgaccccgacggcaaccccaagtgcaagagcaagatcaactacggcggcgacatccccagaaagtactacgtgagagaccaggtgaagcagcagtacgagcacagcgtgcagatcagcagaggcagcagccaccaggtggagtacgagatcctgttccccggctgcgtgctgagatggcagttcatgagcgacggcgccgacgtgggcttcggcatcttcctgaagaccaagatgggcgagagacagagagccggcgagatgaccgaggtgctgcccaaccagagatacaacagccacctggtgcccgaggacggcaccctgacctgcagcgaccccggcatctacgtgctgagattcgacaacacctacagcttcatccacgccaagaaggtgaacttcaccgtggaggtgctgctgcccgacaaggccagcgaggagaagatgaagcagctgggcgccggcacccccaagtag

SEQ ID NO: 174418 - protein, 775 aa, Artificial Sequence
  derived and/or modified sequence
MASAGHIITLLLWGYLLELWTGGHTADTTHPRLRLSHKELLNLNRTSIFHSPFGFLDLHTMLLDEYQERLFVGGRDLVYSLSLERISDGYKEIHWPSTALKMEECIMKGKDAGECANYVRVLHHYNRTHLLTCGTGAFDPVCAFIRVGYHLEDPLFHLESPRSERGRGRCPFDPSSSFISTLIGSELFAGLYSDYWSRDAAIFRSMGRLAHIRTEHDDERLLKEPKFVGSYMIPDNEDRDDNKVYFFFTEKALEAENNAHAIYTRVGRLCVNDVGGQRILVNKWSTFLKARLVCSVPGMNGIDTYFDELEDVFLLPTRDHKNPVIFGLFNTTSNIFRGHAICVYHMSSIRAAFNGPYAHKEGPEYHWSVYEGKVPYPRPGSCASKVNGGRYGTTKDYPDDAIRFARSHPLMYQAIKPAHKKPILVKTDGKYNLKQIAVDRVEAEDGQYDVLFIGTDNGIVLKVITIYNQEMESMEEVILEELQIFKDPVPIISMEISSKRQQLYIGSASAVAQVRFHHCDMYGSACADCCLARDPYCAWDGISCSRYYPTGTHAKRRFRRQDVRHGNAAQQCFGQQFVGDALDKTEEHLAYGIENNSTLLECTPRSLQAKVIWFVQKGRETRKEEVKTDDRVVKMDLGLLFLRLHKSDAGTYFCQTVEHSFVHTVRKITLEVVEEEKVEDMFNKDDEEDRHHRMPCPAQSSISQGAKPWYKEFLQLIGYSNFQRVEEYCEKVWCTDRKRKKLKMSPSKWKYANPQEKKLRSKPEHYRLPRHTLDS

SEQ ID NO: 174419 - protein, 715 aa, Artificial Sequence
  derived and/or modified sequence
MLLDEYQERLFVGGRDLVYSLSLERISDGYKEIHWPSTALKMEECIMKGKDAGECANYVRVLHHYNRTHLLTCGTGAFDPVCAFIRVGYHLEDPLFHLESPRSERGRGRCPFDPSSSFISTLIGSELFAGLYSDYWSRDAAIFRSMGRLAHIRTEHDDERLLKEPKFVGSYMIPDNEDRDDNKVYFFFTEKALEAENNAHAIYTRVGRLCVNDVGGQRILVNKWSTFLKARLVCSVPGMNGIDTYFDELEDVFLLPTRDHKNPVIFGLFNTTSNIFRGHAICVYHMSSIRAAFNGPYAHKEGPEYHWSVYEGKVPYPRPGSCASKVNGGRYGTTKDYPDDAIRFARSHPLMYQAIKPAHKKPILVKTDGKYNLKQIAVDRVEAEDGQYDVLFIGTDNGIVLKVITIYNQEMESMEEVILEELQIFKDPVPIISMEISSKRQQLYIGSASAVAQVRFHHCDMYGSACADCCLARDPYCAWDGISCSRYYPTGTHAKRRFRRQDVRHGNAAQQCFGQQFVGDALDKTEEHLAYGIENNSTLLECTPRSLQAKVIWFVQKGRETRKEEVKTDDRVVKMDLGLLFLRLHKSDAGTYFCQTVEHSFVHTVRKITLEVVEEEKVEDMFNKDDEEDRHHRMPCPAQSSISQGAKPWYKEFLQLIGYSNFQRVEEYCEKVWCTDRKRKKLKMSPSKWKYANPQEKKLRSKPEHYRLPRHTLDS

SEQ ID NO: 174420 - protein, 766 aa, Artificial Sequence
  derived and/or modified sequence
MASAGHIITLLLWGYLLELWTGGHTADTTHPRLRLSHKELLNLNRTSIFHSPFGFLDLHTMLLDEYQERLFVGGRDLVYSLSLERISDGYKEIHWPSTALKMEECIMKGKDAGECANYVRVLHHYNRTHLLTCGTGAFDPVCAFIRVGYHLEDPLFHLESPRSERGRGRCPFDPSSSFISTLIGSELFAGLYSDYWSRDAAIFRSMGRLAHIRTEHDDERLLKEPKFVGSYMIPDNEDRDDNKVYFFFTEKALEAENNAHAIYTRVGRLCVNDVGGQRILVNKWSTFLKARLVCSVPGMNGIDTYFDELEDVFLLPTRDHKNPVIFGLFNTTSNIFRGHAICVYHMSSIRAAFNGPYAHKEGPEYHWSVYEGKVPYPRPGSCASKVNGGRYGTTKDYPDDAIRFARSHPLMYQAIKPAHKKPILVKTDGKYNLKQIAVDRVEAEDGQYDVLFIGTDNGIVLKVITIYNQEMESMEEVILEELQIFKDPVPIISMEISSKRQQLYIGSASAVAQVRFHHCDMYGSACADCCLARDPYCAWDGISCSRYYPTGTHAKRRFRRQDVRHGNAAQQCFGQQFVGDALDKTEEHLAYGIENNSTLLECTPRSLQAKVIWFVQKGRETRKEEVKTDDRVVKMDLGLLFLRLHKSDAGTYFCQTVEHSFVHTVRKITLEVVEEEKVEDMFNKDDEEDRHHRMPCPAQSSISQGAKPWYKEFLQLIGYSNFQRVEEYCEKVWCTDRKRKKLKMSPSKWKYANPQHYRLPRHTLDS

SEQ ID NO: 174421 - DNA, 2328 bp, Artificial Sequence
  derived and/or modified sequence
atggccagtgccggacacatcattacattgttgttatggggatatctgctggagctctggacaggaggacacaccgcggacacgacacatcccaggctgaggctgtcccacaaggagttgctcaacctgaacaggacatcaatcttccactccccatttgggttcctggatttacatacaatgttgctggacgagtatcaggagcggcttttcgtaggaggtcgcgacctggtttacagtctgtcgcttgagagaatcagcgacggatacaaagagatacactggcccagtacggctctgaaaatggaagagtgcattatgaagggcaaagacgccggagagtgcgcgaactacgtgcgagtcctgcaccattataaccgaacccatcttctgacctgtggcaccggtgcatttgacccagtttgtgcattcattcgcgtcggttatcacctcgaggatcctctgttccatctggaatcaccccgctctgaacggggcaggggccgctgtccattcgacccctcatccagcttcatcagcaccctcatcggcagcgagctgttcgccgggctgtactccgactattggtccagagatgccgccatttttcgcagtatgggaagactggctcacatacgtaccgaacatgatgatgaacggctcctcaaagagcccaaatttgttggatcttacatgatacctgacaacgaagatagggacgacaataaagtgtatttcttcttcactgagaaagctttggaagccgaaaataatgcccatgccatttacactagagtgggccggctttgcgtcaatgacgtgggcggtcagaggatcctcgtgaacaaatggagcacattcctcaaggcacgattggtatgctctgtcccgggaatgaacggaatcgatacatactttgatgagctggaggatgtgtttctcctgcccacgcgggaccacaagaaccccgtcatttttggattgtttaatacgaccagcaacatctttaggggacacgctatctgtgtataccacatgtcgagcattagggcggcctttaacgggccctacgcacataaggagggaccggaatatcactggtccgtttacgaggggaaagtgccgtacccgcggccaggatcatgtgcctcaaaagttaatggtggacggtatgggacgaccaaggactacccagacgatgcaatcaggttcgctcggagtcaccccctgatgtaccaggctattaagcctgcacacaagaaacccatcctcgtcaaaacagatggtaagtataacctcaagcagatcgccgttgaccgggtcgaggcagaggatggccaatatgacgtcctctttattggcacagacaacggcatagttctgaaagtgatcactatttataaccaagaaatggaaagtatggaggaggtgatcttagaggagttgcagatattcaaggaccccgtaccaatcatctccatggagattagctctaagaggcaacagctgtacataggaagtgctagcgctgtcgctcaggtgaggttccaccattgcgacatgtatggaagtgcttgcgccgattgttgcttggcacgggatccctattgcgcttgggatggaatctcctgttcacgctattaccccacaggtacccatgcaaaacggaggttcagacgccaggatgtaaggcatgggaacgcggctcagcagtgctttggacaacaatttgtgggcgatgcccttgacaagaccgaggaacatttggcctacgggattgagaataactctacactgctggaatgcacgccacgttcactgcaggccaaagtgatatggttcgtccaaaaaggtagagaaacaagaaaggaagaggtcaagacggatgatagggtggtgaaaatggatcttgggctcctcttcctcaggctgcacaaatctgatgctggtacttatttttgtcagactgtggaacactccttcgtccatactgttagaaagatcacactggaggttgttgaagaggagaaggtcgaggacatgtttaataaggatgatgaggaagataggcaccatcgtatgccatgcccagcccaaagctcgatatcgcagggagctaaaccttggtacaaggagtttctgcaactgataggctactctaacttccagcgggttgaagaatactgcgagaaagtgtggtgcacggataggaagcggaagaaattgaaaatgtcgccctcaaagtggaaatacgctaatccccaggagaagaagctgcgttctaagccggagcactatagacttcctcgccatacactcgactcatag

SEQ ID NO: 174422 - DNA, 2301 bp, Artificial Sequence
  derived and/or modified sequence
atggcctctgcaggacatataatcactctgctcctgtgggggtatctcttggaactgtggaccggcgggcatactgcggacacaacccacccaagactgagactctctcataaagaactgctgaatcttaatagaacaagcattttccactcaccgtttggtttcctcgacctgcatacgatgctgttggatgaatatcaggagcggctctttgtaggcggacgtgatctcgtctactccctgtctcttgagaggatttctgacgggtacaaggagatacattggccatctactgccctaaaaatggaggaatgcatcatgaaaggtaaagacgccggcgagtgtgcaaactatgtccgcgtgcttcaccactacaatcgaacccacctgctgacatgcgggacaggggcatttgaccccgtttgcgcattcatcagggtcggataccatcttgaagacccactttttcacctggaaagccccagatcagagagggggcgggggcgctgtccattcgatccttcatcctccttcatttccaccctgattggaagcgagctcttcgctgggctgtattcagactattggtcccgtgacgctgccatatttcggtcaatgggcagactggcccatataaggacagagcacgacgatgagcgcctgctcaaagaacctaaattcgtcggtagttacatgattccagacaacgaagacagagacgacaacaaagtgtatttttttttcaccgaaaaggccctcgaagccgaaaacaacgctcatgccatttacacacgggtcggcagactgtgcgtgaacgatgtggggggccagcgtattctggtgaataaatggtccaccttcctgaaggcgagactggtttgttcagtgcctgggatgaacggaatcgatacctatttcgatgagcttgaggacgtatttctcctgccaactagggaccacaaaaacccagtaatcttcggactgttcaacaccacctccaatatatttaggggtcacgctatttgcgtctatcatatgagttccatacgagcagcatttaatggaccttacgcccacaaggaaggcccggaatatcactggagcgtgtacgaaggaaaagttccctaccccagacctggatcttgcgcaagtaaagtgaatggagggagatacggcaccacaaaggactatcccgatgacgccattcgctttgcacggtcacaccctctcatgtatcaggccataaaacccgctcataagaagccaatcctggtgaaaactgacggaaaatacaatttgaagcagattgccgtggacagagttgaggcagaggatgggcagtatgacgtcttgttcatcgggaccgacaatggcatcgtattaaaggtcatcacaatctataaccaagagatggagtccatggaagaagttatactcgaagagttgcagatttttaaagatcccgttcctattatctccatggagatctcatctaagcgacaacaactttatattgggtctgcttctgccgtggcccaggttaggttccatcactgcgatatgtatggtagcgcctgcgcagactgctgtctagcaagagacccttattgcgcatgggatggtatctcctgcagccgatactatcctacagggacacatgctaaacggaggtttcgcaggcaagacgtgcgccacggcaacgctgcccagcaatgctttggacagcagtttgtgggcgacgccctggacaagactgaagaacatctagcctatgggatcgagaataactcaacgttgttagagtgcacgccgagatcgttacaggctaaggtcatttggtttgtgcagaaggggcgcgaaacaaggaaagaggaagttaagacagacgatcgcgtggtgaaaatggacctcggacttttatttctaagactacacaagagcgatgctgggacctacttttgtcagaccgtggagcattcatttgtacacaccgtacggaagatcaccttggaggtggtggaggaggagaaagtggaagatatgtttaacaaggacgatgaagaagatagacatcacagaatgccatgcccagcacagtccagcatatctcaaggggctaagccatggtataaggaatttctccagttgatcgggtacagcaatttccaaagggtagaagaatactgtgaaaaggtctggtgtaccgatcgaaaacgtaagaaactgaagatgtccccgagtaaatggaagtacgccaatcctcagcattatcggctccctcggcacaccctcgattcctag

SEQ ID NO: 174423 - DNA, 2328 bp, Artificial Sequence
  derived and/or modified sequence
atggccagcgctggccacatcatcaccctgctgctgtggggctacctgctggagctgtggacaggaggccacacagctgacaccacccacccccggctgcggctgagccacaaggagctgctgaacctgaacagaaccagcatcttccacagccccttcggcttcctggacctgcacaccatgctgctggatgagtaccaggagcggctgtttgtgggcggccgggacctggtgtacagcctgagcctggagcgcatcagtgatggctacaaggagatccactggcccagcacagccctgaagatggaggagtgcatcatgaagggcaaggatgctggggagtgtgccaactacgtgcgggtgctgcaccactacaacagaacccacctgctgacctgtggcactggagcctttgatcctgtgtgtgccttcatccgggtgggctaccacctggaggaccccctcttccacctggagagccccaggtctgagcggggccggggccgctgcccctttgaccccagcagcagcttcatcagcaccctgattggcagcgagctgtttgctggcctgtacagcgactactggagcagagatgctgccatcttccgctccatgggccgcctggcccacatcagaacagaacatgatgatgagcggctgctgaaggagcccaagtttgtgggcagctacatgatcccagacaatgaagatagagatgacaacaaggtgtacttcttcttcacagagaaggccctggaggccgagaacaatgcccacgccatctacaccagggtgggccgcctgtgtgtgaatgatgtgggcggccagaggatcctggtgaacaagtggagcaccttcctgaaggcccggctggtgtgcagcgtgcccggcatgaatggcatcgacacctactttgatgagctggaggatgtgttcctgctgcccacccgggaccacaagaaccctgtgatcttcggcctcttcaacaccaccagcaacatcttccggggccacgccatctgtgtgtaccacatgagcagcatccgggccgccttcaacggcccctatgcccacaaggagggccctgagtaccactggagcgtgtatgagggcaaggtgccctaccccaggcctggcagctgtgccagcaaggtgaatggaggccgctatggcaccaccaaggactacccagatgatgccatccgctttgcccggagccaccccctgatgtaccaggccatcaagccagcccacaagaagcccatcctggtgaagacagatggcaagtacaacctgaagcagattgctgtggacagagtggaggccgaggatggccagtatgatgtgctcttcatcggcacagacaatggaattgtgctgaaggtgatcaccatctacaaccaggagatggagagcatggaggaggtgatcctggaggagctgcagatcttcaaggaccctgtgcccatcatctccatggagatcagcagcaagaggcagcagctgtacatcggcagcgccagcgctgtggcccaggtgcgcttccaccactgtgacatgtatggcagcgcctgtgccgactgctgcctggcccgggacccctactgtgcctgggatggcatcagctgcagccgctactaccccaccggcacccacgccaagaggcgcttccggcggcaggatgtgagacatggaaatgctgcccagcagtgcttcggccagcagtttgtgggagatgccctggacaagacagaggagcacctggcctatggaattgagaacaacagcaccctgctggagtgcacccccaggagcctgcaggccaaggtgatctggtttgtgcagaagggccgggagaccaggaaggaggaggtgaagacagatgacagagtggtgaagatggacctgggcctgctcttcctgcggctgcacaagagtgatgctggcacctacttctgccagacagtggagcacagctttgtgcacacagtgaggaagatcaccctggaggtggtggaggaggagaaggtggaggacatgttcaacaaggatgatgaggaggacagacaccacaggatgccctgcccagcccagagcagcatcagccagggcgccaagccctggtacaaggagttcctgcagctgattggctacagcaacttccagagggtggaggagtactgtgagaaggtgtggtgcacagacaggaagaggaagaagctgaagatgagccccagcaagtggaagtatgccaacccccaggagaagaagctgcggagcaagccagagcactaccgcctgcccaggcacaccctggacagctag

SEQ ID NO: 174424 - DNA, 2301 bp, Artificial Sequence
  derived and/or modified sequence
atggccagcgctggccacatcatcaccctgctgctgtggggctacctgctggagctgtggacaggaggccacacagctgacaccacccacccccggctgcggctgagccacaaggagctgctgaacctgaacagaaccagcatcttccacagccccttcggcttcctggacctgcacaccatgctgctggatgagtaccaggagcggctgtttgtgggcggccgggacctggtgtacagcctgagcctggagcgcatcagtgatggctacaaggagatccactggcccagcacagccctgaagatggaggagtgcatcatgaagggcaaggatgctggggagtgtgccaactacgtgcgggtgctgcaccactacaacagaacccacctgctgacctgtggcactggagcctttgatcctgtgtgtgccttcatccgggtgggctaccacctggaggaccccctcttccacctggagagccccaggtctgagcggggccggggccgctgcccctttgaccccagcagcagcttcatcagcaccctgattggcagcgagctgtttgctggcctgtacagcgactactggagcagagatgctgccatcttccgctccatgggccgcctggcccacatcagaacagaacatgatgatgagcggctgctgaaggagcccaagtttgtgggcagctacatgatcccagacaatgaagatagagatgacaacaaggtgtacttcttcttcacagagaaggccctggaggccgagaacaatgcccacgccatctacaccagggtgggccgcctgtgtgtgaatgatgtgggcggccagaggatcctggtgaacaagtggagcaccttcctgaaggcccggctggtgtgcagcgtgcccggcatgaatggcatcgacacctactttgatgagctggaggatgtgttcctgctgcccacccgggaccacaagaaccctgtgatcttcggcctcttcaacaccaccagcaacatcttccggggccacgccatctgtgtgtaccacatgagcagcatccgggccgccttcaacggcccctatgcccacaaggagggccctgagtaccactggagcgtgtatgagggcaaggtgccctaccccaggcctggcagctgtgccagcaaggtgaatggaggccgctatggcaccaccaaggactacccagatgatgccatccgctttgcccggagccaccccctgatgtaccaggccatcaagccagcccacaagaagcccatcctggtgaagacagatggcaagtacaacctgaagcagattgctgtggacagagtggaggccgaggatggccagtatgatgtgctcttcatcggcacagacaatggaattgtgctgaaggtgatcaccatctacaaccaggagatggagagcatggaggaggtgatcctggaggagctgcagatcttcaaggaccctgtgcccatcatctccatggagatcagcagcaagaggcagcagctgtacatcggcagcgccagcgctgtggcccaggtgcgcttccaccactgtgacatgtatggcagcgcctgtgccgactgctgcctggcccgggacccctactgtgcctgggatggcatcagctgcagccgctactaccccaccggcacccacgccaagaggcgcttccggcggcaggatgtgagacatggaaatgctgcccagcagtgcttcggccagcagtttgtgggagatgccctggacaagacagaggagcacctggcctatggaattgagaacaacagcaccctgctggagtgcacccccaggagcctgcaggccaaggtgatctggtttgtgcagaagggccgggagaccaggaaggaggaggtgaagacagatgacagagtggtgaagatggacctgggcctgctcttcctgcggctgcacaagagtgatgctggcacctacttctgccagacagtggagcacagctttgtgcacacagtgaggaagatcaccctggaggtggtggaggaggagaaggtggaggacatgttcaacaaggatgatgaggaggacagacaccacaggatgccctgcccagcccagagcagcatcagccagggcgccaagccctggtacaaggagttcctgcagctgattggctacagcaacttccagagggtggaggagtactgtgagaaggtgtggtgcacagacaggaagaggaagaagctgaagatgagccccagcaagtggaagtatgccaacccccagcactaccgcctgcccaggcacaccctggacagctag

SEQ ID NO: 174425 - DNA, 2328 bp, Artificial Sequence
  derived and/or modified sequence
atggccagcgccggccacatcatcaccctgctgctgtggggctaccttctagagttgtggaccggagggcacaccgctgatacgacccatcccagactccgactcagccataaggagctcctgaacctgaataggactagcatatttcatagcccctttggcttcctggacctccacaccatgctcctggatgagtaccaggagcgcttgttcgtcggcggtcgggacctggtctactccctgagcttagaacgcatctctgacggctacaaagagattcactggccctctaccgcgctcaagatggaggagtgcattatgaagggcaaagatgctggtgagtgtgccaactatgtcagggtgctgcaccactacaatcgcacacacctcctcacttgcggtacaggggctttcgatcctgtgtgcgcttttattcgtgtgggatatcatttagaggatcctctgttccacctggaaagtccacgctccgagcgtggtaggggccggtgtcctttcgatccaagctcctcattcatctctacattaattggatccgagctgttcgccggtctttattcagactattggtctcgcgatgctgcgatttttagaagtatgggacgcctggctcatatcagaaccgaacacgatgacgagcgcctgctgaaagaacctaagttcgtgggttcatacatgatccctgacaatgaagatcgggatgataacaaagtttatttctttttcacagagaaggcccttgaggcagaaaataatgctcacgccatttacacaagagtaggtaggctctgtgtgaatgatgtggggggccaacggatactggtgaataagtggtccactttcttaaaagcccgcctggtatgttcagtacctggcatgaacggcattgacacatattttgacgaattagaggatgttttcctgctacctacacgggaccataagaaccccgtaatattcggcctgttcaataccacgagtaatatctttagagggcatgccatctgcgtttaccacatgagcagcatacgcgctgcttttaatgggccatacgctcataaagaaggacccgaataccattggtccgtctacgaaggtaaggtaccctatcctcgtcccggatcatgcgctagcaaggttaacggcgggagatacggaaccaccaaggattacccagacgacgccattcggttcgctaggtcccacccacttatgtaccaagcaataaagcccgcgcataaaaagccaatccttgtcaagactgacggaaaatacaacctgaagcagattgccgttgaccgcgtcgaagcggaagatggccagtatgacgtgctcttcatcggcacggacaacggtatagtcctaaaggtgattacaatctacaaccaggagatggaatctatggaagaggtcattctggaggagttgcagatattcaaggatccagtgccaatcataagcatggaaatttcaagcaaacgacaacaactgtacattggcagcgccagtgccgtagctcaagttcgctttcaccattgtgacatgtacggatccgcctgcgccgattgctgcctggctcgggatccttactgcgcttgggatggcatttcttgcagccgatactaccctaccggtacccatgcaaagagacgattccgcaggcaagatgtgcgacacgggaacgcggcccaacagtgttttggtcagcagttcgtgggtgacgccctggacaaaacggaggagcaccttgcttatggaatcgagaacaacagcacattgctcgagtgtaccccgcgctcactccaggctaaggtgatatggtttgtccagaaaggtcgagaaacacggaaagaggaggttaagacagatgaccgggtcgttaagatggatctcgggctgctgttcctgagattgcataagtcagatgcaggtacgtacttctgccaaaccgtggagcactccttcgtgcacactgtgcgcaagatcactctggaggtcgtggaagaggagaaggtcgaagatatgttcaacaaagatgacgaagaagataggcatcaccgcatgccttgtcctgctcaatcttctattagtcagggggccaagccttggtacaaagaattccttcagctgattggatatagcaattttcagcgggtggaagaatattgtgaaaaggtgtggtgtaccgaccgcaaaagaaaaaaattaaaaatgtccccaagtaaatggaagtacgcaaatcctcaggagaaaaaacttcgcagcaaaccggaacattaccgcctaccgcggcatacattggatagttag

SEQ ID NO: 174426 - DNA, 2301 bp, Artificial Sequence
  derived and/or modified sequence
atggccagcgccggccacatcatcaccctgctgctgtggggctacttactggagctgtggacaggtggacacactgcagacacaacccacccacggctcagactttctcacaaagaactgcttaatctgaatcggacctcaatcttccacagcccctttggttttttggatcttcacactatgctcctggacgagtatcaggagaggctgttcgttgggggacgtgatttggtttacagcctgtccctagagaggattagcgacgggtataaagaaatacactggcccagcacggccttgaaaatggaagaatgtattatgaaaggcaaggatgctggagaatgcgccaactatgtacgcgtcctccaccattacaaccgaacccatctgctcacctgtggcacgggcgcctttgacccggtgtgcgcgttcattagagtgggttaccatcttgaagaccctctgtttcacctggagagcccacgtagcgaacggggacgagggaggtgtccctttgacccatcttcgagcttcataagtaccctgattggctctgaactcttcgcaggcctgtacagtgactactggagcagagatgcagcaatctttagatccatgggaagactcgcacacatccggacggaacacgacgatgagaggttgctcaaagaacctaaattcgttgggtcttacatgatccctgataacgaggaccgagacgacaacaaggtctacttcttctttactgagaaagctctggaggcagaaaataacgctcatgccatttataccagagtggggaggctgtgcgtgaatgacgtgggcggtcaacgtatactggtcaataagtggagcacatttttgaaagcccgactggtctgcagtgtgcccggtatgaatggcatagacacttacttcgatgaactagaagatgtgttcctgctgccaaccagagatcataagaaccctgtgattttcggactgttcaacactacttccaatatttttcggggccatgcaatctgtgtgtatcacatgagctccattcgagccgcatttaacggaccctacgcccacaaagaagggccagagtatcattggtccgtctacgagggtaaagtgccatatcctcgcccgggttcttgcgcttctaaagtcaacggaggcaggtacgggactaccaaggattaccctgacgacgccattaggttcgctagaagccacccattgatgtatcaagccataaaaccagcacataagaagccaatcctggttaaaaccgacggcaagtacaacctaaagcaaattgccgtggacagagtagaagcagaagatggacagtatgatgtgctgtttattggaaccgacaatggaatcgttttgaaagtgatcacgatctataaccaggaaatggagagcatggaggaagtgatactggaggagctgcaaatatttaaagatcctgttcctataatctcgatggaaatttcttcaaagaggcaacaactctacatcggatcagcatcggcagtggcacaggtgcggttccatcattgtgacatgtacggaagcgcgtgcgcggactgctgcctagcccgagacccatactgcgcttgggatggcatcagctgctcgaggtattaccccactgggacccatgccaaacgacgattcaggagacaggacgtgaggcatggcaacgcagcccagcagtgctttggccagcaatttgtgggagacgcactggacaaaacagaagaacatctggcttatgggatagaaaacaatagcaccctcctggagtgcacgccgcggtccctgcaagctaaagtaatatggttcgtacaaaagggccgcgaaactcggaaagaagaagttaaaaccgacgatagggtggtaaaaatggacctcggtttactgtttcttcgcttacacaagagtgatgccggaacttatttttgccagaccgttgagcattctttcgtgcacacggtgagaaaaattacccttgaagtcgttgaagaggagaaggtggaggacatgttcaataaagacgacgaagaggaccggcaccaccgcatgccctgtcccgctcagagctcaatcagtcaaggtgcaaagccttggtacaaagagttcttgcagcttatcgggtactctaatttccaacgcgttgaggagtactgtgaaaaggtgtggtgtaccgatcgcaaacggaagaaactgaaaatgtccccctctaagtggaaatatgccaatccccagcactacaggctcccacgccacacccttgactcatag

SEQ ID NO: 174427 - DNA, 2328 bp, Artificial Sequence
  derived and/or modified sequence
atggcctctgctggtcatattattaccctacttctctggggttacctcctggagctgtggacaggaggccacacagcagataccactcaccccaggttaagattgagccataaggaattactgaacctgaatcgcacaagcatcttccactcacccttcggcttccttgacttgcacactatgctcctcgacgagtatcaggagagactttttgtggggggaagagacctagtgtactcactgtcgctggaacgtatttccgacggctataaggaaattcattggccttccactgcccttaagatggaagaatgcattatgaaaggcaaagatgctggggaatgtgcaaattatgtgagggtcttacatcattataacaggacgcaccttctgacctgtggaaccggtgcattcgaccctgtatgcgcattcattagggtcggctatcatcttgaggaccctctgttccatctggagtcgcccagatctgagcgcggtagggggagatgtccattcgacccttctagttcgttcatctctaccctaatcgggtccgaactttttgccggactgtactctgactattggtctcgcgacgctgccattttcaggtctatgggcaggctcgctcacatcaggacagagcacgatgatgaacgcttgctcaaagagccgaaatttgtcggctcatacatgatccccgacaacgaggaccgggacgataataaagtgtacttcttttttactgagaaagctctcgaggctgaaaacaacgcgcatgccatctacacacgcgtgggacgactgtgcgttaatgatgtgggaggtcaaaggattctggttaataagtggtccacctttttgaaagcccgtctcgtctgcagtgttcctggcatgaacgggatagacacatactttgacgaattggaagacgtttttctgttgcccacacgcgaccacaagaacccagtcatattcggtctgtttaacactacaagtaacatcttcagaggacatgcaatctgcgtctatcacatgtccagcattagggctgcattcaacggtccgtacgcccataaggagggtccggagtatcattggtcggtctacgaaggcaaagttccctacccaagaccaggatcttgtgcctcaaaggtgaatggcggacgatacgggactaccaaggattatcccgacgacgcgatcagatttgccagatcacaccccctcatgtatcaagccatcaaacccgcacataaaaagccaatcctggtaaagactgatggcaaatataacctgaaacaaatagctgtagaccgggttgaagctgaggacgggcaatacgatgtcctctttatcgggacagataatggaattgtgctgaaggttattacaatctataatcaggagatggagagtatggaggaagttattctggaggagctacagatttttaaagaccctgtgcccatcatatcaatggaaatctcttcaaaaagacagcaactgtatatcggcagcgcttctgcggtcgctcaggtcaggttccatcactgtgatatgtatggctccgcctgcgctgattgctgcctggccagggacccttattgcgcttgggatggcatatcatgttcccgctactacccgacaggaacccatgccaaacggcgttttagacgccaggatgtgcggcacgggaacgcagcacagcagtgtttcgggcagcagttcgtaggcgacgcactcgataagaccgaagaacacctcgcttatggtatcgagaataattcaactctcttggagtgcacacccagaagtctccaggcaaaggtgatatggttcgtccaaaaaggccgagaaacacgtaaggaggaggtgaagacagacgatagagtcgtaaaaatggatctggggctgctgttcctgaggctgcataagtcagacgctggcacctacttctgccagactgtggagcattcctttgttcatacggtgaggaaaatcacactagaggttgttgaagaagagaaggttgaagacatgttcaacaaggatgatgaggaggacaggcaccaccgcatgccttgtcccgctcagtcctcaatctcccaaggcgcaaaaccgtggtataaggaattcctccagctgatcgggtatagtaactttcaaagagtggaggagtactgcgagaaggtgtggtgtactgaccgtaaaaggaaaaagctcaaaatgagcccctcaaaatggaaatacgcaaaccctcaggaaaagaaattgcgaagcaagcctgaacactaccgactgccgaggcacaccctagattcttag

SEQ ID NO: 174428 - DNA, 2301 bp, Artificial Sequence
  derived and/or modified sequence
atggcgtccgcaggccatataatcacattactactttggggctacctgttagagttatggaccggaggtcatacagctgataccactcaccctcggctgcgcctgtcacacaaagaattacttaacttgaacaggacctctatattccactctcctttcggcttcttggacttgcatactatgctcctcgatgagtaccaagagaggctgtttgttgggggaagagacctggtgtactctctctccctagagagaatcagcgatggttacaaggaaattcactggccaagcaccgccctgaaaatggaggaatgtatcatgaagggaaaagacgccggtgaatgcgcgaactatgtccgggtccttcatcactataacaggactcatctgttgacctgtggaaccggcgctttcgaccccgtgtgcgccttcatacgagtcggctatcatttggaagatcccttgttccacctcgaaagtcccagaagcgagagagggcgaggacggtgccccttcgatccgagtagctctttcatctcgacattgatcggctccgaattattcgccggtctgtattcagactattggagccgagacgctgctattttcaggtccatggggaggctcgcccatattcgcacagaacacgacgacgagcggctgctgaaggagcccaagttcgtgggctcctatatgatcccagataacgaagacagggacgacaacaaggtgtacttttttttcacggagaaagcgttggaagcagagaacaacgcacacgcaatctatacccgcgtcggcaggctgtgcgtaaatgatgtggggggacagcgtatccttgtgaataagtggagcacctttttgaaggccaggctggtatgctcagtccctggcatgaatggcattgacacctactttgatgaactggaggatgtgttcttacttcctactagagaccacaagaatccagtcatttttggcttgtttaatacaaccagcaacatcttcaggggacatgctatttgcgtatatcacatgagttcgatcagggccgcattcaacgggccatacgctcataaagagggaccggaatatcactggtccgtttacgaggggaaagtcccatacccaaggcccggaagttgcgcttccaaggtgaatggaggacggtatggaacaaccaaagattaccccgacgacgctattcgtttcgccaggagccaccccctgatgtaccaggccattaagcctgctcacaaaaagccaattcttgtgaagactgatgggaaatataatctcaaacagattgccgttgatcgagtggaggctgaagacgggcagtacgacgtgttgttcattggtacagacaacggaatagtgctgaaagtgatcaccatctataatcaggagatggaatctatggaagaagtcattcttgaagaactgcagatctttaaggatccagtgcccataatatcaatggagatcagtagcaagaggcagcagctgtatattggttccgcctccgcagtggcccaggtgagattccaccactgcgacatgtacggttcagcgtgtgcagactgctgtctcgcacgcgatccttactgcgcatgggacggtattagttgttcaaggtactatcctacgggaacacacgccaagcgcagatttcgtcgtcaggatgtgaggcatggaaacgccgctcagcagtgtttcggccagcagtttgtaggcgatgctcttgataagaccgaagaacacttggcctatggaattgaaaacaacagtacgctgctggagtgtaccccccgatccctacaggcaaaagtgatttggtttgtccagaaaggccgtgaaacccgaaaagaagaagtgaagaccgacgaccgggtagttaaaatggacttagggcttctcttcctgagattgcacaaatccgacgctggtacatatttttgtcagaccgtcgaacactcattcgtgcacaccgtacggaagataacactggaggtggttgaggaggaaaaggtcgaagacatgttcaataaggacgatgaggaggacagacaccatcgcatgccatgccccgcacagtcaagtataagtcagggagccaagccctggtataaggagtttctgcaacttattgggtactccaacttccagagagtggaagagtattgcgaaaaggtttggtgtacagacaggaaaagaaaaaagttgaagatgagtccatcgaaatggaaatacgcaaacccacaacactacagactgcctcgccatacccttgactcctag

SEQ ID NO: 174429 - DNA, 6476 bp, Artificial Sequence
  derived and/or modified sequence
cagtttggcaagtcagtgcaagaggctgacttctgagaggcttccaggagcccgaagagaggacctccacgggagaagggagtgcgtgtgctcggttttgtttttttctctcttttttttttttttttctgaatgaacagctttgcccaagtgactgaaaaatacagcttcttcctgaatctaccggcgtagttgctgaagagcgctctagacaggacatggctctgaagactcactctttggaatgtcctcttgctcccggcttataaacaactgtcccgaggaaagaaaggttttacatagccaaatacagcctgacaaatggcacttcggaactgtgctttctgatgacaacgcgttcgatttctgacaaagcctctcgcacgctgcccctggagggaagtcctaagtaaaactcagaccctccttaaagtgaggagcgagggcttggacggtgaacacggcagcatggcatccgcggggcacattatcaccttgctcctgtggggttacttactggagctttggacaggaggtcatacagctgatactacccacccccggttacgcctgtcacataaagagctcttgaatctgaacagaacatcaatatttcatagcccttttggatttcttgatctccatacaatgctgctggatgaatatcaagagaggctcttcgtgggaggcagggaccttgtatattccctcagcttggagagaatcagtgacggctataaagagatacactggccgagtacagctctaaaaatggaagaatgcataatgaagggaaaagatgcgggtgaatgtgcaaattatgttcgggttttgcatcactataacaggacacaccttctgacctgtggtactggagcttttgatccagtttgtgccttcatcagagttggatatcatttggaggatcctctgtttcacctggaatcacccagatctgagagaggaaggggcagatgtccttttgaccccagctcctccttcatctccactttaattggtagtgaattgtttgctggactctacagtgactactggagcagagacgctgcgatcttccgcagcatggggcgactggcccatatccgcactgagcatgacgatgagcgtctgttgaaagaaccaaaatttgtaggttcatacatgattcctgacaatgaagacagagatgacaacaaagtatatttcttttttactgagaaggcactggaggcagaaaacaatgctcacgcaatttacaccagggtcgggcgactctgtgtgaatgatgtaggagggcagagaatactggtgaataagtggagcactttcctaaaagcgagactcgtttgctcagtaccaggaatgaatggaattgacacatattttgatgaattagaggacgtttttttgctacctaccagagatcataagaatccagtgatatttggactctttaacactaccagtaatatttttcgagggcatgctatatgtgtctatcacatgtctagcattcgggcagccttcaacggaccatatgcacataaggaaggacctgaataccactggtcagtctatgaaggaaaagtcccttatccaaggcctggttcttgtgccagcaaagtaaatggagggagatacggaaccaccaaggactatcctgatgatgccatccgatttgcaagaagtcatccactaatgtaccaggccataaaacctgcccataaaaaaccaatattggtaaaaacagatggaaaatataacctgaaacaaatagcagtagatcgagtggaagctgaggatggccaatatgacgtcttgtttattgggacagataatggaattgtgctgaaagtaatcacaatttacaaccaagaaatggaatcaatggaagaagtaattctagaagaacttcagatattcaaggatccagttcctattatttctatggagatttcttcaaagcggcaacagctgtatattggatctgcttctgctgtggctcaagtcagattccatcactgtgacatgtatggaagtgcttgtgctgactgctgcctggctcgagacccttactgtgcctgggatggcatatcctgctcccggtattacccaacaggcacacatgcaaaaaggcgtttccggagacaagatgttcgacatggaaatgcagctcagcagtgctttggacaacagtttgttggggatgctttggataagactgaagaacatctggcttatggcatagagaacaacagtactttgctggaatgtaccccacgatctttacaagcgaaagttatctggtttgtacagaaaggacgtgagacaagaaaagaggaggtgaagacagatgacagagtggttaagatggaccttggtttactcttcctaaggttacacaaatcagatgctgggacctatttttgccagacagtagagcatagctttgtccatacggtccgtaaaatcaccttggaggtagtggaagaggagaaagtcgaggatatgtttaacaaggacgatgaggaggacaggcatcacaggatgccttgtcctgctcagagtagcatctcgcagggagcaaaaccatggtacaaggaattcttgcagctgatcggttatagcaacttccagagagtggaagaatactgcgagaaagtatggtgcacagatagaaagaggaaaaagcttaaaatgtcaccctccaagtggaagtatgccaaccctcaggaaaagaagctccgttccaaacctgagcattaccgcctgcccaggcacacgctggactcctgatggggtgagactatctactgtcttttgaagaatttatatttggaaagtaaaaaagtaaaaaaataaatcatccaacttctttgcattacttaaaagagatttctgtaatacaggaatgactatgaaggtgttataataaattattctacatactcatttgactggataaactttacataaaattaactaattttttaaataaatgcattgcttaatggtttctcattatgtttatcaaaaaacaactgtagctgttattttcagtacttggctgcttttctgtgaaaattattattttacttttggaagacaagattattagaatattgaagaaaaattggagacttataatcatggtaaatataaaactaaatatgttttaatatttctgaatttttcttttccatcacaatgtaagatatgcagaatacaagatactttggcattctcatgtgaactttctgtactctttaaggattattttattagtgttgtttaagccatgagtgttaagtagcaggtgtgttgtgagtgctgtaacccatgaaaggaaaaatgtcattctgaggcttgtgcccttcgtaaaatattcattaaagtacattcacactatttttgctttataacacagtctttaattttcactcactgtggaaataaaaactaaggtaacttctcagaaagatatcaaatctcagaaagaatgtcaaatcagatgaagttatagttaggattctaactactgtaaaagatttttgcttccctcttgtggtaaaaaaaattatattctcacacatttcttttttctctacagacggatatctgtttaggaaagatttgaaagcagattatcagtaggtacatggatacatcaagttcatttgcagaaacaaataactgaaataaaaaacatgttaatccttgtatcatactttaatatgaaagtattgtttatagataatttatctcacaagtcaaaaatgaagattttgcagcactgaaaatctattaaagctccaaattttaagtttctaaataatcttcgctgaaatctaaaatatactataacaaccgtgttttatttgtgaaaaaaatattaaagtgatttgctctcaaatatcaaattttcttctctcttttatattaagagacagaaaattgtttcatgagttcacttaactactgagatattcagagcatttttacctctctcttaaatgttataaaaaacaattgtatttttaagaatgtttatttatcaaagtctttccttcttctattaaatatttagcaattacctttctaaaatatgaaattttgtaagatgttttcacctaaataaaaattgaaagcaagtggattacacaggagaaccattatgaacatttatttagatattaatcttaaacagtgtttatttcagttttcaaagttagcttataggttatacatttaagttaaagtgctcataatcacttgcaatttcattgtaaaatgaacaaatacataaatattttaagaaaaatttaagtttattcagataagtcaccatgcttcaaaagatctaagaaatgcaaatatactgaaaattgacatcctctgaaaattccacttgctatttacccaagaatccactggaggtcattactgccattaaataataactgaaaagactatgtagtgaaatgtatttttaaaaactatattcagtaaaagcctgctcaatttggagaaatagaaccacaaacacagatcacaggggccttacaaagtttatgtctgaacaaataagtcaattaagtacactttattgaaaattgccttccattaacacacaagaaagaaagcaggattttctcctgtatctgaattttaaaattaaaaaggcagataagacataaatagttatcattttaattgcaataacacagacaagtagttaatgatgataacaatggtgtaacttgtaaactaaatatttggtaactgaagcaataggcagaggaaaatagcttttctatgacacaagtcataagaagtccatatactgaagagcgtttgattaaaataaagtgactattaaccagaaaagaaacattttacataaaatgctaaaatttattataggaaaataaatcaaacccaaagaaagtttattcaatgctaatttgaaagaaaattgataagaaaactttgagggcccaagtccacaatttggtgagaccactaaattttacatataattatacacacacatatgtacatatatatgtatataatcttgcttcccgcctgtttatggcagtactgaagagaaatgggaaagaagagggagggagagagaaagacgaagggagagagaaagcagtttccaaggatatgtttcatgtcccaccattttctcagtttctccctctctctcccaacacacacacacacacacccctcacatactataaaataaatcttcactgccctatcaaaatacaaataaatcaatctatgctgttctgtccttcttgagaatctaaaacataccacaaaaatacatccccagtcttttgttctgtctgaggttagaattaattcaaattcagaatctgttgtgagaaatgcccaggctttaaaaattaaaaatggatggatcttctctgaactcagggagggcacatacttagatacctacaagacttggaggaattaagagttcacccttcatctcaccaaattttccccatttttctctttcttgtagaaggagagaaaccatgctctctagcaacattgagcaaaaatcataaccactcatctaatttctaagaggcacctccatcgagggccggtctcctgcttctttagacctcttctatctttgttacaggagaggacctgtggatagacttagttttgacataaaacaatgcccattcacctcctccttcagcacaacgtcacccattgggcaagagatccagatttgttaacaaaaaagattttacttcgtgattccacgtctataattctatattgctaattttttcttttgtgtgaattactgaatatttcagagcaaagctatcaacttggagaaacagggattaaaaataaggataaacactaataagagctctagaaaaaagggaacagaaagtctgcctgtttagtaagtggcaattccatacatattttagagttttttctatctaaaattagttaaatacttagaatgtttgtaatgagtgttcgatatttgctataggttttagggttttgtaaatcttcatagtaattataaacatttgtaaaatttgtaaaatactataagtcattttgagtgttggtgttaagcatgaaacaaacagcagctgttgtccttaaaaatgaattgacctggccgggcgcggtggctcacgcctgtaatcccagcactttgggaggccgaggcgggtggatcatgaggtcaggagatcgagaccatcctggctaacaaggtgaaaccccgtctctactaaaaatacaaaaaattagccgggcgcggtggcgggcgcctgtagtcccagctacttgggaggctgaggcaggagaatggcgtgaacccgggaagcggagcttgcagtgagccgagattgcgccactgcagtccgcagtccggcctgggcgacagagcgagactccgtctc

SEQ ID NO: 174430 - DNA, 2414 bp, Artificial Sequence
  derived and/or modified sequence
aaactaaacagtgtcctataggcagctatcagctcagcatgtgttgtttacttggaaagtgaaagaaagtctcccactttgccttcccttagatgaacagagctcttgaatctgaacagaacatcaatatttcatagcccttttggatttcttgatctccatacaatgctgctggatgaatatcaagagaggctcttcgtgggaggcagggaccttgtatattccctcagcttggagagaatcagtgacggctataaagagatacactggccgagtacagctctaaaaatggaagaatgcataatgaagggaaaagatgcgggtgaatgtgcaaattatgttcgggttttgcatcactataacaggacacaccttctgacctgtggtactggagcttttgatccagtttgtgccttcatcagagttggatatcatttggaggatcctctgtttcacctggaatcacccagatctgagagaggaaggggcagatgtccttttgaccccagctcctccttcatctccactttaattggtagtgaattgtttgctggactctacagtgactactggagcagagacgctgcgatcttccgcagcatggggcgactggcccatatccgcactgagcatgacgatgagcgtctgttgaaagaaccaaaatttgtaggttcatacatgattcctgacaatgaagacagagatgacaacaaagtatatttcttttttactgagaaggcactggaggcagaaaacaatgctcacgcaatttacaccagggtcgggcgactctgtgtgaatgatgtaggagggcagagaatactggtgaataagtggagcactttcctaaaagcgagactcgtttgctcagtaccaggaatgaatggaattgacacatattttgatgaattagaggacgtttttttgctacctaccagagatcataagaatccagtgatatttggactctttaacactaccagtaatatttttcgagggcatgctatatgtgtctatcacatgtctagcattcgggcagccttcaacggaccatatgcacataaggaaggacctgaataccactggtcagtctatgaaggaaaagtcccttatccaaggcctggttcttgtgccagcaaagtaaatggagggagatacggaaccaccaaggactatcctgatgatgccatccgatttgcaagaagtcatccactaatgtaccaggccataaaacctgcccataaaaaaccaatattggtaaaaacagatggaaaatataacctgaaacaaatagcagtagatcgagtggaagctgaggatggccaatatgacgtcttgtttattgggacagataatggaattgtgctgaaagtaatcacaatttacaaccaagaaatggaatcaatggaagaagtaattctagaagaacttcagatattcaaggatccagttcctattatttctatggagatttcttcaaagcggcaacagctgtatattggatctgcttctgctgtggctcaagtcagattccatcactgtgacatgtatggaagtgcttgtgctgactgctgcctggctcgagacccttactgtgcctgggatggcatatcctgctcccggtattacccaacaggcacacatgcaaaaaggcgtttccggagacaagatgttcgacatggaaatgcagctcagcagtgctttggacaacagtttgttggggatgctttggataagactgaagaacatctggcttatggcatagagaacaacagtactttgctggaatgtaccccacgatctttacaagcgaaagttatctggtttgtacagaaaggacgtgagacaagaaaagaggaggtgaagacagatgacagagtggttaagatggaccttggtttactcttcctaaggttacacaaatcagatgctgggacctatttttgccagacagtagagcatagctttgtccatacggtccgtaaaatcaccttggaggtagtggaagaggagaaagtcgaggatatgtttaacaaggacgatgaggaggacaggcatcacaggatgccttgtcctgctcagagtagcatctcgcagggagcaaaaccatggtacaaggaattcttgcagctgatcggttatagcaacttccagagagtggaagaatactgcgagaaagtatggtgcacagatagaaagaggaaaaagcttaaaatgtcaccctccaagtggaagtatgccaaccctcaggaaaagaagctccgttccaaacctgagcattaccgcctgcccaggcacacgctggactcctgatggggtgagactatctactgtcttttgaagaatttatatttggaaagtaaaaaagtaaaaaaataaatcatccaacttctttgcattacttaaaagagatt

SEQ ID NO: 174431 - DNA, 2922 bp, Artificial Sequence
  derived and/or modified sequence
ctagaaacagcaagtacgctgctcaaccctgcctgaactttcctgtaaacagccactgacagactgcatccctgctgggtggatcctgcgactcctagagggaatggcacttcttgtttttaattagcaaggtgaaaggtgaattaaaactagcagtttggcaagtcagtgcaagaggctgacttctgagaggcttccaggagcccgaagagaggacctccacgggagaagggagtgcgtgtgctcggttttgtttttttctctcttttttttttttttttctgaatgaacagctttgcccaagtgactgaaaaatacagcttcttcctgaatctaccggcgtagttgctgaagagcgctctagacaggacatggctctgaagactcactctttggaatgtcctcttgctcccggcttataaacaactgtcccgaggaaagaaaggttttacatagccaaatacagcctgacaaatggcacttcggaactgtgctttctgatgacaacgcgttcgatttctgacaaagcctctcgcacgctgcccctggagggaagtcctaagtaaaactcagaccctccttaaagtgaggagcgagggcttggacggtgaacacggcagcatggcatccgcggggcacattatcaccttgctcctgtggggttacttactggagctttggacaggaggtcatacagctgatactacccacccccggttacgcctgtcacataaagagctcttgaatctgaacagaacatcaatatttcatagcccttttggatttcttgatctccatacaatgctgctggatgaatatcaagagaggctcttcgtgggaggcagggaccttgtatattccctcagcttggagagaatcagtgacggctataaagagatacactggccgagtacagctctaaaaatggaagaatgcataatgaagggaaaagatgcgggtgaatgtgcaaattatgttcgggttttgcatcactataacaggacacaccttctgacctgtggtactggagcttttgatccagtttgtgccttcatcagagttggatatcatttggaggatcctctgtttcacctggaatcacccagatctgagagaggaaggggcagatgtccttttgaccccagctcctccttcatctccactttaattggtagtgaattgtttgctggactctacagtgactactggagcagagacgctgcgatcttccgcagcatggggcgactggcccatatccgcactgagcatgacgatgagcgtctgttgaaagaaccaaaatttgtaggttcatacatgattcctgacaatgaagacagagatgacaacaaagtatatttcttttttactgagaaggcactggaggcagaaaacaatgctcacgcaatttacaccagggtcgggcgactctgtgtgaatgatgtaggagggcagagaatactggtgaataagtggagcactttcctaaaagcgagactcgtttgctcagtaccaggaatgaatggaattgacacatattttgatgaattagaggacgtttttttgctacctaccagagatcataagaatccagtgatatttggactctttaacactaccagtaatatttttcgagggcatgctatatgtgtctatcacatgtctagcattcgggcagccttcaacggaccatatgcacataaggaaggacctgaataccactggtcagtctatgaaggaaaagtcccttatccaaggcctggttcttgtgccagcaaagtaaatggagggagatacggaaccaccaaggactatcctgatgatgccatccgatttgcaagaagtcatccactaatgtaccaggccataaaacctgcccataaaaaaccaatattggtaaaaacagatggaaaatataacctgaaacaaatagcagtagatcgagtggaagctgaggatggccaatatgacgtcttgtttattgggacagataatggaattgtgctgaaagtaatcacaatttacaaccaagaaatggaatcaatggaagaagtaattctagaagaacttcagatattcaaggatccagttcctattatttctatggagatttcttcaaagcggcaacagctgtatattggatctgcttctgctgtggctcaagtcagattccatcactgtgacatgtatggaagtgcttgtgctgactgctgcctggctcgagacccttactgtgcctgggatggcatatcctgctcccggtattacccaacaggcacacatgcaaaaaggcgtttccggagacaagatgttcgacatggaaatgcagctcagcagtgctttggacaacagtttgttggggatgctttggataagactgaagaacatctggcttatggcatagagaacaacagtactttgctggaatgtaccccacgatctttacaagcgaaagttatctggtttgtacagaaaggacgtgagacaagaaaagaggaggtgaagacagatgacagagtggttaagatggaccttggtttactcttcctaaggttacacaaatcagatgctgggacctatttttgccagacagtagagcatagctttgtccatacggtccgtaaaatcaccttggaggtagtggaagaggagaaagtcgaggatatgtttaacaaggacgatgaggaggacaggcatcacaggatgccttgtcctgctcagagtagcatctcgcagggagcaaaaccatggtacaaggaattcttgcagctgatcggttatagcaacttccagagagtggaagaatactgcgagaaagtatggtgcacagatagaaagaggaaaaagcttaaaatgtcaccctccaagtggaagtatgccaaccctcagcattaccgcctgcccaggcacacgctggactcctga

SEQ ID NO: 174432 - DNA, 2328 bp, Artificial Sequence
  derived and/or modified sequence
atggccagcgccggccacatcatcaccctgctgctgtggggctacctgctggagctgtggaccggcggccacaccgccgacaccacccaccccagactgagactgagccacaaggagctgctgaacctgaacagaaccagcatcttccacagccccttcggcttcctggacctgcacaccatgctgctggacgagtaccaggagagactgttcgtgggcggcagagacctggtgtacagcctgagcctggagagaatcagcgacggctacaaggagatccactggcccagcaccgccctgaagatggaggagtgcatcatgaagggcaaggacgccggcgagtgcgccaactacgtgagagtgctgcaccactacaacagaacccacctgctgacctgcggcaccggcgccttcgaccccgtgtgcgccttcatcagagtgggctaccacctggaggaccccctgttccacctggagagccccagaagcgagagaggcagaggcagatgccccttcgaccccagcagcagcttcatcagcaccctgatcggcagcgagctgttcgccggcctgtacagcgactactggagcagagacgccgccatcttcagaagcatgggcagactggcccacatcagaaccgagcacgacgacgagagactgctgaaggagcccaagttcgtgggcagctacatgatccccgacaacgaggacagagacgacaacaaggtgtacttcttcttcaccgagaaggccctggaggccgagaacaacgcccacgccatctacaccagagtgggcagactgtgcgtgaacgacgtgggcggccagagaatcctggtgaacaagtggagcaccttcctgaaggccagactggtgtgcagcgtgcccggcatgaacggcatcgacacctacttcgacgagctggaggacgtgttcctgctgcccaccagagaccacaagaaccccgtgatcttcggcctgttcaacaccaccagcaacatcttcagaggccacgccatctgcgtgtaccacatgagcagcatcagagccgccttcaacggcccctacgcccacaaggagggccccgagtaccactggagcgtgtacgagggcaaggtgccctaccccagacccggcagctgcgccagcaaggtgaacggcggcagatacggcaccaccaaggactaccccgacgacgccatcagattcgccagaagccaccccctgatgtaccaggccatcaagcccgcccacaagaagcccatcctggtgaagaccgacggcaagtacaacctgaagcagatcgccgtggacagagtggaggccgaggacggccagtacgacgtgctgttcatcggcaccgacaacggcatcgtgctgaaggtgatcaccatctacaaccaggagatggagagcatggaggaggtgatcctggaggagctgcagatcttcaaggaccccgtgcccatcatcagcatggagatcagcagcaagagacagcagctgtacatcggcagcgccagcgccgtggcccaggtgagattccaccactgcgacatgtacggcagcgcctgcgccgactgctgcctggccagagacccctactgcgcctgggacggcatcagctgcagcagatactaccccaccggcacccacgccaagagaagattcagaagacaggacgtgagacacggcaacgccgcccagcagtgcttcggccagcagttcgtgggcgacgccctggacaagaccgaggagcacctggcctacggcatcgagaacaacagcaccctgctggagtgcacccccagaagcctgcaggccaaggtgatctggttcgtgcagaagggcagagagaccagaaaggaggaggtgaagaccgacgacagagtggtgaagatggacctgggcctgctgttcctgagactgcacaagagcgacgccggcacctacttctgccagaccgtggagcacagcttcgtgcacaccgtgagaaagatcaccctggaggtggtggaggaggagaaggtggaggacatgttcaacaaggacgacgaggaggacagacaccacagaatgccctgccccgcccagagcagcatcagccagggcgccaagccctggtacaaggagttcctgcagctgatcggctacagcaacttccagagagtggaggagtactgcgagaaggtgtggtgcaccgacagaaagagaaagaagctgaagatgagccccagcaagtggaagtacgccaacccccaggagaagaagctgagaagcaagcccgagcactacagactgcccagacacaccctggacagctag

SEQ ID NO: 174433 - DNA, 2301 bp, Artificial Sequence
  derived and/or modified sequence
atggccagcgccggccacatcatcaccctgctgctgtggggctacctgctggagctgtggaccggcggccacaccgccgacaccacccaccccagactgagactgagccacaaggagctgctgaacctgaacagaaccagcatcttccacagccccttcggcttcctggacctgcacaccatgctgctggacgagtaccaggagagactgttcgtgggcggcagagacctggtgtacagcctgagcctggagagaatcagcgacggctacaaggagatccactggcccagcaccgccctgaagatggaggagtgcatcatgaagggcaaggacgccggcgagtgcgccaactacgtgagagtgctgcaccactacaacagaacccacctgctgacctgcggcaccggcgccttcgaccccgtgtgcgccttcatcagagtgggctaccacctggaggaccccctgttccacctggagagccccagaagcgagagaggcagaggcagatgccccttcgaccccagcagcagcttcatcagcaccctgatcggcagcgagctgttcgccggcctgtacagcgactactggagcagagacgccgccatcttcagaagcatgggcagactggcccacatcagaaccgagcacgacgacgagagactgctgaaggagcccaagttcgtgggcagctacatgatccccgacaacgaggacagagacgacaacaaggtgtacttcttcttcaccgagaaggccctggaggccgagaacaacgcccacgccatctacaccagagtgggcagactgtgcgtgaacgacgtgggcggccagagaatcctggtgaacaagtggagcaccttcctgaaggccagactggtgtgcagcgtgcccggcatgaacggcatcgacacctacttcgacgagctggaggacgtgttcctgctgcccaccagagaccacaagaaccccgtgatcttcggcctgttcaacaccaccagcaacatcttcagaggccacgccatctgcgtgtaccacatgagcagcatcagagccgccttcaacggcccctacgcccacaaggagggccccgagtaccactggagcgtgtacgagggcaaggtgccctaccccagacccggcagctgcgccagcaaggtgaacggcggcagatacggcaccaccaaggactaccccgacgacgccatcagattcgccagaagccaccccctgatgtaccaggccatcaagcccgcccacaagaagcccatcctggtgaagaccgacggcaagtacaacctgaagcagatcgccgtggacagagtggaggccgaggacggccagtacgacgtgctgttcatcggcaccgacaacggcatcgtgctgaaggtgatcaccatctacaaccaggagatggagagcatggaggaggtgatcctggaggagctgcagatcttcaaggaccccgtgcccatcatcagcatggagatcagcagcaagagacagcagctgtacatcggcagcgccagcgccgtggcccaggtgagattccaccactgcgacatgtacggcagcgcctgcgccgactgctgcctggccagagacccctactgcgcctgggacggcatcagctgcagcagatactaccccaccggcacccacgccaagagaagattcagaagacaggacgtgagacacggcaacgccgcccagcagtgcttcggccagcagttcgtgggcgacgccctggacaagaccgaggagcacctggcctacggcatcgagaacaacagcaccctgctggagtgcacccccagaagcctgcaggccaaggtgatctggttcgtgcagaagggcagagagaccagaaaggaggaggtgaagaccgacgacagagtggtgaagatggacctgggcctgctgttcctgagactgcacaagagcgacgccggcacctacttctgccagaccgtggagcacagcttcgtgcacaccgtgagaaagatcaccctggaggtggtggaggaggagaaggtggaggacatgttcaacaaggacgacgaggaggacagacaccacagaatgccctgccccgcccagagcagcatcagccagggcgccaagccctggtacaaggagttcctgcagctgatcggctacagcaacttccagagagtggaggagtactgcgagaaggtgtggtgcaccgacagaaagagaaagaagctgaagatgagccccagcaagtggaagtacgccaacccccagcactacagactgcccagacacaccctggacagctag

SEQ ID NO: 174434 - protein, 1304 aa, Artificial Sequence
  derived and/or modified sequence
MAKIAKTHEDIEAQIREIQGKKAALDEAQGVGLDSTGYYDQEIYGGSDSRFAGYVTSIAATELEDDDDDYSSSTSLLGQKKPGYHAPVALLNDIPQSTEQYDPFAEHRPPKIADREDEYKKHRRTMIISPERLDPFADGGKTPDPKMNARTYMDVMREQHLTKEEREIRQQLAEKAKAGELKVVNGAAASQPPSKRKRRWDQTADQTPGATPKKLSSWDQAETPGHTPSLRWDETPGRAKGSETPGATPGSKIWDPTPSHTPAGAATPGRGDTPGHATPGHGGATSSARKNRWDETPKTERDTPGHGSGWAETPRTDRGGDSIGETPTPGASKRKSRWDETPASQMGGSTPVLTPGKTPIGTPAMNMATPTPGHIMSMTPEQLQAWRWEREIDERNRPLSDEELDAMFPEGYKVLPPPAGYVPIRTPARKLTATPTPLGGMTGFHMQTEDRTMKSVNDQPSGNLPFLKPDDIQYFDKLLVDVDESTLSPEEQKERKIMKLLLKIKNGTPPMRKAALRQITDKAREFGAGPLFNQILPLLMSPTLEDQERHLLVKVIDRILYKLDDLVRPYVHKILVVIEPLLIDEDYYARVEGREIISNLAKAAGLATMISTMRPDIDNMDEYVRNTTARAFAVVASALGIPSLLPFLKAVCKSKKSWQARHTGIKIVQQIAILMGCAILPHLRSLVEIIEHGLVDEQQKVRTISALAIAALAEAATPYGIESFDSVLKPLWKGIRQHRGKGLAAFLKAIGYLIPLMDAEYANYYTREVMLILIREFQSPDEEMKKIVLKVVKQCCGTDGVEANYIKTEILPPFFKHFWQHRMALDRRNYRQLVDTTVELANKVGAAEIISRIVDDLKDEAEQYRKMVMETIEKIMGNLGAADIDHKLEEQLIDGILYAFQEQTTEDSVMLNGFGTVVNALGKRVKPYLPQICGTVLWRLNNKSAKVRQQAADLISRTAVVMKTCQEEKLMGHLGVVLYEYLGEEYPEVLGSILGALKAIVNVIGMHKMTPPIKDLLPRLTPILKNRHEKVQENCIDLVGRIADRGAEYVSAREWMRICFELLELLKAHKKAIRRATVNTFGYIAKAIGPHDVLATLLNNLKVQERQNRVCTTVAIAIVAETCSPFTVLPALMNEYRVPELNVQNGVLKSLSFLFEYIGEMGKDYIYAVTPLLEDALMDRDLVHRQTASAVVQHMSLGVYGFGCEDSLNHLLNYVWPNVFETSPHVIQAVMGALEGLRVAIGPCRMLQYCLQGLFHPARKVRDVYWKIYNSIYIGSQDALIAHYPRIYNDDKNTYIRYELDYIL

SEQ ID NO: 174435 - DNA, 3915 bp, Artificial Sequence
  derived and/or modified sequence
atggccaagatcgccaagacccacgaggacatcgaggcccagatcagagagatccagggcaagaaggccgccctggacgaggcccagggcgtgggcctggacagcaccggctactacgaccaggagatctacggcggcagcgacagcagattcgccggctacgtgaccagcatcgccgccaccgagctggaggacgacgacgacgactacagcagcagcaccagcctgctgggccagaagaagcccggctaccacgcccccgtggccctgctgaacgacatcccccagagcaccgagcagtacgaccccttcgccgagcacagaccccccaagatcgccgacagagaggacgagtacaagaagcacagaagaaccatgatcatcagccccgagagactggaccccttcgccgacggcggcaagacccccgaccccaagatgaacgccagaacctacatggacgtgatgagagagcagcacctgaccaaggaggagagagagatcagacagcagctggccgagaaggccaaggccggcgagctgaaggtggtgaacggcgccgccgccagccagccccccagcaagagaaagagaagatgggaccagaccgccgaccagacccccggcgccacccccaagaagctgagcagctgggaccaggccgagacccccggccacacccccagcctgagatgggacgagacccccggcagagccaagggcagcgagacccccggcgccacccccggcagcaagatctgggaccccacccccagccacacccccgccggcgccgccacccccggcagaggcgacacccccggccacgccacccccggccacggcggcgccaccagcagcgccagaaagaacagatgggacgagacccccaagaccgagagagacacccccggccacggcagcggctgggccgagacccccagaaccgacagaggcggcgacagcatcggcgagacccccacccccggcgccagcaagagaaagagcagatgggacgagacccccgccagccagatgggcggcagcacccccgtgctgacccccggcaagacccccatcggcacccccgccatgaacatggccacccccacccccggccacatcatgagcatgacccccgagcagctgcaggcctggagatgggagagagagatcgacgagagaaacagacccctgagcgacgaggagctggacgccatgttccccgagggctacaaggtgctgcccccccccgccggctacgtgcccatcagaacccccgccagaaagctgaccgccacccccacccccctgggcggcatgaccggcttccacatgcagaccgaggacagaaccatgaagagcgtgaacgaccagcccagcggcaacctgcccttcctgaagcccgacgacatccagtacttcgacaagctgctggtggacgtggacgagagcaccctgagccccgaggagcagaaggagagaaagatcatgaagctgctgctgaagatcaagaacggcaccccccccatgagaaaggccgccctgagacagatcaccgacaaggccagagagttcggcgccggccccctgttcaaccagatcctgcccctgctgatgagccccaccctggaggaccaggagagacacctgctggtgaaggtgatcgacagaatcctgtacaagctggacgacctggtgagaccctacgtgcacaagatcctggtggtgatcgagcccctgctgatcgacgaggactactacgccagagtggagggcagagagatcatcagcaacctggccaaggccgccggcctggccaccatgatcagcaccatgagacccgacatcgacaacatggacgagtacgtgagaaacaccaccgccagagccttcgccgtggtggccagcgccctgggcatccccagcctgctgcccttcctgaaggccgtgtgcaagagcaagaagagctggcaggccagacacaccggcatcaagatcgtgcagcagatcgccatcctgatgggctgcgccatcctgccccacctgagaagcctggtggagatcatcgagcacggcctggtggacgagcagcagaaggtgagaaccatcagcgccctggccatcgccgccctggccgaggccgccaccccctacggcatcgagagcttcgacagcgtgctgaagcccctgtggaagggcatcagacagcacagaggcaagggcctggccgccttcctgaaggccatcggctacctgatccccctgatggacgccgagtacgccaactactacaccagagaggtgatgctgatcctgatcagagagttccagagccccgacgaggagatgaagaagatcgtgctgaaggtggtgaagcagtgctgcggcaccgacggcgtggaggccaactacatcaagaccgagatcctgccccccttcttcaagcacttctggcagcacagaatggccctggacagaagaaactacagacagctggtggacaccaccgtggagctggccaacaaggtgggcgccgccgagatcatcagcagaatcgtggacgacctgaaggacgaggccgagcagtacagaaagatggtgatggagaccatcgagaagatcatgggcaacctgggcgccgccgacatcgaccacaagctggaggagcagctgatcgacggcatcctgtacgccttccaggagcagaccaccgaggacagcgtgatgctgaacggcttcggcaccgtggtgaacgccctgggcaagagagtgaagccctacctgccccagatctgcggcaccgtgctgtggagactgaacaacaagagcgccaaggtgagacagcaggccgccgacctgatcagcagaaccgccgtggtgatgaagacctgccaggaggagaagctgatgggccacctgggcgtggtgctgtacgagtacctgggcgaggagtaccccgaggtgctgggcagcatcctgggcgccctgaaggccatcgtgaacgtgatcggcatgcacaagatgaccccccccatcaaggacctgctgcccagactgacccccatcctgaagaacagacacgagaaggtgcaggagaactgcatcgacctggtgggcagaatcgccgacagaggcgccgagtacgtgagcgccagagagtggatgagaatctgcttcgagctgctggagctgctgaaggcccacaagaaggccatcagaagagccaccgtgaacaccttcggctacatcgccaaggccatcggcccccacgacgtgctggccaccctgctgaacaacctgaaggtgcaggagagacagaacagagtgtgcaccaccgtggccatcgccatcgtggccgagacctgcagccccttcaccgtgctgcccgccctgatgaacgagtacagagtgcccgagctgaacgtgcagaacggcgtgctgaagagcctgagcttcctgttcgagtacatcggcgagatgggcaaggactacatctacgccgtgacccccctgctggaggacgccctgatggacagagacctggtgcacagacagaccgccagcgccgtggtgcagcacatgagcctgggcgtgtacggcttcggctgcgaggacagcctgaaccacctgctgaactacgtgtggcccaacgtgttcgagaccagcccccacgtgatccaggccgtgatgggcgccctggagggcctgagagtggccatcggcccctgcagaatgctgcagtactgcctgcagggcctgttccaccccgccagaaaggtgagagacgtgtactggaagatctacaacagcatctacatcggcagccaggacgccctgatcgcccactaccccagaatctacaacgacgacaagaacacctacatcagatacgagctggactacatcctgtag

SEQ ID NO: 174436 - DNA, 3915 bp, Artificial Sequence
  derived and/or modified sequence
atggccaagattgcgaagacacacgaagatattgaggctcagattcgggagattcagggaaagaaggccgccctcgacgaggcacagggcgtgggcctggactcaaccgggtattatgaccaggagatctacggcggcagtgactccagatttgccgggtacgtcacctcgatcgctgccacagaactcgaggacgatgacgatgattactcaagctctacatcactgttgggtcagaaaaagcccggctatcacgccccagttgctctgctcaatgacattccccagtctaccgagcaatacgacccattcgccgagcatagacctccgaagattgccgatcgcgaagacgagtataagaagcatcggcggactatgatcatcagccccgagcgactggatccctttgcagacggtggcaagacccccgatcctaaaatgaacgctcggacttatatggacgtaatgcgagaacaacacttaaccaaagaagaacgggaaatcaggcagcagttggccgagaaagccaaagcaggtgagctgaaggtggtcaacggtgccgctgcaagtcagccaccctccaagaggaagagacgatgggatcagaccgccgaccaaacacccggggcaactccaaaaaagttgtcttcatgggaccaagcggaaactcctggacacacaccatcactgcgatgggacgagactcctggcagggccaaagggagtgagacaccaggcgctactccaggatccaaaatctgggaccctaccccctcccatacacctgcgggggctgccacgcctggccgcggggacaccccaggacatgccacacccggccatggtggggcgacctcatctgctagaaagaatcgatgggacgagacgcctaaaacagagcgagacacgccgggacacggtagcggctgggctgagacacccaggacggacaggggaggtgattcgatcggtgaaacccctacacctggtgcatctaaacggaaatctcgttgggatgagacaccagcatcacagatgggggggtctacgccggtcctgacacccgggaagaccccaatcgggacccctgctatgaatatggcaacccctacccccggtcacattatgagcatgactccagaacagttgcaagcatggcgctgggagagagagatagatgaacgcaacaggcccctttccgacgaagagcttgacgctatgtttccagaaggttacaaagtcttacccccacctgctgggtacgtccctattcgcacacctgccagaaagttgacggccacccctacccctctggggggcatgactggattccatatgcaaacagaggaccggaccatgaagtccgtcaatgaccagcccagcggaaatctgccgtttcttaaaccagatgacattcagtacttcgacaaactactcgttgacgtggacgagtctacattgagcccagaagagcagaaagagaggaagatcatgaagttgcttctgaaaatcaaaaatgggacccctcccatgagaaaagccgctctcagacaaatcaccgacaaagccagagagttcggggccgggccgctgttcaaccagattctccctctgctgatgagccctacgttagaagaccaggagcggcatctgttggtgaaagtaatcgaccgaattctgtataaattagacgacctggtgagaccctatgtacacaagatactggtcgtcatcgagcctctcctgattgacgaagattactatgcgagggttgaaggacgggagataatcagcaatctggccaaggctgctggtctagccactatgatatccacaatgcggccagacatcgacaacatggacgagtacgttcgcaacaccaccgcccgagcttttgccgtggtggcaagtgccctgggtatcccctcgcttctgcccttcctcaaggccgtgtgtaaaagcaaaaagagctggcaggctcgacacaccgggattaaaattgtgcagcaaattgccatactgatgggctgcgctatcctcccccatctgaggtcactcgtggagatcatcgagcacggactggtcgacgagcagcagaaggtgcgcacgatctccgccctcgccattgcagcactggccgaggccgccactccatatggtatcgagagttttgacagcgtgctgaaacccctctggaagggcatacggcagcatagaggtaaaggtttagccgcctttctgaaagcaattggctaccttatcccactgatggacgcagagtacgccaactattatacccgggaggtcatgttgatcctaatcagggagttccaaagccctgacgaagagatgaaaaaaatcgtgctcaaggttgttaaacagtgttgcgggaccgacggtgtggaagctaattatataaagaccgaaattctgccgccattctttaagcacttctggcaacatagaatggccctggaccgtagaaactaccggcagctggtcgataccactgtagaacttgctaacaaggtaggcgccgcagagatcatctctcggatcgtggatgacctgaaggacgaggccgaacagtaccgaaaaatggttatggaaacgatagagaaaattatgggcaacctgggagcagccgacattgaccacaagcttgaggaacagctgattgatgggattctctatgctttccaggagcagaccaccgaagacagcgttatgctgaatggattcggaactgtcgtgaatgccctcggcaagagagtcaagccgtaccttccccagatatgcggcactgtgctttggaggttaaataataagagtgcaaaagtcagacagcaggccgcagacctcataagtcggaccgccgttgtgatgaaaacttgtcaagaggaaaagctgatggggcacctcggggtagtattgtacgaatacttgggcgaggagtaccccgaagtcctgggctccattctcggtgcgttgaaggctatcgttaatgtcatcggtatgcacaaaatgactcctccaatcaaggacctcctgcctaggctgacacccatactgaaaaaccggcacgagaaggtgcaggagaactgcattgacctcgtcggaagaatcgccgaccgcggggcagagtatgtaagtgcacgcgagtggatgcgcatctgctttgagctgctggaactgttaaaagctcataaaaaggcgatacggcgcgcaactgtcaatactttcgggtatatagcaaaagccatcggcccccacgatgtgctggcgacactccttaacaacttaaaggtacaggaacgacagaatcgagtctgcaccaccgtagccattgctatcgtggcggaaacttgctcccctttcacagtccttcctgcactcatgaatgaatatcgggtgccggaattgaacgtgcaaaacggggtgctcaaatctttgagttttctgtttgagtacataggagagatggggaaggattatatctatgcagtaacccctctgcttgaggacgccctaatggatcgggatctggttcatagacaaactgcctctgctgtggtgcagcacatgtcgctgggggtctacggtttcggctgtgaggactctctgaaccacctccttaattatgtctggcccaatgtttttgagactagtcctcacgtgatacaggcggttatgggagccctggaaggcctgagggtagccataggaccttgcagaatgctccagtactgtctccagggcctattccacccggcaaggaaggtaagagacgtttattggaagatctataactctatttacatcggctctcaggatgctcttatagctcactacccgcggatatacaacgatgacaaaaacacatatatccggtatgagctcgactacatactgtag

SEQ ID NO: 174437 - DNA, 3915 bp, Artificial Sequence
  derived and/or modified sequence
atggccaagatcgccaagacccatgaagatattgaggcccagatccgggagatccagggcaagaaggccgccctggatgaggcccagggcgtgggcctggacagcacaggctactatgaccaggagatctacggcggcagtgacagcagatttgctggctacgtgaccagcattgctgccacagagctggaggatgatgatgatgactacagcagcagcaccagcctgctgggccagaagaagccaggctaccacgcccctgtggccctgctgaatgacatcccccagagcacagagcagtatgacccctttgctgagcacaggcctcccaagattgctgaccgggaggatgagtacaagaagcacaggaggaccatgatcatcagccctgagcggctggacccctttgctgatggcggcaagaccccagaccccaagatgaatgcccggacctacatggatgtgatgagggagcagcacctgaccaaggaggagcgggagatccggcagcagctggccgagaaggccaaggccggggagctgaaggtggtgaatggagctgctgccagccagccccccagcaagaggaagaggcgctgggaccagacagctgaccagacccctggggccacccccaagaagctgagctcctgggaccaggccgagaccccaggccacacccccagcctgcgctgggatgagaccccaggccgggccaagggcagcgagacccctggggccaccccaggcagcaagatctgggaccccacccccagccacaccccagctggagctgccaccccaggccgcggggacaccccaggccacgccaccccaggccatggaggagccaccagcagcgccaggaagaaccgctgggatgagacccccaagacagagcgggacaccccaggccacggcagcggctgggccgagacccccaggacagacagaggaggagacagcattggagagacccccacccctggggccagcaagaggaagagccgctgggatgagaccccagccagccagatgggcggcagcacccctgtgctgaccccaggcaagacccccatcggcaccccagccatgaacatggccacccccaccccaggccacatcatgtccatgaccccagagcagctgcaggcctggcgctgggagcgggagattgatgaaagaaaccggcccctgagtgatgaggagctggatgccatgtttcctgagggctacaaggtgctgcccccacctgctggctacgtgcccatccgcaccccagccaggaagctgacagccacccccacccccctgggcggcatgacaggcttccacatgcagacagaggacaggaccatgaagtctgtgaatgaccagcccagcggcaacctgcccttcctgaagccagatgacatccagtactttgacaagctgctggtggatgtggatgagagcaccctgagccctgaggagcagaaggagaggaagatcatgaagctgctgctgaagatcaagaatggcaccccacccatgaggaaggccgccctgcggcagatcacagacaaggcccgggagtttggagctggccccctcttcaaccagatcctgcccctgctgatgagccccaccctggaggaccaggagcggcacctgctggtgaaggtgattgaccgcatcctgtacaagctggatgacctggtgcggccctacgtgcacaagatcctggtggtgattgagcccctgctgattgatgaggactactatgcccgggtggagggccgggagatcatcagcaacctggccaaggccgccggcctggccaccatgatcagcaccatgaggccagacatcgacaacatggatgaatatgtgaggaacaccacagcccgggcctttgctgtggtggccagcgccctgggcatccccagcctgctgcccttcctgaaggctgtgtgcaagagcaagaagtcctggcaggcccggcacacaggcatcaagatcgtgcagcagatcgccatcctgatgggctgtgccatcctgccccacctgcggagcctggtggagatcatcgagcacggcctggtggatgagcagcagaaggtgaggaccatcagcgccctggccatcgccgccctggccgaggccgccaccccctatggaattgagagctttgacagcgtgctgaagcccctgtggaagggcatccggcagcaccggggcaagggcctggccgccttcctgaaggccatcggctacctgatccccctgatggatgctgaatatgccaactactacacccgggaggtgatgctgatcctgatccgggagttccagagcccagatgaggagatgaagaagatcgtgctgaaggtggtgaagcagtgctgcggcacagatggagtggaggccaactacatcaagacagagatcctgccccccttcttcaagcacttctggcagcacaggatggccctggacagaagaaactaccggcagctggtggacaccaccgtggagctggccaacaaggtgggcgctgctgagatcatcagcagaattgtggatgacctgaaggatgaagctgagcagtacaggaagatggtgatggagaccatcgagaagatcatgggcaacctgggcgctgctgacatcgaccacaagctggaggagcagctgattgatggcatcctgtatgccttccaggagcagaccacagaggacagcgtgatgctgaatggcttcggcaccgtggtgaatgccctgggcaagagggtgaagccctacctgccccagatctgtggcaccgtgctgtggaggctgaacaacaagagcgccaaggtgcggcagcaggccgctgacctgatcagcaggacagctgtggtgatgaagacctgccaggaggagaagctgatgggccacctgggcgtggtgctgtatgagtacctgggggaggagtacccagaggtgctgggcagcatcctgggcgccctgaaggccatcgtgaatgtcatcggcatgcacaagatgaccccacccatcaaggacctgctgccccggctgacccccatcctgaagaacagacatgagaaggtgcaggagaactgcatcgacctggtgggcagaattgctgacagaggagcagaatatgtgtctgcccgggagtggatgaggatctgctttgagctgctggagctgctgaaggcccacaagaaggccatccggcgggccaccgtgaacaccttcggctacatcgccaaggccatcggcccccatgatgtgctggccaccctgctgaacaacctgaaggtgcaggagcggcagaacagagtgtgcaccaccgtggccatcgccatcgtggccgagacctgcagccccttcaccgtgctgcctgccctgatgaatgagtacagagtgcctgagctgaatgtgcagaatggagtgctgaagagcctgtccttcctgtttgagtacatcggggagatgggcaaggactacatctatgctgtgacccccctgctggaggatgccctgatggaccgggacctggtgcaccggcagacagccagcgctgtggtgcagcacatgagcctgggcgtgtatggcttcggctgtgaggacagcctgaaccacctgctgaactacgtgtggcccaacgtgtttgagaccagcccccacgtgatccaggccgtgatgggcgccctggagggcctgcgggtggccatcggcccctgcaggatgctgcagtactgcctgcagggcctcttccacccagccaggaaggtgagagatgtgtactggaagatctacaacagcatctacatcggcagccaggatgccctgattgcccactacccccgcatctacaatgatgacaagaacacctacatccgctatgagctggactacatcctgtag

SEQ ID NO: 174438 - DNA, 3915 bp, Artificial Sequence
  derived and/or modified sequence
atggccaagatcgccaagacccacgaggacatcgaggcccagatcagagagatacagggcaagaaagcggccctagatgaagcccaaggggtgggactcgacagcacaggctactacgatcaggagatatacggaggcagtgattccaggtttgcaggctacgttacttccatcgctgccacagagctggaggacgacgatgatgattactcgagtagcaccagtctgctcggacagaaaaaacccggttaccacgctcctgttgctttgcttaacgacatcccccagtctaccgagcagtatgacccgttcgcagaacatcggccccccaagatcgcagacagggaggatgagtacaaaaagcaccgccggaccatgataatttcgcctgagcggctggacccctttgcagatggtggaaaaacccccgatcctaaaatgaacgccaggacctacatggatgtcatgcgagagcaacacctgactaaggaggaacgtgagatccgtcagcaattggccgagaaagcgaaagccggcgaactcaaagtagttaacggcgccgccgccagtcagccacccagcaagcgtaagagacgctgggaccagaccgccgaccagacacccggggcaacacccaagaaactgagtagttgggaccaggccgagacacccgggcatacccccagtctccgctgggacgaaaccccgggtcgcgctaaggggagtgaaacacctggagccacacccggatccaagatttgggacccaacgccaagccacacgccggccggggccgccacacctggcaggggcgacacacctggtcatgctacaccaggacacggaggagcgacatcaagcgcccggaaaaatagatgggacgaaactccaaagactgagagagacacacccggtcacggttccggctgggccgaaactccccgcaccgacaggggtggggattccattggcgagacccctaccccgggcgcatcgaagagaaagtcgcgatgggatgaaacgccagccagtcagatgggtggatcaacacctgtccttacacccgggaaaacaccgattggaacccctgcaatgaacatggctacaccgaccccaggacatatcatgtcgatgactcctgagcagcttcaagcctggaggtgggagagagaaatagatgaacggaatcggccactatccgacgaggaactcgatgcaatgtttcccgaaggctacaaagtcctgccgccgcctgctggctacgtgcctattaggacaccagccagaaagctgaccgctacgcctacacctctcggtgggatgacagggttccatatgcaaactgaggatcggactatgaagtccgttaatgatcagccatcaggaaatctcccatttctgaagccagacgatattcagtatttcgataagctgttagttgatgtggatgaatccaccctgtctccagaagaacagaaagagaggaaaattatgaagctgctacttaagataaaaaatggtacaccgcctatgcgtaaggcagcacttagacagatcactgacaaggctagggagttcggcgctgggcccctgttcaaccagatactgcctttgcttatgtcccccacacttgaagatcaagagcggcacctgctcgtaaaggtgattgataggatcttgtataagctcgatgatctcgtcaggccttacgtacataagattctggtagtcattgaaccactcctgattgatgaggactactatgcaagggtggagggacgtgaaattatttccaatcttgccaaagctgctgggctcgctactatgatttctactatgcgcccggacattgacaatatggatgagtacgttagaaataccaccgcaagggccttcgccgtggttgcgtccgcgctgggaattcctagtctcctcccgtttttgaaggctgtgtgtaaatccaagaagagttggcaagctagacacactggaattaagatcgtgcagcagattgctatcctgatgggctgcgctattcttccacacctgcggtccctcgtggagattatcgagcacggtctggtggatgaacagcagaaagtgcggacaatatctgcactcgcgatcgctgccctcgcagaagccgcgactccatacgggattgaatcatttgattctgtcttgaagccactgtggaaaggtatcagacagcatcgagggaaagggcttgcagcattcctcaaggcaattggctacctcattcccttgatggacgctgagtacgccaattattatactcgcgaggtgatgctcattctcattcgtgagtttcagtccccagatgaggaaatgaagaagattgtattaaaggtggtgaaacagtgttgcgggacagatggagtggaggctaactatattaaaaccgaaatcctgcccccattctttaaacacttctggcagcatcgcatggcactcgaccggaggaattaccgacagcttgtcgacacaacagtggagcttgcgaacaaagtgggagcagccgaaatcattagtcgtatcgtcgacgacctcaaagacgaagcagagcagtatagaaagatggtaatggaaaccatcgaaaaaattatgggcaacctcggcgcagcagatattgatcacaagcttgaagaacagctgattgatggcatcttatatgcatttcaggaacagactaccgaagatagtgtcatgttaaatggtttcgggacagtcgtcaatgctctgggcaagagggtgaagccgtatctgccccaaatctgcgggaccgtcctgtggcgtctgaataacaaaagcgcgaaggttcggcaacaggccgcagacctcatctctcggaccgctgtggtgatgaagacctgtcaggaagaaaagctgatggggcatctgggcgtggtactctacgagtatctcggcgaggagtaccccgaggtgttaggctctatactaggggcccttaaagcgatcgtcaatgttatagggatgcacaagatgacccctcctataaaagacctgctgccacgactgacacccatcttaaagaacaggcatgagaaggtgcaagagaactgcattgacctggtgggtaggatcgccgatcggggcgccgaatatgtatcagctagagagtggatgcggatttgcttcgaacttctcgaactgctcaaagcgcataaaaaggccatccgaagggccacagtaaatacgtttggctacatcgcaaaagccataggccctcatgacgtgctcgccacactgctgaataacctgaaggtgcaagagcgccagaatagggtgtgcaccacggtggcaatagccatcgtcgctgaaacctgtagtccattcaccgttctcccagccctcatgaatgagtatagagtgccagaactgaatgtgcagaatggagtgttgaagagtcttagctttctcttcgagtacataggagagatgggaaaagactatatctacgctgtgacgccactgctcgaagatgctctcatggacagggatctcgtccaccgccaaaccgcctccgctgtggtacaacatatgagcctgggtgtgtacgggtttggttgtgaagactctctaaaccatctcctgaattacgtctggcctaatgtttttgagaccagcccacacgtcatccaagccgtcatgggggccctggaggggctgcgagtcgcaatcgggccatgtagaatgctgcagtattgcctccaagggctattccaccccgcccggaaggtccgagatgtctattggaagatctacaactccatttatattggcagccaggacgcccttatcgcacattacccaaggatatataatgacgacaagaacacttacatcagatatgaactggactacattctctag

SEQ ID NO: 174439 - DNA, 3915 bp, Artificial Sequence
  derived and/or modified sequence
atggcaaagatcgctaagacccacgaggatatcgaggcacagattcgagagattcaggggaagaaggccgctcttgacgaagctcagggcgtgggtctggacagtaccggttactacgatcaggagatatacgggggttcggattccaggttcgccggttatgtgacaagcattgccgctaccgagctcgaggatgatgatgatgattactcctcgagcacctcattactcgggcagaagaaacccggttatcacgcgcctgttgctctcctgaatgatattccccagtcaacagagcaatacgatcctttcgcagaacatcggcctcccaaaatcgctgacagggaggatgaatataaaaagcaccgtagaaccatgataatcagccctgaacggctggatcctttcgccgatggtggcaagacccccgatcctaagatgaatgctagaacgtatatggatgtgatgcgggagcagcacctaacgaaggaggaaagggaaatacggcaacagttagcggaaaaagctaaagctggtgaactgaaagtggtgaatggggctgcagcctcccagcccccaagtaaacggaagcgcaggtgggaccagacggccgatcaaacaccaggcgctactcccaagaaactgtcctcatgggaccaggccgagacaccaggccacaccccttccctgcggtgggacgaaacacctggtcgagcaaaagggtcagagacacccggagcaacaccgggtagcaagatctgggatccaaccccatcccacactcccgcaggggctgcgaccccaggtcgaggtgacacacctggacatgccacccccggacacggtggggctacctccagtgctcgcaagaacaggtgggacgagaccccgaaaacggagagagacactcctggacatggatctgggtgggcagagaccccgaggaccgatagagggggagactcaatcggcgagaccccaactccaggcgcatccaagcggaagtctagatgggatgagaccccagcatcccagatgggcggttctaccccagtattgactccaggaaagacacctataggtaccccagccatgaacatggccacccctacccccggtcatattatgagcatgacacccgagcaactccaagcatggcggtgggagcgggaaatcgacgagcgtaaccgcccattatccgacgaagaattagacgccatgttcccagaaggttacaaggtcttgcctccgccagctggatatgtgcctataagaacaccggctcgcaaacttaccgcaaccccaacccctctcggtggaatgacaggattccacatgcagacggaggacagaaccatgaagtccgtgaacgaccagccatcagggaatctccctttcctgaagcccgacgacatccaatattttgataaattactggtcgatgtggacgaatcaacactctccccggaggagcagaaggagagaaaaatcatgaagctgctgctgaagatcaagaacgggactccccctatgagaaaagctgcactgcgccaaatcaccgacaaagcgagagagtttggggctggacccctcttcaatcagatcttgccattgctgatgtctcctactctcgaggatcaggagcgacatctcctggtaaaggtgattgacagaatcctgtataagctggatgatctggtacgcccatatgtgcacaagatcctcgtcgtgattgagcctttgctgatcgacgaggattattacgcccgtgtggaaggacgggagattataagcaatctggccaaagctgctgggttggccaccatgattagtaccatgcggcctgatattgacaacatggatgagtacgtcagaaacactactgctcgagcgttcgcagtggtggcttccgcactcggcattccaagcttgctgccatttcttaaagctgtctgtaagagcaagaagtcatggcaggcccgacacacaggtatcaagatcgtgcagcagattgctatcctgatgggatgcgcaatccttcctcatttacgcagcctcgtggaaattatagagcacggactcgtagacgaacagcagaaagtgcggacaatatccgccctggcaatcgcagcactggctgaagcggcaaccccatatgggatcgagagttttgattctgttctgaagcctttgtggaaagggatcaggcagcacaggggcaaagggcttgcagcattccttaaagccatcggttatctgatccctttgatggacgccgaatacgcaaactattacactagagaggtcatgctgatacttattagagagtttcagagccctgacgaagagatgaaaaagatcgtgctcaaagtagtaaaacagtgctgcggaacagacggggtggaggccaactatatcaagacagagatacttccaccattcttcaagcacttctggcagcatagaatggcactagatcgtcgcaattatcgtcaactcgtcgacactactgtggaactggccaataaggttggtgctgcagagataattagccggattgtggacgatcttaaggacgaggccgagcaatatagaaagatggtcatggagacaattgagaaaatcatgggaaatttaggcgcagccgatatagaccacaaattggaagagcaacttattgacgggatcttatacgcatttcaagaacagacaacagaggatagtgtcatgcttaatggatttgggactgtggtgaatgccctgggcaagagagtgaagccatacctgcctcagatctgcgggacggtactatggcgcttgaataacaagtccgctaaagtcaggcagcaggctgccgacctgattagccggaccgcggttgtcatgaaaacatgtcaagaggagaagctgatggggcacctgggcgtcgtattgtacgaatatctgggtgaggagtatccagaggttctgggctcaatcctgggcgctctgaaggctattgtcaacgtgatagggatgcacaaaatgacaccccctattaaagaccttctgccacggctgacccctattcttaaaaatagacatgaaaaggtgcaggagaattgtattgatctcgttgggagaatcgctgatcgtggcgctgaatacgttagcgcccgagaatggatgcggatctgttttgagctcttggagttactaaaggctcacaaaaaagccataagaagagctacagtgaacacttttggctacatcgccaaagcaatcggacctcatgatgtgctggccaccctgttgaataatctgaaagtgcaggagcgccaaaaccgcgtctgcaccacagtggccattgccattgtcgccgagacctgcagcccttttactgtgctgccagcgctgatgaacgagtatcgtgtgcctgagctgaatgtacagaacggggtactgaaatcccttagctttctctttgaatatatcggcgaaatgggcaaggattatatttacgcagtgacgccacttttggaagacgccctcatggatcgggacttggtgcaccgacagaccgcgtccgccgtggtgcagcacatgagtctcggggtgtacggctttggctgcgaggattctctgaaccatctcctaaactatgtctggcccaacgtcttcgaaactagcccccacgtaatccaggcagtcatgggcgcactggagggtctgagagtggctatcggtccgtgcaggatgctccaatattgtttgcaaggacttttccacccagccagaaaagtaagggatgtgtattggaagatctataactctatatatatcggaagccaagacgctctgatcgctcactatcctcggatatataacgatgataaaaatacctacatccggtacgagctagattatattctgtag

SEQ ID NO: 174440 - DNA, 4336 bp, Artificial Sequence
  derived and/or modified sequence
agtgcagcccccagctatttttctccgtggcggcggcgacgagcggaagttcttgggagcgccagttccgtctgtgtgttcgagtggacaaaatggcgaagatcgccaagactcacgaagatattgaagcacagattcgagaaattcaaggcaagaaggcagctcttgatgaagctcaaggagtgggcctcgattctacaggttattatgaccaggaaatttatggtggaagtgacagcagatttgctggatacgtgacatcaattgctgcaactgaacttgaagatgatgacgatgactattcatcatctacgagtttgcttggtcagaagaagccaggatatcatgcccctgtggcattgcttaatgatataccacagtcaacagaacagtatgatccatttgctgagcacagacctccaaagattgcagaccgggaagatgaatacaaaaagcataggcggaccatgataatttccccagagcgtcttgatccttttgcagatggagggaaaacccctgatcctaaaatgaatgctaggacttacatggatgtaatgcgagaacaacacttgactaaagaagaacgagaaattaggcaacagctagcagaaaaagctaaagctggagaactaaaagtcgtcaatggagcagcagcgtcccagcctccatcaaaacgaaaacggcgttgggatcaaacagctgatcagactcctggtgccactcccaaaaaactatcaagttgggatcaggcagagacccctgggcatactccttccttaagatgggatgagacaccaggtcgtgcaaagggaagcgagactcctggagcaaccccaggctcaaaaatatgggatcctacacctagccacacaccagcgggagctgctactcctggacgaggtgatacaccaggccatgcgacaccaggccatggaggcgcaacttccagtgctcgtaaaaacagatgggatgaaacccccaaaacagagagagatactcctgggcatggaagtggatgggctgagactcctcgaacagatcgaggtggagattctattggtgaaacaccgactcctggagccagtaaaagaaaatcacggtgggatgaaacaccagctagtcagatgggtggaagcactccagttctgacccctggaaagacaccaattggcacaccagccatgaacatggctacccctactccaggtcacataatgagtatgactcctgaacagcttcaggcttggcggtgggaaagagaaattgatgagagaaatcgcccactttctgatgaggaattagatgctatgttcccagaaggatataaggtacttcctcctccagctggttatgttcctattcgaactccagctcgaaagctgacagctactccaacacctttgggtggtatgactggtttccacatgcaaactgaagatcgaactatgaaaagtgttaatgaccagccatctggaaatcttccatttttaaaacctgatgatattcaatactttgataaactattggttgatgttgatgaatcaacacttagtccagaagagcaaaaagagagaaaaataatgaagttgcttttaaaaattaagaatggaacaccaccaatgagaaaggctgcattgcgtcagattactgataaagctcgtgaatttggagctggtcctttgtttaatcagattcttcctctgctgatgtctcctacacttgaggatcaagagcgtcatttacttgtgaaagttattgataggatactgtacaaacttgatgacttagttcgtccatatgtgcataagatcctcgtggtcattgaaccgctattgattgatgaagattactatgctagagtggaaggccgagagatcatttctaatttggcaaaggctgctggtctggctactatgatctctaccatgagacctgatatagataacatggatgagtatgtccgtaacacaacagctagagcttttgctgttgtagcctctgccctgggcattccttctttattgcccttcttaaaagctgtgtgcaaaagcaagaagtcctggcaagcgagacacactggtattaagattgtacaacagatagctattcttatgggctgtgccatcttgccacatcttagaagtttagttgaaatcattgaacatggtcttgtggatgagcagcagaaagttcggaccatcagtgctttggccattgctgccttggctgaagcagcaactccttatggtatcgaatcttttgattctgtgttaaagcctttatggaagggtatccgccaacacagaggaaagggtttggctgctttcttgaaggctattgggtatcttattcctcttatggatgcagaatatgccaactactatactagagaagtgatgttaatccttattcgagaattccagtctcctgatgaggaaatgaaaaaaattgtgctgaaggtggtaaaacagtgttgtgggacagatggtgtagaagcaaactacattaaaacagagattcttcctcccttttttaaacacttctggcagcacaggatggctttggatagaagaaattaccgacagttagttgatactactgtggagttggcaaacaaagtaggtgcagcagaaattatatccaggattgtggatgatctgaaagatgaagccgaacagtacagaaaaatggtgatggagacaattgagaaaattatgggtaatttgggagcagcagatattgatcataaacttgaagaacaactgattgatggtattctttatgctttccaagaacagactacagaggactcagtaatgttgaacggctttggcacagtggttaatgctcttggcaaacgagtcaaaccatacttgcctcagatctgtggtacagttttgtggcgtttaaataacaaatctgctaaagttaggcaacaggcagctgacttgatttctcgaactgctgttgtcatgaagacttgtcaagaggaaaaattgatgggacacttgggtgttgtattgtatgagtatttgggtgaagagtaccctgaagtattgggcagcattcttggagcactgaaggccattgtaaatgtcataggtatgcataagatgactccaccaattaaagatctgctgcctagactcacccccatcttaaagaacagacatgaaaaagtacaagagaattgtattgatcttgttggtcgtattgctgacaggggagctgaatatgtatctgcaagagagtggatgaggatttgctttgagcttttagagctcttaaaagcccacaaaaaggctattcgtagagccacagtcaacacatttggttatattgcaaaggccattggccctcatgatgtattggctacacttctgaacaacctcaaagttcaagaaaggcagaacagagtttgtaccactgtagcaatagctattgttgcagaaacatgttcaccctttacagtactccctgccttaatgaatgaatacagagttcctgaactgaatgttcaaaatggagtgttaaaatcgctttccttcttgtttgaatatattggtgaaatgggaaaagactacatttatgccgtaacaccgttacttgaagatgctttaatggatagagaccttgtacacagacagacggctagtgcagtggtacagcacatgtcacttggggtttatggatttggttgtgaagattcgctgaatcacttgttgaactatgtatggcccaatgtatttgagacatctcctcatgtaattcaggcagttatgggagccctagagggcctgagagttgctattggaccatgtagaatgttgcaatattgtttacagggtctgtttcacccagcccggaaagtcagagatgtatattggaaaatttacaactccatctacattggttcccaggacgctctcatagcacattacccaagaatctacaacgatgataagaacacctatattcgttatgaacttgactatatcttataattttattgtttattttgtgtttaatgcacagctacttcacaccttaaacttgctttgatttggtgatgtaaacttttaaacattgcagatcagtgtagaactggtcatagaggaagagctagaaatccagtagcatgatttttaaataacctgtctttgtttttgatgttaaacagtaaatgccagtagtgaccaagaacacagtgattatatacactatactggagggatttcatttttaattcatctttatgaagatttagaactcattccttgtgtttaaagggaatgtttaattgagaaataaacatttgtgtacaaaatgctaa

SEQ ID NO: 174441 - protein, 495 aa, Artificial Sequence
  derived and/or modified sequence
MRSPVRDLARNDGEESTDRTPLLPGAPRAEAAPVCCSARYNLAILAFFGFFIVYALRVNLSVALVDMVDSNTTLEDNRTSKACPEHSAPIKVHHNQTGKKYQWDAETQGWILGSFFYGYIITQIPGGYVASKIGGKMLLGFGILGTAVLTLFTPIAADLGVGPLIVLRALEGLGEGVTFPAMHAMWSSWAPPLERSKLLSISYAGAQLGTVISLPLSGIICYYMNWTYVFYFFGTIGIFWFLLWIWLVSDTPQKHKRISHYEKEYILSSLRNQLSSQKSVPWVPILKSLPLWAIVVAHFSYNWTFYTLLTLLPTYMKEILRFNVQENGFLSSLPYLGSWLCMILSGQAADNLRAKWNFSTLCVRRIFSLIGMIGPAVFLVAAGFIGCDYSLAVAFLTISTTLGGFCSSGFSINHLDIAPSYAGILLGITNTFATIPGMVGPVIAKSLTPDNTVGEWQTVFYIAAAINVFGAIFFTLFAKGEVQNWALNDHHGHRH

SEQ ID NO: 174442 - DNA, 3333 bp, Artificial Sequence
  derived and/or modified sequence
gtggccgcggggcggtgtcatcgcccccgccccgcccggtccagccagctcggcccgggggcttcgggctgtcgggccggcgctcccttctctgccaggtggcgagtacacctgctcacgtaggcgtcatgaggtctccggttcgagacctggcccggaacgatggcgaggagagcacggaccgcacgcctcttctaccgggcgccccacgggccgaagccgctccagtgtgctgctctgctcgttacaacttagcaattttggccttttttggtttcttcattgtgtatgcattacgtgtgaatctgagtgttgcgttagtggatatggtagattcaaatacaactttagaagataatagaacttccaaggcgtgtccagagcattctgctcccataaaagttcatcataatcaaacgggtaagaagtaccaatgggatgcagaaactcaaggatggattctcggttcctttttttatggctacatcatcacacagattcctggaggatatgttgccagcaaaataggggggaaaatgctgctaggatttgggatccttggcactgctgtcctcaccctgttcactcccattgctgcagatttaggagttggaccactcattgtactcagagcactagaaggactaggagagggtgttacatttccagccatgcatgccatgtggtcttcttgggctccccctcttgaaagaagcaaacttcttagcatttcatatgcaggagcacagcttgggacagtaatttctcttcctctttctggaataatttgctactatatgaattggacttatgtcttctacttttttggtactattggaatattttggtttcttttgtggatctggttagttagtgacacaccacaaaaacacaagagaatttcccattatgaaaaggaatacattctttcatcattaagaaatcagctttcttcacagaagtcagtgccgtgggtacccattttaaaatccctgccactttgggctatcgtagttgcacacttttcttacaactggactttttatactttattgacattattgcctacttatatgaaggagatcctaaggttcaatgttcaagagaatgggtttttatcttcattgccttatttaggctcttggttatgtatgatcctgtctggtcaagctgctgacaatttaagggcaaaatggaatttttcaactttatgtgttcgcagaatttttagccttataggaatgattggacctgcagtattcctggtagctgctggcttcattggctgtgattattctttggccgttgctttcctaactatatcaacaacactgggaggcttttgctcttctggatttagcatcaaccatctggatattgctccttcgtatgctggtatcctcctgggcatcacaaatacatttgccactattccaggaatggttgggcccgtcattgctaaaagtctgacccctgataacactgttggagaatggcaaaccgtgttctatattgctgctgctattaatgtttttggtgccattttctttacactattcgccaaaggtgaagtacaaaactgggctctcaatgatcaccatggacacagacactgaaggaaccaataaataatcctgcctctattaatgtatttttatttatcatgtaacctcaaagtgccttctgtattgtgtaagcattctatgtctttttttaattgtacttgtattagatttttaaggcctataatcatgaaatatcactagttgccagaataataaaatgaactgtgtttaattatgaataatatgtaagctaggacttctactttaggttcacatacctgcctgctagtcgggcaacatgaagtaggacagttctgttgattttttagggccatactaaagggaatgagctgaaacagacctcctgatacctttgcttaattaaactagatgataattctcaggtactgataaacacctgttgttgttcactttcctcataaaaattgtcagctctctctgacacttagacctcaaactttagcatctctgtggagctgccatccactgtataatttcgcctggcaactggactgaggggagtgtgcccaggcagctgccaagcactccctccctggcttcagggtcagagtgcccagcgtttatcagaggcagcatccaagcccagagccagtgtcgactcttcggctggtgcctttcctctgaggggctatcaatgtgtagataaagccctgagtaggcaagagcagtgagatccactgctatggtcttgatacatcctcaaactttcccttcccagcacagaggaatattggctggcatgcaacctgcaaaagaaaaatgcgaagcggccgggcacggtggctcatgcctgtaatcccagcactttggggggctgaggtgggcgaatcatgagatcaggagttcgagaccagcctggccagcatggtgaaaccccatctctactaaaaatacaaaaaattagctgggcgtggtgacgggcgcctgtaatcccagatactcaggaggctgaggtaggagaatcacttgaacctgggaggtggaagttgcagtgaaccaagatcacgccactgcactccagcctgggcgatggagcgagactccaactcaaaaaaaaaaaaagaataaagaaagaaaagtgcgatgcccagtcaatcacaaataagatcatcctggtttaaatctactctcacatggatcacagtataaatttctatgtgctgtgttttgttcgtttgtattttgtagagatggggtctcgttttgtcgcccaggctggttttgaactcctggcttcaagcgatcctcctgtctcggcctcacaaagtgttgagactacaggcatgagccactgtgcccagcctgttctatgtttttaagctacacgagaattttttttttaattaattctcactgtttgttcagtctgtcttcatctaagtttgtgttgcagtttaaagttaaagtgacttttaaaggccacatcacctgagactagggtaatcatctttacttctggttcctgaaatcatatttttccagtggaccatcctccagtggctgtggttgttgagcatgctttcagaacacctatgtggcttaaaacttagtttatgttttgtgttcaacactacgtgtaatattttaaaactgtttaatgtgatgtgaatacatttatgtacatttatttttaaatttgtaaatagctttaaattgctatggcaatgtttcttttataaatcatcaaaataaacctttgtgaattgaaaaaaaaaaaaaaaaaaaa

SEQ ID NO: 174443 - DNA, 1488 bp, Artificial Sequence
  derived and/or modified sequence
atgaggtcccctgtgagggacctggcaaggaatgatggtgaggagtccacagaccgaacccctcttctccccggggcgcccagggcggaagccgcaccggtgtgttgtagcgccaggtacaacctcgctatcctggccttctttggattcttcatcgtgtatgcattgcgggtgaaccttagcgttgctttagtcgatatggtggactctaacacgacattagaggataataggactagtaaggcctgcccagaacacagtgctcccatcaaggtgcaccataaccagaccgggaaaaagtatcagtgggatgcagaaacgcagggatggattttgggttccttcttctatggctatattatcacgcagattcctggcggatatgtcgcaagtaaaattggcggtaagatgctgcttggatttggcatccttggtacagctgtgctcaccttattcacccctattgcagcagacttgggagtcggccctttaattgtcctccgggcgctggaagggctgggtgagggtgtcacgttcccggccatgcatgctatgtggagcagctgggcacctcctctggaacgatctaagctcctatctatcagctatgctggcgcccagctagggaccgtcatctctctgcccctaagtggaataatctgttattatatgaactggacttatgtgttctactttttcggcaccataggaatcttttggttcttgctttggatctggctggtctcggacacaccccagaaacataagcgcatcagtcactacgagaaggaatacattttatcatctctgagaaatcagctgagttctcagaagtctgtgccctgggtccctatcctcaagtcgctgcccctttgggccatcgtagtagctcatttttcatacaattggacgttctacacattgctgaccctgctgccaacgtacatgaaggagattctgagattcaatgtccaggagaatggttttctgagctccctgccctacctgggctcttggctgtgcatgatcctatccggccaagcagctgacaaccttcgtgccaagtggaatttcagcaccctctgcgtcaggagaatctttagtctgattggtatgatagggcccgctgtgtttctggtggctgccggattcattggctgtgattactctttggctgtggccttcctgacaatcagtaccacattaggtgggttctgctcttccgggttcagcatcaaccacctggacatagcacctagctacgccggcatactcctgggcatcacaaacacgttcgccacaattccgggaatggtcggtccagtgatcgcaaagagtttgacacctgataacacagtgggcgaatggcagaccgtgttttacatcgccgctgccattaacgtgttcggagcgatctttttcactctgttcgccaagggggaggttcaaaattgggccctgaacgatcaccacggccacagacattag

SEQ ID NO: 174444 - DNA, 1488 bp, Artificial Sequence
  derived and/or modified sequence
atgaggagccctgtgcgggacctggccagaaatgatggagaggagagcacagacaggacccccctgctgcccggggcccccagggctgaggccgcccctgtgtgctgcagcgcccgctacaacctggccatcctggccttcttcggcttcttcatcgtgtatgccctgcgggtgaacctgtctgtggccctggtggacatggtggacagcaacaccaccctggaggacaacagaaccagcaaggcctgcccagagcacagcgcccccatcaaggtgcaccacaaccagacaggcaagaagtaccagtgggatgctgagacccagggctggatcctgggcagcttcttctacggctacatcatcacccagatccctgggggctacgtggccagcaagattggaggcaagatgctgctgggcttcggcatcctgggcacagctgtgctgaccctcttcacccccatcgctgctgacctgggcgtgggccccctgattgtgctgcgggccctggagggcctgggggagggcgtgaccttccctgccatgcacgccatgtggagctcctgggccccacccctggagaggagcaagctgctgagcatctcctatgctggggcccagctgggcaccgtcatcagcctgcccctgagcggcatcatctgctactacatgaactggacctacgtgttctacttcttcggcaccatcggcatcttctggttcctgctgtggatctggctggtgtctgacaccccccagaagcacaagaggatcagccactatgagaaggagtacatcctgagcagcctgaggaaccagctgagcagccagaagtctgtgccctgggtgcccatcctgaagagcctgcccctgtgggccatcgtggtggcccacttctcctacaactggaccttctacaccctgctgaccctgctgcccacctacatgaaggagatcctgcgcttcaacgtgcaggagaatggcttcctgagcagcctgccctacctgggctcctggctgtgcatgatcctgagcggccaggccgctgacaacctgcgggccaagtggaacttcagcaccctgtgtgtgcggcgcatcttcagcctcatcggcatgattggccctgctgtgttcctggtggccgccggcttcatcggctgtgactacagcctggccgtggccttcctgaccatcagcaccaccctgggcggcttctgcagcagcggcttcagcatcaaccacctggacatcgcccccagctatgccggcatcctgctgggcatcaccaacacctttgccaccatccctggcatggtgggccctgtgattgccaagagcctgaccccagacaacacagtgggggagtggcagaccgtcttctacatcgccgccgccatcaacgtgtttggagccatcttcttcaccctgtttgccaagggggaggtgcagaactgggccctgaatgaccaccacggccaccgccactag

SEQ ID NO: 174445 - DNA, 1488 bp, Artificial Sequence
  derived and/or modified sequence
atgcggagccccgtgcgggacctggcccggaacgacggcgaggagagtaccgataggacacctttgctacctggcgcgcctcgcgctgaggctgcccctgtatgctgcagcgccaggtacaatttagctatcctcgcattctttggtttttttatagtctacgcactccgcgtgaacctttccgtagcactggtcgacatggtggacagtaacactacactggaagacaatcgaacatccaaagcttgtcccgagcactccgccccaattaaggtgcaccacaatcagacgggtaagaagtaccaatgggatgccgaaacgcagggctggatactcggtagcttcttctacggttatattattacacagatcccaggcggctatgtggcctccaaaatcggcggcaaaatgttgctgggcttcgggatactgggcaccgctgtgcttactctcttcactcccatcgctgcagacctcggcgtaggccctctcattgtgctgagagcactcgagggactgggggaaggtgtaacattccccgctatgcacgctatgtggagtagttgggcgccaccgctggaaaggtctaagctactgtcaatctcatatgctggggcacagctcggaactgtaattagcttgcctctatctggcattatatgttattatatgaattggacttacgttttttacttctttgggaccatcggcattttctggtttctcctgtggatctggctagtctccgacacaccccagaagcataaacgcataagtcactacgagaaagagtacatactgtccagtcttagaaaccagttgagctcccagaaatctgttccttgggtacccatacttaagtccctgccactctgggctatcgtggttgctcactttagttacaattggacattttataccctccttacactgttgccaacttacatgaaggaaattctgaggtttaatgttcaggaaaatggcttcctgtctagcctgccctacctgggatcctggttatgcatgatcttaagcggacaggctgccgataacctgagagccaaatggaatttttccaccctctgtgttcggcgaatcttcagtctgatcgggatgatcggccctgccgtgtttctagtggccgccggatttataggatgtgattattcattggccgtcgcctttcttactataagcactacactcggcgggttttgtagcagtgggttctctatcaatcacttggacattgccccatcctatgccggaatcctcctggggatcacgaacaccttcgctacaataccgggcatggtgggaccggtgatcgcaaaatctctcactcctgacaacaccgtcggagagtggcagacggtcttttatatcgctgcggccattaatgtcttcggcgctatattcttcacactgtttgccaagggagaggtgcaaaactgggccttgaacgaccaccatggacacagacattag

SEQ ID NO: 174446 - DNA, 1488 bp, Artificial Sequence
  derived and/or modified sequence
atgcgatccccagttagggatctcgcccgaaacgatggggaggagtcaacagatcggactcctcttctacctggagcacctagggctgaggccgcacctgtttgttgctctgctcgctacaacctagccatcctagcttttttcggatttttcatcgtttacgcactgcgcgtaaatctgagcgtggctctagtggatatggtcgacagcaacaccacactggaggacaaccgcacatcgaaggcctgtccagaacattccgcgccaataaaagtgcaccacaatcagaccggcaaaaaataccagtgggatgccgaaactcagggctggattctaggatctttcttctacgggtacattatcacccaaatccccggaggttacgttgctagcaaaatcgggggaaagatgctcctggggttcggcattttaggcactgcagttctcacgctttttactccgattgcagccgacttaggtgtggggccactcatcgtgctgagagctctggaaggcttaggcgaaggcgtcaccttcccggctatgcatgcaatgtggagttcatgggcaccacctctagagcgcagcaaattgctctcaatcagctacgccggtgcacagcttgggacagtcatctctttgcccctcagtggaattatttgctattacatgaactggacctacgttttctacttttttggcaccatcggtattttttggtttttgttgtggatttggctggtcagcgatactcctcaaaaacacaaaaggatctcacactacgaaaaggagtacatactttcgtccctaagaaatcagctctctagtcaaaagagcgtgccttgggtccccatactgaagtctctgcctctctgggccatcgttgtggcccatttctcatataactggactttttacactttgctgaccctcctgcctacctatatgaaagagattttacgatttaacgtccaggagaatgggtttcttagcagtctgccgtatctggggtcatggctgtgcatgatcctctccggccaggcagccgataatctgcgggcaaagtggaatttcagcactctctgtgtgcgtcggatattctccctgatcgggatgatcggcccagctgtgttcctcgtggctgctggcttcattggatgcgactattccctggcagtggcgtttctaactatctcgacaacactcggtggcttttgcagcagtggttttagtatcaaccacttggatatagcacctagctacgcaggcatcctcctggggataacaaacactttcgccactatcccaggcatggtcggtcccgtgatcgccaaatccctgacacctgataatacagtcggagagtggcagacagtcttctatatcgctgcagctattaacgtgtttggagccattttctttaccctcttcgctaagggagaagttcagaattgggcattgaatgatcatcacgggcacaggcattag

SEQ ID NO: 174447 - DNA, 3455 bp, Artificial Sequence
  derived and/or modified sequence
ggctcactttgcgccaatcctacgagaactcccagaactccgcttccctagtccaacccaagccagagttgcccacacctaagatggcggcgggggcggagtcggcgcggccgcctctgggcgggaccgcggggactagacgtggccgcggggcggtgtcatcgcccccgccccgcccggtccagccagctcggcccgggggcttcgggctgtcgggccggcgctcccttctctgccaggtggcgagtacacctgctcacgtaggcgtcatgaggtctccggttcgagacctggcccggaacgatggcgaggagagcacggaccgcacgcctcttctaccgggcgccccacgggccgaagccgctccagtgtgctgctctgctcgttacaacttagcaattttggccttttttggtttcttcattgtgtatgcattacgtgtgaatctgagtgttgcgttagtggatatggtagattcaaatacaactttagaagataatagaacttccaaggcgtgtccagagcattctgctcccataaaagttcatcataatcaaacgggtaagaagtaccaatgggatgcagaaactcaaggatggattctcggttcctttttttatggctacatcatcacacagattcctggaggatatgttgccagcaaaataggggggaaaatgctgctaggatttgggatccttggcactgctgtcctcaccctgttcactcccattgctgcagatttaggagttggaccactcattgtactcagagcactagaaggactaggagagggtgttacatttccagccatgcatgccatgtggtcttcttgggctccccctcttgaaagaagcaaacttcttagcatttcatatgcaggagcacagcttgggacagtaatttctcttcctctttctggaataatttgctactatatgaattggacttatgtcttctacttttttggtactattggaatattttggtttcttttgtggatctggttagttagtgacacaccacaaaaacacaagagaatttcccattatgaaaaggaatacattctttcatcattaagaaatcagctttcttcacagaagtcagtgccgtgggtacccattttaaaatccctgccactttgggctatcgtagttgcacacttttcttacaactggactttttatactttattgacattattgcctacttatatgaaggagatcctaaggttcaatgttcaagagaatgggtttttatcttcattgccttatttaggctcttggttatgtatgatcctgtctggtcaagctgctgacaatttaagggcaaaatggaatttttcaactttatgtgttcgcagaatttttagccttataggaatgattggacctgcagtattcctggtagctgctggcttcattggctgtgattattctttggccgttgctttcctaactatatcaacaacactgggaggcttttgctcttctggatttagcatcaaccatctggatattgctccttcgtatgctggtatcctcctgggcatcacaaatacatttgccactattccaggaatggttgggcccgtcattgctaaaagtctgacccctgataacactgttggagaatggcaaaccgtgttctatattgctgctgctattaatgtttttggtgccattttctttacactattcgccaaaggtgaagtacaaaactgggctctcaatgatcaccatggacacagacactgaaggaaccaataaataatcctgcctctattaatgtatttttatttatcatgtaacctcaaagtgccttctgtattgtgtaagcattctatgtctttttttaattgtacttgtattagatttttaaggcctataatcatgaaatatcactagttgccagaataataaaatgaactgtgtttaattatgaataatatgtaagctaggacttctactttaggttcacatacctgcctgctagtcgggcaacatgaagtaggacagttctgttgattttttagggccatactaaagggaatgagctgaaacagacctcctgatacctttgcttaattaaactagatgataattctcaggtactgataaacacctgttgttgttcactttcctcataaaaattgtcagctctctctgacacttagacctcaaactttagcatctctgtggagctgccatccactgtataatttcgcctggcaactggactgaggggagtgtgcccaggcagctgccaagcactccctccctggcttcagggtcagagtgcccagcgtttatcagaggcagcatccaagcccagagccagtgtcgactcttcggctggtgcctttcctctgaggggctatcaatgtgtagataaagccctgagtaggcaagagcagtgagatccactgctatggtcttgatacatcctcaaactttcccttcccagcacagaggaatattggctggcatgcaacctgcaaaagaaaaatgcgaagcggccgggcacggtggctcatgcctgtaatcccagcactttggggggctgaggtgggcgaatcatgagatcaggagttcgagaccagcctggccagcatggtgaaaccccatctctactaaaaatacaaaaaattagctgggcgtggtgacgggcgcctgtaatcccagatactcaggaggctgaggtaggagaatcacttgaacctgggaggtggaagttgcagtgaaccaagatcacgccactgcactccagcctgggcgatggagcgagactccaactcaaaaaaaaaaaaagaataaagaaagaaaagtgcgatgcccagtcaatcacaaataagatcatcctggtttaaatctactctcacatggatcacagtataaatttctatgtgctgtgttttgttcgtttgtattttgtagagatggggtctcgttttgtcgcccaggctggttttgaactcctggcttcaagcgatcctcctgtctcggcctcacaaagtgttgagactacaggcatgagccactgtgcccagcctgttctatgtttttaagctacacgagaattttttttttaattaattctcactgtttgttcagtctgtcttcatctaagtttgtgttgcagtttaaagttaaagtgacttttaaaggccacatcacctgagactagggtaatcatctttacttctggttcctgaaatcatatttttccagtggaccatcctccagtggctgtggttgttgagcatgctttcagaacacctatgtggcttaaaacttagtttatgttttgtgttcaacactacgtgtaatattttaaaactgtttaatgtgatgtgaatacatttatgtacatttatttttaaatttgtaaatagctttaaattgctatggcaatgtttcttttataaatcatcaaaataaacctttgtgaattga

SEQ ID NO: 174448 - DNA, 1488 bp, Artificial Sequence
  derived and/or modified sequence
atgagaagccccgtgagagacctggccagaaacgacggcgaggagagcaccgacagaacccccctgctgcccggcgcccccagagccgaggccgcccccgtgtgctgcagcgccagatacaacctggccatcctggccttcttcggcttcttcatcgtgtacgccctgagagtgaacctgagcgtggccctggtggacatggtggacagcaacaccaccctggaggacaacagaaccagcaaggcctgccccgagcacagcgcccccatcaaggtgcaccacaaccagaccggcaagaagtaccagtgggacgccgagacccagggctggatcctgggcagcttcttctacggctacatcatcacccagatccccggcggctacgtggccagcaagatcggcggcaagatgctgctgggcttcggcatcctgggcaccgccgtgctgaccctgttcacccccatcgccgccgacctgggcgtgggccccctgatcgtgctgagagccctggagggcctgggcgagggcgtgaccttccccgccatgcacgccatgtggagcagctgggccccccccctggagagaagcaagctgctgagcatcagctacgccggcgcccagctgggcaccgtgatcagcctgcccctgagcggcatcatctgctactacatgaactggacctacgtgttctacttcttcggcaccatcggcatcttctggttcctgctgtggatctggctggtgagcgacaccccccagaagcacaagagaatcagccactacgagaaggagtacatcctgagcagcctgagaaaccagctgagcagccagaagagcgtgccctgggtgcccatcctgaagagcctgcccctgtgggccatcgtggtggcccacttcagctacaactggaccttctacaccctgctgaccctgctgcccacctacatgaaggagatcctgagattcaacgtgcaggagaacggcttcctgagcagcctgccctacctgggcagctggctgtgcatgatcctgagcggccaggccgccgacaacctgagagccaagtggaacttcagcaccctgtgcgtgagaagaatcttcagcctgatcggcatgatcggccccgccgtgttcctggtggccgccggcttcatcggctgcgactacagcctggccgtggccttcctgaccatcagcaccaccctgggcggcttctgcagcagcggcttcagcatcaaccacctggacatcgcccccagctacgccggcatcctgctgggcatcaccaacaccttcgccaccatccccggcatggtgggccccgtgatcgccaagagcctgacccccgacaacaccgtgggcgagtggcagaccgtgttctacatcgccgccgccatcaacgtgttcggcgccatcttcttcaccctgttcgccaagggcgaggtgcagaactgggccctgaacgaccaccacggccacagacactag

SEQ ID NO: 174449 - protein, 582 aa, Artificial Sequence
  derived and/or modified sequence
MTQGPGGRAPPAPPAPPEPEAPTTFCALLPRMPQWKFAAPGGFLGRGPAAARAAGASGGADPQPEPAGPGGVPALAAAVLGACEPRCAAPCPLPALSRCRGAGSRGSRGGRGAAGSGDAAAAAEWIRKGSFIHKPAHGWLHPDARVLGPGVSYVVRYMGCIEVLRSMRSLDFNTRTQVTREAINRLHEAVPGVRGSWKKKAPNKALASVLGKSNLRFAGMSISIHISTDGLSLSVPATRQVIANHHMPSISFASGGDTDMTDYVAYVAKDPINQRACHILECCEGLAQSIISTVGQAFELRFKQYLHSPPKVALPPERLAGPEESAWGDEEDSLEHNYYNSIPGKEPPLGGLVDSRLALTQPCALTALDQGPSPSLRDACSLPWDVGSTGTAPPGDGYVQADARGPPDHEEHLYVNTQGLDAPEPEDSPKKDLFDMRPFEDALKLHECSVAAGVTAAPLPLEDQWPSPPTRRAPVAPTEEQLRQEPWYHGRMSRRAAERMLRADGDFLVRDSVTNPGQYVLTGMHAGQPKHLLLVDPEGVVRTKDVLFESISHLIDHHLQNGQPIVAAESELHLRGVVSREP

SEQ ID NO: 174450 - DNA, 1749 bp, Artificial Sequence
  derived and/or modified sequence
atgacccagggccccggcggcagagccccccccgccccccccgccccccccgagcccgaggcccccaccaccttctgcgccctgctgcccagaatgccccagtggaagttcgccgcccccggcggcttcctgggcagaggccccgccgccgccagagccgccggcgccagcggcggcgccgacccccagcccgagcccgccggccccggcggcgtgcccgccctggccgccgccgtgctgggcgcctgcgagcccagatgcgccgccccctgccccctgcccgccctgagcagatgcagaggcgccggcagcagaggcagcagaggcggcagaggcgccgccggcagcggcgacgccgccgccgccgccgagtggatcagaaagggcagcttcatccacaagcccgcccacggctggctgcaccccgacgccagagtgctgggccccggcgtgagctacgtggtgagatacatgggctgcatcgaggtgctgagaagcatgagaagcctggacttcaacaccagaacccaggtgaccagagaggccatcaacagactgcacgaggccgtgcccggcgtgagaggcagctggaagaagaaggcccccaacaaggccctggccagcgtgctgggcaagagcaacctgagattcgccggcatgagcatcagcatccacatcagcaccgacggcctgagcctgagcgtgcccgccaccagacaggtgatcgccaaccaccacatgcccagcatcagcttcgccagcggcggcgacaccgacatgaccgactacgtggcctacgtggccaaggaccccatcaaccagagagcctgccacatcctggagtgctgcgagggcctggcccagagcatcatcagcaccgtgggccaggccttcgagctgagattcaagcagtacctgcacagcccccccaaggtggccctgccccccgagagactggccggccccgaggagagcgcctggggcgacgaggaggacagcctggagcacaactactacaacagcatccccggcaaggagccccccctgggcggcctggtggacagcagactggccctgacccagccctgcgccctgaccgccctggaccagggccccagccccagcctgagagacgcctgcagcctgccctgggacgtgggcagcaccggcaccgccccccccggcgacggctacgtgcaggccgacgccagaggcccccccgaccacgaggagcacctgtacgtgaacacccagggcctggacgcccccgagcccgaggacagccccaagaaggacctgttcgacatgagacccttcgaggacgccctgaagctgcacgagtgcagcgtggccgccggcgtgaccgccgcccccctgcccctggaggaccagtggcccagcccccccaccagaagagcccccgtggcccccaccgaggagcagctgagacaggagccctggtaccacggcagaatgagcagaagagccgccgagagaatgctgagagccgacggcgacttcctggtgagagacagcgtgaccaaccccggccagtacgtgctgaccggcatgcacgccggccagcccaagcacctgctgctggtggaccccgagggcgtggtgagaaccaaggacgtgctgttcgagagcatcagccacctgatcgaccaccacctgcagaacggccagcccatcgtggccgccgagagcgagctgcacctgagaggcgtggtgagcagagagccctag

SEQ ID NO: 174451 - DNA, 1749 bp, Artificial Sequence
  derived and/or modified sequence
atgacccaggggcccggcggccgggcgcctcctgccccccctgcccctcctgaaccggaggcacctaccactttttgcgcccttctgccgcgtatgccacagtggaagttcgctgccccggggggcttcctgggtagaggcccggcagcagcacgcgccgctggtgcctccggcggcgcggatcctcagcccgagcccgcaggcccaggcggtgttcccgccttggccgcagctgtgttgggagcctgtgagccgcgctgcgctgccccctgccctctacctgctctctctcgttgtagaggagccgggtcaagaggctcgaggggcgggcggggcgcggcaggcagtggtgatgccgctgctgctgcagagtggattaggaagggcagtttcatccataagcctgctcacgggtggctccatcccgacgcgcgggtgctgggtccgggagtgtcctatgtagtaaggtacatgggctgcattgaggtgctgcgatcaatgcgatctttagactttaatactcgcacccaggtgacaagggaggcaattaaccggctgcatgaagcagtccctggggtgcggggatcatggaagaagaaggctcccaacaaggctttagcctccgtgttgggcaaaagcaatttgagattcgcaggaatgagtatctcaattcacattagtaccgatggactcagcctgtccgtaccggccacaaggcaggtgatcgccaaccaccatatgccatcaatctccttcgccagcggaggcgacaccgacatgacagattacgttgcctacgtcgccaaggacccgattaaccagcgggcctgtcacatcctagagtgttgtgagggcttggcccagagtattattagcactgtgggtcaagcttttgagttacgctttaaacagtacttacacagcccaccaaaagtggcactacccccagagagactggcaggccccgaggaatccgcatggggcgatgaggaagacagcctggaacacaattactacaacagtatacccgggaaagagccgccactggggggtctggtcgattccaggctagcactgactcagccttgcgcactgactgctctagatcagggtccctctccaagcctcagggatgcctgctcactgccctgggatgtgggtagcactgggactgctccaccaggggacggctacgtgcaggccgatgctagaggaccccctgaccacgaagagcatctgtatgtgaatacacagggtctcgatgcacctgagcccgaagattcacctaagaaggatttgtttgacatgcgaccgtttgaagacgcgcttaagttgcatgaatgttcagtggccgccggcgtgacagcggcgccactgccacttgaagaccagtggccaagcccgccaacccgccgggcccccgtagcacccacagaagagcagctgcggcaggagccttggtatcacggacggatgtctcggcgtgctgccgaacggatgctgcgcgctgatggagacttcctggtccgggatagcgtcacaaaccccggtcagtacgtgcttacgggtatgcatgccggccaaccaaagcatctcctcctggtagatcctgagggtgtggtgaggacaaaggatgtgttattcgagtcaatctcccacctaatagatcatcacctgcagaacggccaacctatagttgcagccgagagtgagctccacctacgaggagtggtcagtagggaaccgtag

SEQ ID NO: 174452 - DNA, 1749 bp, Artificial Sequence
  derived and/or modified sequence
atgacccagggccctgggggccgggcccccccagcccccccagcccctcctgagcctgaggcccccaccaccttctgtgccctgctgcccaggatgccccagtggaagtttgctgcccctgggggcttcctgggccggggccctgctgctgcccgggccgccggggccagcggcggcgctgacccccagcctgagcctgctggccctggaggagtgcctgccctggccgctgctgtgctgggcgcctgtgagccccgctgtgccgccccctgccccctgcctgccctgagccgctgccgcggggccggcagccggggcagcagaggaggaagaggagctgctggcagcggagatgctgctgctgctgctgagtggatcaggaagggcagcttcatccacaagccagcccacggctggctgcacccagatgcccgggtgctgggccctggggtgtcctatgtggtgcgctacatgggctgcatcgaggtgctgcgctccatgaggagcctggacttcaacaccaggacccaggtgacccgggaggccatcaaccggctgcatgaagctgtgcctggggtgcggggctcctggaagaagaaggcccccaacaaggccctggcctctgtgctgggcaagagcaacctgcgctttgctggcatgagcatcagcatccacatcagcacagatggcctgagcctgtctgtgcctgccacccggcaggtgattgccaaccaccacatgcccagcatcagctttgccagcggcggggacacagacatgacagattatgtggcctacgtggccaaggaccccatcaaccagagggcctgccacatcctggagtgctgtgagggcctggcccagagcatcatcagcacagtgggccaggcctttgagctgcgcttcaagcagtacctgcacagcccccccaaggtggccctgcccccagagcggctggccggccctgaggagagcgcctggggagatgaggaggacagcctggagcacaactactacaacagcatccctgggaaggagccccccctgggcggcctggtggacagccggctggccctgacccagccctgtgccctgacagccctggaccagggccccagccccagcctgagagatgcctgcagcctgccctgggatgtgggcagcactggaacagcccctcctggagatggctacgtgcaggctgatgcccggggccccccagaccacgaggagcacctgtatgtgaacacccagggcctggatgcccctgagcctgaggacagccccaagaaggacctgtttgacatgaggccctttgaagatgccctgaagctgcatgaatgttctgtggccgccggcgtgacagctgcccccctgcccctggaggaccagtggcccagcccccccacccggcgggcccctgtggcccccacagaggagcagctgcggcaggagccctggtaccacggccgcatgagccggcgggctgctgagaggatgctgcgggcagatggagacttcctggtgcgggacagcgtgaccaaccctggccagtatgtgctgaccggcatgcacgccggccagcccaagcacctgctgctggtggaccctgagggcgtggtgaggaccaaggatgtgctgtttgagagcatcagccacctgattgaccaccacctgcagaatggccagcccatcgtggccgctgagagcgagctgcacctgcggggcgtggtgtcccgggagccctag

SEQ ID NO: 174453 - DNA, 1749 bp, Artificial Sequence
  derived and/or modified sequence
atgacccagggccccggcggccgggccccccccgccccccccgcccctcctgaacctgaagcacccacaacgttctgcgccttactaccccgtatgccacaatggaagttcgcagcacctgggggctttctggggcgcggtcctgcagcagcacgggccgccggtgcatcgggcggagccgatcctcagcccgagcccgccgggcccggaggagtccctgccttggcagcagccgtattaggagcgtgcgaaccccgttgcgccgccccttgccccctgccagccctgtcacgttgtaggggagctgggtctaggggctctcgggggggcagaggagccgcggggtctggggacgccgcagcagcagcggagtggattagaaagggaagtttcattcacaaacctgctcacggatggttacatcccgacgcaagggtactgggacccggagtcagctacgttgtccgctatatgggatgcattgaggtgttacggtctatgaggtctctggacttcaacacgaggacacaggtcactagagaggccataaatcgtctgcatgaagcggtgccaggggtgagaggttcctggaaaaaaaaggctcctaataaggccctggcatcggtcctagggaaatccaatttgcgtttcgcgggcatgagtattagcattcatatttctaccgacggactgtccctgagcgttcctgccacgaggcaagtgatcgctaaccatcacatgccatctataagttttgcttcgggtggcgacaccgacatgactgactacgtggcgtacgtggccaaggatcctattaaccagcgggcctgccatatattagagtgctgtgaaggccttgctcagagcataatttccaccgtggggcaggcctttgaattaaggttcaagcagtatctgcattccccccctaaggttgcattgccacccgagcggctcgccggccctgaagaatctgcgtggggagatgaggaagattcactggagcacaactactacaattcgattcctggtaaagagcctcctttagggggtctcgtggactccagacttgcgcttacacagccttgtgccctgacggccctcgaccagggcccatctccttcattacgcgacgcctgctccctcccttgggatgtgggcagcaccggaacagctccacccggagacggctatgtgcaggcagacgcccgtggaccacctgatcacgaagaacacctatacgtgaacacccaaggcctcgatgcacctgaacctgaagactccccaaaaaaggacctgtttgatatgcgacctttcgaggacgcactcaaactgcacgaatgctccgttgcggccggagtcactgcggcccctctccctctggaggatcaatggccgtccccacccactaggcgggctcccgtggcccccaccgaggagcaactgcgacaggagccatggtatcacggtaggatgtctaggcgcgctgctgagagaatgttaagggcagacggagactttctggttcgagactctgttactaaccctgggcaatacgttctcaccgggatgcacgcaggccaaccaaaacacctccttctggtcgaccctgagggggtcgtacgtacaaaagacgtcttgttcgagagcatctcgcacttgattgatcaccatctgcagaatgggcaaccaatcgtagcagctgagtccgaactacatctccggggggtggtcagcagagagccttag

SEQ ID NO: 174454 - DNA, 1749 bp, Artificial Sequence
  derived and/or modified sequence
atgactcagggaccgggaggccgagctccgcctgcccctcccgctccgccagagcccgaagcccctaccaccttttgtgcccttcttcctagaatgccccagtggaaattcgcagcaccaggaggatttctggggagaggtcctgcagctgcacgggctgcaggtgcttcaggaggggctgacccccagcccgagccagctggtccagggggagtgcccgctctagccgcagcagtattaggggcatgcgagcccaggtgtgctgcaccctgccctctccctgctctgtctcgttgtaggggcgctggatcccggggaagcagaggagggaggggcgcagcaggaagcggcgacgctgccgctgcagcagagtggatcagaaaggggtctttcatccacaagccagcgcacggatggttacaccctgacgccagggttctgggccctggggtcagttacgttgtgcggtacatgggatgtatcgaagttttgcggtcaatgagatctctggactttaatactcgcacacaagtgacgagggaggcaattaatcggctacatgaggcagtgccaggagttcgaggcagttggaagaagaaagcccctaataaagctctggcctctgttctgggcaagtccaacttaagattcgctggtatgtccatcagcattcacattagcacagatgggctatccctcagcgttcctgctacgcggcaggtgatcgccaatcaccatatgccttcaattagctttgccagcggtggcgacactgatatgacagactacgtagcgtacgtcgccaaagaccccatcaaccagcgtgcttgccacatcttagagtgttgtgagggcctagcgcagagcatcatcagcacagttggccaggccttcgagctgagattcaagcagtaccttcatagcccgccaaaagtggccctgccacctgaacggctcgccggacccgaggaatcggcctggggggacgaagaagatagcctggagcataattactacaactcaatccctgggaaggaaccaccactgggaggcctggtggattcccgactagccttgacgcagccttgcgcccttactgcactggatcagggtccctctccctcattacgggacgcctgttctctgccatgggacgtcggtagcacggggacagctccgccaggggacggatatgtgcaggctgatgccaggggtcccccagaccacgaggagcatctttatgtgaacacccagggcttggacgcgccagagcccgaagacagccccaaaaaggacctattcgacatgcggcctttcgaagatgctctgaagctgcacgagtgttctgtggcagccggagtcacagctgctccactgcccttggaggaccagtggccctcaccacccacccggagggctccagtggccccaacagaggagcagcttcggcaagaaccctggtatcacggcaggatgtctagaagagctgctgagagaatgctccgggctgacggtgactttctcgttagagactcagtcacgaatcccggtcaatacgttctcaccggaatgcatgccggtcagccaaaacatttactcctggtggacccagaaggtgttgtccggaccaaagatgtcttattcgagagcatctctcatctcattgatcatcatctccagaatggccagccgattgtagccgctgaatcagaactgcacctaagaggagtggtttctagggagccatag

SEQ ID NO: 174455 - DNA, 2490 bp, Artificial Sequence
  derived and/or modified sequence
atgacgcagggtccgggcgggcgcgcgcccccggcgccccccgcgccccccgagcccgaggcgcccaccaccttctgcgcgttgctgccccgaatgccgcagtggaagttcgcggccccgggcggcttcctgggccgcggcccggcggcggcgcgggcggctggggcctcggggggcgcggacccccaacccgagccggcgggcccggggggcgtcccggcgctggcggccgccgtcctgggcgcctgcgagccccgctgcgccgcgccctgtcccctgcccgcgctcagccgctgtcggggcgcggggtcgcgggggtcgcggggcgggcggggggcggcggggtccggggacgccgccgccgccgccgagtggatccggaagggcagcttcatccacaaacccgcgcacggctggctacaccccgacgccagggtcctggggcccggggtctcctacgtcgtgcggtacatgggctgcatcgaggttctccgctctatgcgctccctggactttaacacgcgcacgcaggtgaccagggaagccatcaaccggctccatgaggccgtgcctggcgtccggggatcctggaagaaaaaggcccccaacaaggccctggcgtccgtcctgggcaagagcaaccttcgctttgccggcatgagcatctccatccacatctccactgatggcctcagcctctccgtgcctgccacgcgccaggtcatcgccaaccaccacatgccgtccatctccttcgcgtcaggcggagacacggacatgacggattacgtggcctacgtcgccaaggaccccatcaaccagagagcctgccacatcctggagtgctgtgagggcctggcacagagcatcatcagcaccgtgggccaagctttcgagctgcgcttcaagcagtacctgcacagcccgcccaaggtggcgctgcccccagaaaggctggcagggccggaggagtcggcctggggggacgaggaggactctttggagcacaattactacaacagcatcccggggaaggagccgccgctgggcgggctagtggactccaggctggccctgacacagccctgcgccctcacggccctcgaccagggcccatctccttctctaagagatgcctgcagcctgccatgggacgtggggtccaccggtacagctccaccgggggacggctacgtgcaggcggacgcccggggccccccggaccacgaggagcacctgtatgtcaacacccagggtctggacgcccccgagccggaggacagccccaaaaaggatctgtttgacatgcgaccctttgaggatgccctgaagttgcatgagtgctcagtggcggcaggcgtgacagcagcccctcttcccttggaggaccagtggcccagcccccctacccgccgggcccctgtggcccccacggaggaacagctgcgtcaggagccctggtaccacggccggatgagccgccgggcggcagagaggatgcttcgagctgacggggacttccttgtgcgagacagcgtcaccaaccccgggcagtatgtcctcaccggcatgcacgccgggcagcccaagcacctgctgctcgtggaccccgagggcgtggtacggacgaaggacgtgctgtttgagagcatcagccacctgatcgaccaccacctgcagaacgggcagcccatcgtggccgccgagagtgagctgcacctgcgtggcgtggtctcacgggagccctgagccaggtgaccgttctcagccctggctcctgcctgttctcagccccggctcctgcctgtcatggccttggggctctcagccctcctcctggatcctggtcaggccgaaccaccgctgcctctccttcctccgcatgagcctctggcatggtccttcctccagctggccccgggctgggcagagcctcctcctgccggggcccctgcccaccccctcctttgcctggagtgagggtgttcataccaaagacggaaccatttcgcctttaaagaaaatatatccagaagcagccgctgcctcggagccctggcccttgggtccccctctcgcctggctggttcggtctaacgccccggagagtcagggctcccaggaccctggggaggaggcggattccgggcctggctgggcttcctcttcccacctgaggactgggtgcacagttgtctttgaggggggacgcttaaggtgctttggggttctcaggccaggatacatgctggcgctgaagtgcaggcagccttgaggtcacctgggatctcggggtagccaggctgctccaagacagtggatatcgaggcagtcgtgaggcccctactccacctgggagcaggggaaggacgtggttgcctggcctgggctgcgcccagcagcttccccccagtcctgccctcccagctgtcgacccagatgggatgttcggatcggtttgtaattaaacctgggaatggccacaagagc

SEQ ID NO: 174456 - protein, 270 aa, Artificial Sequence
  derived and/or modified sequence
MSQRQVLQVFEQYQKARTQFVQMVAELATRPQNIETLQNAGVMSLLRTLLLDVVPTIQQTAALALGRLANYNDDLAEAVVKCDILPQLVYSLAEQNGVPQLSVCLSEEPEDHIKAAAAWALGQIGRHTPEHARAVAVTNTLPVLLSLYMSTESSEDLQVKSKKAIKNILQKCTYLPALEPFLYDAPPNILKHVVGQFSKVLPHDSKARRLFVTSGGLKKVQEIKAEPGSLLQEYINSINSCYPEEIVRYYSPGYSDTLLQRVDSYQPLNN

SEQ ID NO: 174457 - protein, 585 aa, Artificial Sequence
  derived and/or modified sequence
MSQRQVLQVFEQYQKARTQFVQMVAELATRPQNIETLQNAGEPGARTPVAPRALSPRRLRPAALPVELLGSRSVGTGVRKSIHSFQRVFGGQAERVKLPDGCGRCALSLFPSSLHTGVMSLLRTLLLDVVPTIQQTAALALGRLANYNDDLAEAVVKCDILPQLVYSLAEQNRFYKKAAAFVLRAVGKHSPQLAQAIVDCGALDTLVICLEDFDPGVKEAAAWALRYIARHNAELSQAVVDAGAVPLLVLCIQEPEIALKRIAASALSDIAKHSPELAQTVVDAGAVAHLAQMILNPDAKLKHQILSALSQVSKHSVDLAEMVVEAEIFPVVLTCLKDKDEYVKKNASTLIREIAKHTPELSQLVVNAGGVAAVIDCIGSCKGNTRLPGIMMLGYVAAHSENLAMAVIISKGVPQLSVCLSEEPEDHIKAAAAWALGQIGRHTPEHARAVAVTNTLPVLLSLYMSTESSEDLQVKSKKAIKNILQKCTYLPALEPFLYDAPPNILKHVVGQFSKVLPHDSKARRLFVTSGGLKKVQEIKAEPGSLLQEYINSINSCYPEEIVRYYSPGYSDTLLQRVDSYQPLNN

SEQ ID NO: 174458 - protein, 509 aa, Artificial Sequence
  derived and/or modified sequence
MSQRQVLQVFEQYQKARTQFVQMVAELATRPQNIETLQNAGVMSLLRTLLLDVVPTIQQTAALALGRLANYNDDLAEAVVKCDILPQLVYSLAEQNRFYKKAAAFVLRAVGKHSPQLAQAIVDCGALDTLVICLEDFDPGVKEAAAWALRYIARHNAELSQAVVDAGAVPLLVLCIQEPEIALKRIAASALSDIAKHSPELAQTVVDAGAVAHLAQMILNPDAKLKHQILSALSQVSKHSVDLAEMVVEAEIFPVVLTCLKDKDEYVKKNASTLIREIAKHTPELSQLVVNAGGVAAVIDCIGSCKGNTRLPGIMMLGYVAAHSENLAMAVIISKGVPQLSVCLSEEPEDHIKAAAAWALGQIGRHTPEHARAVAVTNTLPVLLSLYMSTESSEDLQVKSKKAIKNILQKCTYLPALEPFLYDAPPNILKHVVGQFSKVLPHDSKARRLFVTSGGLKKVQEIKAEPGSLLQEYINSINSCYPEEIVRYYSPGYSDTLLQRVDSYQPLNN

SEQ ID NO: 174459 - DNA, 1758 bp, Artificial Sequence
  derived and/or modified sequence
atgagccagagacaggtgctgcaggtgttcgagcagtaccagaaggccagaacccagttcgtgcagatggtggccgagctggccaccagaccccagaacatcgagaccctgcagaacgccggcgagcccggcgccagaacccccgtggcccccagagccctgagccccagaagactgagacccgccgccctgcccgtggagctgctgggcagcagaagcgtgggcaccggcgtgagaaagagcatccacagcttccagagagtgttcggcggccaggccgagagagtgaagctgcccgacggctgcggcagatgcgccctgagcctgttccccagcagcctgcacaccggcgtgatgagcctgctgagaaccctgctgctggacgtggtgcccaccatccagcagaccgccgccctggccctgggcagactggccaactacaacgacgacctggccgaggccgtggtgaagtgcgacatcctgccccagctggtgtacagcctggccgagcagaacagattctacaagaaggccgccgccttcgtgctgagagccgtgggcaagcacagcccccagctggcccaggccatcgtggactgcggcgccctggacaccctggtgatctgcctggaggacttcgaccccggcgtgaaggaggccgccgcctgggccctgagatacatcgccagacacaacgccgagctgagccaggccgtggtggacgccggcgccgtgcccctgctggtgctgtgcatccaggagcccgagatcgccctgaagagaatcgccgccagcgccctgagcgacatcgccaagcacagccccgagctggcccagaccgtggtggacgccggcgccgtggcccacctggcccagatgatcctgaaccccgacgccaagctgaagcaccagatcctgagcgccctgagccaggtgagcaagcacagcgtggacctggccgagatggtggtggaggccgagatcttccccgtggtgctgacctgcctgaaggacaaggacgagtacgtgaagaagaacgccagcaccctgatcagagagatcgccaagcacacccccgagctgagccagctggtggtgaacgccggcggcgtggccgccgtgatcgactgcatcggcagctgcaagggcaacaccagactgcccggcatcatgatgctgggctacgtggccgcccacagcgagaacctggccatggccgtgatcatcagcaagggcgtgccccagctgagcgtgtgcctgagcgaggagcccgaggaccacatcaaggccgccgccgcctgggccctgggccagatcggcagacacacccccgagcacgccagagccgtggccgtgaccaacaccctgcccgtgctgctgagcctgtacatgagcaccgagagcagcgaggacctgcaggtgaagagcaagaaggccatcaagaacatcctgcagaagtgcacctacctgcccgccctggagcccttcctgtacgacgccccccccaacatcctgaagcacgtggtgggccagttcagcaaggtgctgccccacgacagcaaggccagaagactgttcgtgaccagcggcggcctgaagaaggtgcaggagatcaaggccgagcccggcagcctgctgcaggagtacatcaacagcatcaacagctgctaccccgaggagatcgtgagatactacagccccggctacagcgacaccctgctgcagagagtggacagctaccagcccctgaacaactag

SEQ ID NO: 174460 - DNA, 1530 bp, Artificial Sequence
  derived and/or modified sequence
atgagccagagacaggtgctgcaggtgttcgagcagtaccagaaggccagaacccagttcgtgcagatggtggccgagctggccaccagaccccagaacatcgagaccctgcagaacgccggcgtgatgagcctgctgagaaccctgctgctggacgtggtgcccaccatccagcagaccgccgccctggccctgggcagactggccaactacaacgacgacctggccgaggccgtggtgaagtgcgacatcctgccccagctggtgtacagcctggccgagcagaacagattctacaagaaggccgccgccttcgtgctgagagccgtgggcaagcacagcccccagctggcccaggccatcgtggactgcggcgccctggacaccctggtgatctgcctggaggacttcgaccccggcgtgaaggaggccgccgcctgggccctgagatacatcgccagacacaacgccgagctgagccaggccgtggtggacgccggcgccgtgcccctgctggtgctgtgcatccaggagcccgagatcgccctgaagagaatcgccgccagcgccctgagcgacatcgccaagcacagccccgagctggcccagaccgtggtggacgccggcgccgtggcccacctggcccagatgatcctgaaccccgacgccaagctgaagcaccagatcctgagcgccctgagccaggtgagcaagcacagcgtggacctggccgagatggtggtggaggccgagatcttccccgtggtgctgacctgcctgaaggacaaggacgagtacgtgaagaagaacgccagcaccctgatcagagagatcgccaagcacacccccgagctgagccagctggtggtgaacgccggcggcgtggccgccgtgatcgactgcatcggcagctgcaagggcaacaccagactgcccggcatcatgatgctgggctacgtggccgcccacagcgagaacctggccatggccgtgatcatcagcaagggcgtgccccagctgagcgtgtgcctgagcgaggagcccgaggaccacatcaaggccgccgccgcctgggccctgggccagatcggcagacacacccccgagcacgccagagccgtggccgtgaccaacaccctgcccgtgctgctgagcctgtacatgagcaccgagagcagcgaggacctgcaggtgaagagcaagaaggccatcaagaacatcctgcagaagtgcacctacctgcccgccctggagcccttcctgtacgacgccccccccaacatcctgaagcacgtggtgggccagttcagcaaggtgctgccccacgacagcaaggccagaagactgttcgtgaccagcggcggcctgaagaaggtgcaggagatcaaggccgagcccggcagcctgctgcaggagtacatcaacagcatcaacagctgctaccccgaggagatcgtgagatactacagccccggctacagcgacaccctgctgcagagagtggacagctaccagcccctgaacaactag

SEQ ID NO: 174461 - DNA, 1758 bp, Artificial Sequence
  derived and/or modified sequence
atgagccagcggcaggtattacaggtatttgagcagtaccagaaagctaggactcagttcgtccagatggtagccgagttggctacccggccccagaacatcgaaacactgcagaatgccggtgagcccggcgctcgaactcccgtggcccctcgcgccctatccccccgcaggctgagacccgcagccctcccagtcgaactgttgggctcacgctccgttggcaccggggtgaggaagagcatccacagcttccagcgggtgtttgggggacaggctgaacgagttaaattgcccgatgggtgtggccggtgcgccttaagcttgttcccgtcaagccttcacacgggggtgatgtcactcttgcgtactctgttgctggatgtagtgcccactatacagcaaaccgctgcactggctcttggtcggctcgcaaactacaacgacgacctggctgaagccgtggtcaagtgtgacatcctgccccagctagtttattcactcgcagaacagaatcgcttctataagaaagctgctgcgtttgtcctgcgtgctgtgggcaaacactctccacagctggcacaagcaatcgtcgactgtggtgccctggatacactggtgatatgtttggaggattttgatccaggtgttaaagaggctgctgcctgggcgctgcgctatatcgcccggcacaatgcagagctgtctcaagccgtggtggacgctggagctgttcctctgcttgtcctgtgtatccaggagcccgagatagctctcaagcgcattgcagcctccgctctgagtgacatcgcaaagcattcccccgaattggcccagaccgttgtcgacgctggagccgtggcccacttggcacagatgattctcaaccccgacgctaagctgaaacaccagattctgtccgccttgtctcaggtgtccaaacattccgtggatttagctgaaatggtggtggaggccgaaatattccctgtggtgctgacatgtctgaaggataaagacgagtatgtgaaaaaaaatgcaagtaccctgattcgtgaaatcgcaaaacacaccccagaactgtctcagctcgtggttaatgcagggggcgttgctgcggttatcgactgtattggcagctgcaagggaaatacgcgcctgcccggaatcatgatgttgggatatgtcgctgcccatagcgagaacctggctatggctgtgatcatctctaagggtgtgccacaactcagtgtctgtctgtccgaggagcccgaagatcacattaaagccgccgctgcatgggctttaggacagataggacgccacaccccagagcatgcaagagccgtggcagtgacaaacaccctccctgtgctcctgagcctgtacatgagcacggagagtagcgaagacctgcaggtcaaatccaagaaagcaattaaaaacatcctgcaaaagtgcacttaccttccagctctcgagccctttctctatgacgctcctcccaatattctcaaacatgtggtcggccagttttcgaaagtcttaccacatgacagcaaagcccggagactgttcgtgacctccggcggcctcaaaaaggtccaggagattaaggcagagcctgggagcctgctccaggagtatattaattctattaatagttgctacccagaggaaatcgtccgatactattccccggggtattctgacacactactacagcgggtcgatagctatcagccactcaacaattag

SEQ ID NO: 174462 - DNA, 1530 bp, Artificial Sequence
  derived and/or modified sequence
atgtctcagcggcaggtgctgcaggtattcgaacagtaccagaaggccagaacgcagttcgtccagatggtggctgagctcgcaactaggccccaaaacattgaaactctgcagaacgccggagtaatgtcactgttacgcactctcctgcttgacgttgtgccaacgatccagcaaactgcagctcttgccctgggtcgcttggcaaattataacgacgacctggcagaagccgtcgtgaaatgcgatatcctgccccagctggtgtactccctggcagaacagaacagattctataaaaaagccgcagccttcgtacttagggcagttggtaagcatagcccacaactggcacaggcgatcgtggattgtggcgcactcgacaccctggtcatatgtctggaagattttgacccaggtgtaaaagaggctgccgcctgggccctgcggtacatcgctcgccacaacgcggagctcagtcaggccgtcgtggacgctggcgccgtgcctctcctggtgctttgtatccaggagcctgaaattgccttaaaaagaatcgccgcctctgcgctgtccgacatcgctaagcattcccccgaactggcccagacagttgtggacgccggggcggtcgctcaccttgctcaaatgatcttgaatccagacgccaaactcaagcatcagattctctcagctctgtcgcaagtgagtaagcacagtgtggatctggcagaaatggtggtcgaagcggagatcttccctgtcgtgttaacatgtctgaaagataaggatgagtacgtaaagaagaacgccagcacacttattagggagattgcaaagcacacccctgagctttcccagctagttgtgaatgctggtggcgtggctgccgtcatcgactgcatcggcagctgtaaagggaatacacgcctccccgggatcatgatgcttggttacgtcgccgctcactccgaaaaccttgccatggctgtgataatctcaaagggggtccctcagctgtccgtgtgcctctctgaagagcccgaagaccacatcaaggcagctgccgcctgggcattgggccaaattggccgtcatacacccgaacacgctagagctgtggctgtgaccaatactctgcctgttttactgtctttgtacatgtcgacagaatcatcagaggacctgcaagtaaaatcaaaaaaagcaattaagaatatcctccagaagtgtacgtatctacccgcactggaaccattcctgtacgacgctcctcccaacatcctgaaacacgttgtaggccagttttccaaagtgctacctcatgacagtaaagcccgccgactgttcgttacctctgggggtctcaagaaggtacaggagattaaagccgaaccaggctcccttttacaggaatatatcaactcgatcaatagctgctaccccgaggagattgtacggtactactccccgggttattctgatacccttctgcagcgcgtcgactcttatcagcctttaaacaactag

SEQ ID NO: 174463 - DNA, 1758 bp, Artificial Sequence
  derived and/or modified sequence
atgagccagaggcaggtgctgcaggtgtttgagcagtaccagaaggcccggacccagtttgtgcagatggtggccgagctggccacccggccccagaacatcgagaccctgcagaatgctggggagcccggggcccggacccctgtggccccccgggccctgagcccccggcggctgcggcctgctgccctgcctgtggagctgctgggcagccgctctgtgggcaccggggtgaggaagagcatccacagcttccagagggtgtttggaggccaggccgagcgggtgaagctgcctgatggctgcggccgctgtgccctgagcctcttccccagcagcctgcacactggagtgatgagcctgctgcggaccctgctgctggatgtggtgcccaccatccagcagacagctgccctggccctgggccgcctggccaactacaatgatgacctggccgaggccgtggtgaagtgtgacatcctgccccagctggtgtacagcctggccgagcagaaccgcttctacaagaaggctgctgcctttgtgctgcgggctgtgggcaagcacagcccccagctggcccaggccatcgtggactgtggggccctggacaccctggtgatctgcctggaggactttgatcctggggtgaaggaggccgccgcctgggccctgcgctacatcgcccggcacaatgctgagctgagccaggccgtggtggatgctggagctgtgcccctgctggtgctgtgcatccaggagcctgagatcgccctgaagagaattgctgccagcgccctgagtgacatcgccaagcacagccctgagctggcccagacagtggtggatgctggagctgtggcccacctggcccagatgatcctgaacccagatgccaagctgaagcaccagatcctgagcgccctgagccaggtgtccaagcacagcgtggacctggccgagatggtggtggaggccgagatcttccctgtggtgctgacctgcctgaaggacaaggatgaatatgtgaagaagaatgccagcaccctcatccgggagatcgccaagcacaccccagagctgagccagctggtggtgaatgctgggggcgtggccgctgtgattgactgcatcggcagctgcaagggcaacacccggctgcccggcatcatgatgctgggctacgtggccgcccacagcgagaacctggccatggccgtcatcatcagcaaaggagtgccccagctgtctgtgtgcctgtctgaggagcctgaggaccacatcaaggctgctgctgcctgggccctgggccagatcggccgccacaccccagagcacgcccgggctgtggccgtgaccaacaccctgcctgtgctgctgagcctgtacatgagcacagagagcagcgaggacctgcaggtgaagagcaagaaggccatcaagaacatcctgcagaagtgcacctacctgcctgccctggagcccttcctgtatgatgccccacccaacatcctgaagcacgtggtgggccagttcagcaaggtgctgccccatgacagcaaggcccggcggctgtttgtgaccagcggcggcctgaagaaggtgcaggagatcaaggccgagcccggcagcctgctgcaggagtacatcaacagcatcaacagctgctacccagaggagatcgtgcgctactacagccctggctacagcgacaccctgctgcagagggtggacagctaccagcccctgaacaactag

SEQ ID NO: 174464 - DNA, 1530 bp, Artificial Sequence
  derived and/or modified sequence
atgagccagaggcaggtgctgcaggtgtttgagcagtaccagaaggcccggacccagtttgtgcagatggtggccgagctggccacccggccccagaacatcgagaccctgcagaatgctggggtgatgagcctgctgcggaccctgctgctggatgtggtgcccaccatccagcagacagctgccctggccctgggccgcctggccaactacaatgatgacctggccgaggccgtggtgaagtgtgacatcctgccccagctggtgtacagcctggccgagcagaaccgcttctacaagaaggctgctgcctttgtgctgcgggctgtgggcaagcacagcccccagctggcccaggccatcgtggactgtggggccctggacaccctggtgatctgcctggaggactttgatcctggggtgaaggaggccgccgcctgggccctgcgctacatcgcccggcacaatgctgagctgagccaggccgtggtggatgctggagctgtgcccctgctggtgctgtgcatccaggagcctgagatcgccctgaagagaattgctgccagcgccctgagtgacatcgccaagcacagccctgagctggcccagacagtggtggatgctggagctgtggcccacctggcccagatgatcctgaacccagatgccaagctgaagcaccagatcctgagcgccctgagccaggtgtccaagcacagcgtggacctggccgagatggtggtggaggccgagatcttccctgtggtgctgacctgcctgaaggacaaggatgaatatgtgaagaagaatgccagcaccctcatccgggagatcgccaagcacaccccagagctgagccagctggtggtgaatgctgggggcgtggccgctgtgattgactgcatcggcagctgcaagggcaacacccggctgcccggcatcatgatgctgggctacgtggccgcccacagcgagaacctggccatggccgtcatcatcagcaaaggagtgccccagctgtctgtgtgcctgtctgaggagcctgaggaccacatcaaggctgctgctgcctgggccctgggccagatcggccgccacaccccagagcacgcccgggctgtggccgtgaccaacaccctgcctgtgctgctgagcctgtacatgagcacagagagcagcgaggacctgcaggtgaagagcaagaaggccatcaagaacatcctgcagaagtgcacctacctgcctgccctggagcccttcctgtatgatgccccacccaacatcctgaagcacgtggtgggccagttcagcaaggtgctgccccatgacagcaaggcccggcggctgtttgtgaccagcggcggcctgaagaaggtgcaggagatcaaggccgagcccggcagcctgctgcaggagtacatcaacagcatcaacagctgctacccagaggagatcgtgcgctactacagccctggctacagcgacaccctgctgcagagggtggacagctaccagcccctgaacaactag

SEQ ID NO: 174465 - DNA, 1758 bp, Artificial Sequence
  derived and/or modified sequence
atgagccagcggcaggtgctgcaggtgttcgagcagtaccagaaggcaaggacccagttcgtgcagatggtggcagagctcgcgacaaggcctcagaatatcgagacccttcaaaacgcaggtgagccaggtgcccggacaccggtggccccccgagctctctccccacgccggcttagacccgcagccttacccgtggagctattagggtctcgtagcgtcggcactggggtcagaaagtctattcacagttttcagcgcgtctttggcgggcaggcggaaagggttaaattgccggacggttgcggacgatgcgcgctgtccctctttccgagtagtctccatacaggggtgatgagtctgcttaggacactcttactggatgtggtccctaccatccagcagacagcagctctcgccttggggcgactggccaattataacgacgacctggcagaagctgtggtgaaatgtgacatcctgccccaactcgtatattctcttgctgaacagaatcgattctacaagaaggccgcagccttcgtgctaagggcagtgggcaaacacagccctcagcttgcccaggctatcgttgattgtggggccctcgatacactggtgatctgcctggaggactttgaccccggcgtcaaagaagctgcagcatgggcccttcgatacatagcccggcataacgcagagttaagtcaagccgttgtggatgcgggagcagtgccgctgctggttttgtgcattcaggaacccgaaattgcactgaaacggatcgcagctagcgctctaagtgacattgcgaagcattcacctgagttagcccaaacagtggtagacgccggcgctgtggcccacttagctcagatgatccttaatccagacgcgaaattgaagcaccagattctgtcagcacttagccaggtgtccaagcactcagtggaccttgcggagatggttgtggaggccgaaatttttccagtagtcctgacatgtctgaaggacaaggacgaatacgtgaagaaaaacgccagcacactgattagggagatagccaaacatacccccgaactgtcgcaattggtggtgaacgccgggggtgttgctgccgtaattgactgcatagggtcctgtaaaggtaatactcgacttcctggaataatgatgcttgggtacgtggccgcacactccgaaaacctcgccatggcagtgatcatctccaaaggtgtgccacagctctctgtatgtttgagtgaggaaccagaggatcatatcaaggcagccgcggcctgggctctggggcagatcggacgtcacacccctgaacatgctcgtgcggtagctgtcacaaacacactaccagtgctgctgtccctgtacatgagcacagaatcatcagaagatctgcaggttaagtcgaaaaaagcaatcaaaaacatcttgcagaagtgcacctatcttccagcattagagcccttcctgtatgacgcaccaccaaacatcttgaagcacgtggttgggcagttctcaaaagtgttgccccatgattctaaggcgcgcaggctcttcgtgacttctggaggtctgaagaaggtccaagaaatcaaggcagaaccgggatcactactgcaggaatatattaacagtattaattcttgctacccagaagaaattgtgcgttactatagtcccggctattccgatacactgctgcagcgagtggactcttatcagcctctgaataattag

SEQ ID NO: 174466 - DNA, 1530 bp, Artificial Sequence
  derived and/or modified sequence
atgagccagcggcaggtgctgcaggtgttcgagcagtaccagaaggcccggacgcaatttgttcagatggttgccgagttagctaccagacctcaaaacatcgaaacattacagaatgcaggagtcatgagcctgttacgaacactgcttctggacgtcgtcccgacgatacagcagactgctgcgctcgccctgggccggcttgcgaattacaatgatgatctagcggaagctgtcgttaaatgcgatattctgccacagcttgtctactctctcgctgaacagaatcgcttttacaaaaaggcagccgcatttgtgcttcgcgctgtggggaagcactctccccagcttgcccaggccatcgtcgattgcggagccctggatacactcgtcatatgcttggaggacttcgaccccggggtaaaggaggccgccgcctgggcgctacgttacatagcaaggcataatgccgagctcagtcaggctgtggttgacgcaggcgctgtgcccctgctcgttctgtgtatacaggagcctgaaatcgccctgaagcgtatcgctgctagcgccctatcagacattgctaaacactcacccgaactcgcccaaaccgtggtagacgctggcgcggtggcccatctggcgcagatgatacttaatccagatgccaagctgaagcaccagattctttcggccttgtcccaggtctccaagcattcagttgacctggctgaaatggtcgtagaggcggaaatcttccccgtcgtgcttacctgtttaaaggacaaagacgaatatgttaagaagaatgcaagtacacttatacgagagatcgctaaacacacccccgagctcagccagctcgtggtgaacgccgggggagtagctgccgtgattgattgtattgggtcctgcaaaggaaacaccagactccctggtattatgatgctcgggtacgtcgcagcgcactcagaaaatctcgctatggccgtcatcatttcaaaaggcgtccctcagctcagcgtgtgtctctcagaagaacctgaggaccatatcaaagcggctgccgcctgggccctgggccagatcggccgtcatactcctgagcacgcaagagccgtagctgtgaccaataccctgccagtgctcctatcgctgtatatgtctacagaaagttccgaagatctgcaggtgaagagcaagaaggcaattaagaacattctgcagaaatgcacctatttacctgccctagagccattcctgtacgacgctccgcccaatatccttaagcatgtggtcggccagttctccaaggtgctgccgcatgactctaaagccaggcgactgtttgtaacctcaggggggcttaagaaggtccaagaaattaaggcagaaccaggctcactgttgcaagagtacatcaacagcattaactcttgttaccccgaggaaatcgtcagatactatagccctggctactcggacaccctgctacaaagagtcgatagttaccaaccattgaacaactag

SEQ ID NO: 174467 - DNA, 1758 bp, Artificial Sequence
  derived and/or modified sequence
atgtcccagcgacaagtgctccaggtgttcgagcagtaccagaaggccagaacgcagttcgttcagatggtggccgaactcgccactcgaccacagaatatcgaaactttgcagaacgccggtgaaccgggtgctcgcacgccagtggctcctcgagccttgtcaccacgccgtctgcggccagctgccctgccagttgaactgcttggatcccgctccgtgggcaccggcgttcgaaagagtatccactccttccagagggtgtttggcggacaggctgagcgtgtgaagctgccagatggctgtggtcgatgcgctctctccctgtttccttccagtctgcacaccggagtgatgagtctactcaggactcttctccttgacgtcgtgccaactatacagcaaaccgctgcgctcgcactgggccgacttgccaattacaacgatgacctggcggaggcggtggtgaagtgcgatatacttccacagcttgtgtattctctggccgaacagaatcggttctataagaaagcagctgcctttgtgttgcgcgctgttggaaaacacagcccccagctcgcgcaggcaattgtcgactgcggtgccttagatactctggtgatctgtctggaggactttgatccaggcgtaaaagaggcagctgcctgggctcttagatatatagctcgccacaatgccgagttgagtcaggcagtggttgacgccggagcagtgcctctgctcgtgttgtgtattcaggagcctgagatcgcactgaagcgcattgccgcatctgctctctccgacatcgccaaacacagccctgaacttgcccagactgtcgttgatgcgggtgcggtcgcccaccttgctcagatgattctcaatccagacgcaaagctaaagcaccagattcttagcgccctttcacaggttagcaagcactcagtcgacctcgccgagatggtggtcgaagctgaaattttccctgtggtcctcacgtgcctaaaggataaggacgagtacgtgaagaagaatgcctccaccttgattagggaaatcgctaagcacacacccgagttgtctcaactggtggtgaacgccggtggcgtggcggcagttatcgattgcatcgggtcttgcaagggaaatacccgcctcccgggtataatgatgctgggctatgtcgcagcgcactccgaaaacttggccatggccgttataatatctaaaggtgtgccacagctgagtgtttgtctgtccgaggaaccagaagaccacatcaaagcggcagctgcctgggcgcttggtcagattggcagacatacccctgagcatgctagagcggtcgcagtaacaaacactctcccggtcctcttgtccctgtatatgtccaccgaatcctccgaggatttgcaagtcaagagcaagaaggcaatcaagaatatacttcagaagtgcacctacctgccagcactcgagccgttcttgtatgacgcccctcctaatattttgaagcacgtggttggacagttttctaaagttttgcctcacgactccaaggctagaagactgtttgttactagcggcggtctcaagaaggttcaggaaatcaaggctgagccgggaagcctgctgcaggagtatataaacagcatcaactcctgctaccctgaggagattgtgcggtactactctccaggctactcagacactcttctgcagcgggttgacagttatcagcccttgaataactag

SEQ ID NO: 174468 - DNA, 1530 bp, Artificial Sequence
  derived and/or modified sequence
atgagccagcgccaggtgctgcaggtctttgagcagtatcaaaaggccaggacccagtttgtgcagatggtcgctgagctcgctacgcgcccacagaacatcgaaaccctgcagaatgctggcgtcatgtcactgctgcgtactctcttactcgatgtagtgcccacgattcagcaaactgctgcactcgcccttggcaggcttgccaactataatgatgacctggcagaggccgtggtgaaatgcgacattctgccacagttggtgtattcactggctgagcagaatcggttctacaaaaaggctgctgcctttgtcttacgggctgtcggcaagcactcaccccaactcgcccaggctatcgtagattgtggagcgctggatactctggtgatttgtctagaggacttcgaccctggtgtcaaggaggcggctgcttgggctctgcgatatatcgcacggcacaacgccgagctatcccaagccgtggttgacgctggtgcagtgcccctactggtattgtgtatacaggagcccgaaatcgcccttaagaggattgcagctagcgcactcagcgacattgctaagcattcccccgaactggcacaaactgttgttgacgctggcgctgtggcacatttggctcagatgattctgaacccagatgccaaactgaaacatcaaattttgtcagcattgtcccaggtgagtaagcacagtgttgacctagccgagatggtggttgaagcagagatttttcccgttgtccttacatgccttaaggataaagatgagtacgtgaaaaagaacgcttccactcttatcagggagattgcgaagcacactccagagctgagccagctagttgtcaacgccggaggtgtcgccgcagtgatagactgcataggttcttgtaaaggcaataccagactgcccggtatcatgatgctggggtatgttgcggctcattctgagaatctcgcaatggctgttatcatctcgaagggagttccccagctatcagtgtgcctgtccgaagagccagaggaccatattaaagctgccgctgcctgggcactgggccagattgggaggcacacacccgagcatgcacgggcagtcgctgtgaccaataccttaccggttttgctctcactgtacatgtctactgaatcaagcgaagatctgcaagtaaagagcaaaaaagccattaagaatattctgcaaaagtgcacatacttaccggcactggaaccgtttctttacgacgctcccccaaacattctgaaacatgtggtcgggcagtttagcaaggtgcttccacacgactccaaagcacggagactgttcgtgacatctggcggactgaagaaagtgcaggagatcaaggccgagcctggttctctgctgcaggagtatattaatagtattaacagttgctatcctgaggagatcgtcagatattattccccaggttattctgatactttactgcaacgtgtggattcttaccagccattaaacaattag

SEQ ID NO: 174469 - DNA, 2808 bp, Artificial Sequence
  derived and/or modified sequence
aggttgcccgggagacgcgggtacacagagaagcggctcccgtcggaggccgagtcgtcgccacgatcgcccccttggtggactcgcaggccgagcggcttccccgcagagctcgaggagggcagacggcggcgggggcgccatgagtcagaggcaggtgctgcaagtgttcgagcaataccagaaggccaggacccagttcgtgcagatggtggcggagctggcgactagaccccaaaacatcgagacgctgcagaacgcgggtgagcccggagcccgaacccccgtcgccccccgcgcactgagtccccgacgcctccgccccgctgccctgcccgtggagctcttggggagccgcagtgtggggaccggagttcgcaaaagcatccattcttttcagcgggtctttgggggtcaggccgagagggtgaagcttccagatggttgtgggaggtgcgcgttgtccctgtttccatcttcattgcacacaggtgtaatgtctttgctgagaactcttcttctggacgtggtcccaacaattcaacagactgctgctttggctcttgggagactggccaattataatgatgacctagcagaagctgttgtgaagtgcgacattcttccacagcttgtttattcattggcagaacagaatcgcttctacaagaaagcagctgcctttgtgttacgagcagttggtaaacattctccccagctagctcaggcaatagtcgattgtggagcactggatacgctggtcatatgcttggaagattttgaccctggagtcaaggaggctgcagcctgggcacttagatatattgcaagacataatgcagaactgtcacaagctgtggtggatgcaggagctgttcctcttttagtactctgtatccaggagccagaaattgctttgaaaaggattgctgcttcggccctcagtgatattgcaaagcattctccagagttagcacagacagtagtggatgcaggagctgttgctcatttagcccagatgatcctgaaccctgatgctaaattgaagcatcagatcctttcagctctcagtcaggtttcaaaacattccgtggatctggcagaaatggttgttgaagcagagatttttccagttgtacttacctgtctgaaggacaaggatgaatacgtgaagaaaaatgcttctactttaattagagagattgcaaaacatacacccgagctttcacagctggtagttaacgcaggaggggttgctgccgtgattgactgcattgggtcctgcaaagggaacacacggctgcctggcatcatgatgcttggttatgtagcagctcattctgagaacctagcaatggcagtcatcatttctaagggtgtaccccagttgtcagtctgcttgtcagaagaaccggaagatcatattaaggctgcagctgcttgggccttaggacagattggaagacacactcctgaacacgcacgggctgttgcagtcacaaatactttgccagttctgctttctttgtacatgtcaacagaaagttctgaggatctccaagtaaaaagtaaaaaagccataaagaatatcctgcaaaaatgtacctacttaccagcccttgaaccatttctatatgatgctcctcccaatattctgaaacatgtggttggacagttcagtaaggtgctgccgcatgatagcaaagctcgacgactttttgtaacaagtggtggccttaaaaaagttcaagagataaaagcagaacctggttctctccttcaagaatacatcaacagtattaacagttgttaccccgaggaaatagtgaggtattattcccctggatattcagatacacttctgcagagggtggacagctatcaaccacttaataactgagcaaagttatattgtgatactcaaattcacagcagagtagttttgagtaacagtaattaaatccttctaaatatttgaactaagtatattctagatttatttaatgggaaatacctttagataatattttctaaatttatgtaatactttaaacattcgtagcttgaatatgtgaggaactattcatggtcattcgcatgcataggatttgttctacaggtagattttaaaaacacgttaaagggccttaaggcattttgttattctgttaaaaaccacacacactcgtacatgcagacacctccaatgagatatagttaagagatggcattcaaaaaccctaaattattctagccaatttgtcataggcataggcaaggaaagctggccttgctaactatatagtagtatacacaagagaaatctttgaaggaggaaactgatgacagatatacagggcacttgaaggagactctgatgctagttatataagtgcattaacttaagacacggactctgtgggtaacctgttaggttttactaagaatttaggaaaaatttactcctctttatcacaagttttccaaacctccttccccaccctatctaaagtgttccttacctttcatgggcccagcgagggtagaattcagaatagagagttatactcctgcatacatgctctccctctcattgaaaggtttcttagtctagctctgctcatgaatgaacaaagaagcaggcatgtaaaatggatccttgtcctaacgtcactttcccaagtttcaaaagtcacattttcaggtatttaaggaatagtttgaagctaataccatcaggctcagagtttacatgcatttttacttaggaagtggtaaacgggtgaaagagggtttcaataaaatttt

SEQ ID NO: 174470 - DNA, 2605 bp, Artificial Sequence
  derived and/or modified sequence
aggttgcccgggagacgcgggtacacagagaagcggctcccgtcggaggccgagtcgtcgccacgatcgcccccttggtggactcgcaggccgagcggcttccccgcagagctcgaggagggcagacggcggcgggggcgccatgagtcagaggcaggtgctgcaagtgttcgagcaataccagaaggccaggacccagttcgtgcagatggtggcggagctggcgactagaccccaaaacatcgagacgctgcagaacgcgggtgtaatgtctttgctgagaactcttcttctggacgtggtcccaacaattcaacagactgctgctttggctcttgggagactggccaattataatgatgacctagcagaagctgttgtgaagtgcgacattcttccacagcttgtttattcattggcagaacagaatcgcttctacaagaaagcagctgcctttgtgttacgagcagttggtaaacattctccccagctagctcaggcaatagtcgattgtggagcactggatacgctggtcatatgcttggaagattttgaccctggagtcaaggaggctgcagcctgggcacttagatatattgcaagacataatgcagaactgtcacaagctgtggtggatgcaggagctgttcctcttttagtactctgtatccaggagccagaaattgctttgaaaaggattgctgcttcggccctcagtgatattgcaaagcattctccagagttagcacagacagtagtggatgcaggagctgttgctcatttagcccagatgatcctgaaccctgatgctaaattgaagcatcagatcctttcagctctcagtcaggtttcaaaacattccgtggatctggcagaaatggttgttgaagcagagatttttccagttgtacttacctgtctgaaggacaaggatgaatacgtgaagaaaaatgcttctactttaattagagagattgcaaaacatacacccgagctttcacagctggtagttaacgcaggaggggttgctgccgtgattgactgcattgggtcctgcaaagggaacacacggctgcctggcatcatgatgcttggttatgtagcagctcattctgagaacctagcaatggcagtcatcatttctaagggtgtaccccagttgtcagtctgcttgtcagaagaaccggaagatcatattaaggctgcagctgcttgggccttaggacagattggaagacacactcctgaacacgcacgggctgttgcagtcacaaatactttgccagttctgctttctttgtacatgtcaacagaaagttctgaggatctccaagtaaaaagtaaaaaagccataaagaatatcctgcaaaaatgtacctacttaccagcccttgaaccatttctatatgatgctcctcccaatattctgaaacatgtggttggacagttcagtaaggtgctgccgcatgatagcaaagctcgacgactttttgtaacaagtggtggccttaaaaaagttcaagagataaaagcagaacctggttctctccttcaagaatacatcaacagtattaacagttgttaccccgaggaaatagtgaggtattattcccctggatattcagatacacttctgcagagggtggacagctatcaaccacttaataactgagcaaagttatattgtgatactcaaattcacagcagagtagttttgagtaacagtaattaaatccttctaaatatttgaactaagtatattctagatttatttaatgggaaatacctttagataatattttctaaatttatgtaatactttaaacattcgtagcttgaatatgtgaggaactattcatggtcattcgcatgcataggatttgttctacaggtagattttaaaaacacgttaaagggccttaaggcattttgttattctgttaaaaaccacacacactcgtacatgcagacacctccaatgagatatagttaagagatggcattcaaaaaccctaaattattctagccaatttgtcataggcataggcaaggaaagctggccttgctaactatatagtagtatacacaagagaaatctttgaaggaggaaactgatgacagatatacagggcacttgaaggagactctgatgctagttatataagtgcattaacttaagacacggactctgtgggtaacctgttaggttttactaagaatttaggaaaaatttactcctctttatcacaagttttccaaacctccttccccaccctatctaaagtgttccttacctttcatgggcccagcgagggtagaattcagaatagagagttatactcctgcatacatgctctccctctcattgaaaggtttcttagtctagctctgctcatgaatgaacaaagaagcaggcatgtaaaatggatccttgtcctaacgtcactttcccaagtttcaaaagtcacattttcaggtatttaaggaatagtttgaagctaataccatcaggctcagagtttacatgcatttttacttaggaagtggtaaacgggtgaaagagggtttcaataaaattttaaataaaaacagcattagaattgtc

SEQ ID NO: 174471 - protein, 396 aa, Artificial Sequence
  derived and/or modified sequence
MAFAPMGPEASFFDVLDRHRESLLAALRRGGREPPTGGSRLASSSEVLASIENIIQDIITSLARNEAPAFTIDNRSSWENIKFEDSVGLQMVSHCTTRKIKSDSPKSAQKFSLILKILSMIYKLVQSNTYATKRDIYYTDSQLFGNQTVVDNIINDISCMLKVSRRSLHILSTSKGLIAGNLRYIEEDGTKVNCTCGATAVAVPSNIQGIRNLVTDAKFVLIVEKDATFQRLLDDNFCNKLSPCIMITGKGVPDLNTRLLVKKLWDTFHVPVFTLVDADPHGIEIMCIYKYGSMSMSFEAHHLTVPAIRWLGLLPSDLKRLNVPKDSLIPLTKRDQMKLDSILRRPYVTCQPFWRKEMEIMADSKMKAEIQALTFLSSDYLSRVYLPNKLKFGGWI

SEQ ID NO: 174472 - DNA, 1191 bp, Artificial Sequence
  derived and/or modified sequence
atggccttcgcccccatgggccccgaggccagcttcttcgacgtgctggacagacacagagagagcctgctggccgccctgagaagaggcggcagagagccccccaccggcggcagcagactggccagcagcagcgaggtgctggccagcatcgagaacatcatccaggacatcatcaccagcctggccagaaacgaggcccccgccttcaccatcgacaacagaagcagctgggagaacatcaagttcgaggacagcgtgggcctgcagatggtgagccactgcaccaccagaaagatcaagagcgacagccccaagagcgcccagaagttcagcctgatcctgaagatcctgagcatgatctacaagctggtgcagagcaacacctacgccaccaagagagacatctactacaccgacagccagctgttcggcaaccagaccgtggtggacaacatcatcaacgacatcagctgcatgctgaaggtgagcagaagaagcctgcacatcctgagcaccagcaagggcctgatcgccggcaacctgagatacatcgaggaggacggcaccaaggtgaactgcacctgcggcgccaccgccgtggccgtgcccagcaacatccagggcatcagaaacctggtgaccgacgccaagttcgtgctgatcgtggagaaggacgccaccttccagagactgctggacgacaacttctgcaacaagctgagcccctgcatcatgatcaccggcaagggcgtgcccgacctgaacaccagactgctggtgaagaagctgtgggacaccttccacgtgcccgtgttcaccctggtggacgccgacccccacggcatcgagatcatgtgcatctacaagtacggcagcatgagcatgagcttcgaggcccaccacctgaccgtgcccgccatcagatggctgggcctgctgcccagcgacctgaagagactgaacgtgcccaaggacagcctgatccccctgaccaagagagaccagatgaagctggacagcatcctgagaagaccctacgtgacctgccagcccttctggagaaaggagatggagatcatggccgacagcaagatgaaggccgagatccaggccctgaccttcctgagcagcgactacctgagcagagtgtacctgcccaacaagctgaagttcggcggctggatctag

SEQ ID NO: 174473 - DNA, 1191 bp, Artificial Sequence
  derived and/or modified sequence
atggcctttgcccctatgggacccgaggcgtcattcttcgacgttctcgacagacaccgagagtccctgcttgccgctctaagaagaggcggaagggaacccccaaccgggggctcccgtctggccagcagcagcgaggtacttgctagcattgaaaatatcatccaggatatcatcacttcgctcgccagaaatgaggcccctgcttttaccattgataatcggagcagctgggagaatatcaaattcgaggatagcgtagggcttcagatggtgagtcattgtaccacgcgtaaaatcaaaagcgactcccctaagtcagctcaaaaattttccctaatcctcaaaatcttgagtatgatctacaaactcgttcagtctaatacctacgctacgaagagggatatatattatacagatagccagctctttggcaaccaaactgtggttgacaacatcatcaatgacatctcatgtatgctgaaagtcagcagaagatcgctgcatatcttgtctacgagcaaaggtctcatcgctggaaacctgcggtatattgaggaagacggcactaaggtgaattgtacttgtggagcaacagcggttgccgtgccctctaatatacaaggcatacgcaatctggtaaccgacgccaaatttgttctgatcgtagagaaggacgccacatttcagcgtctgctcgacgataatttttgtaacaaactgagtccctgcatcatgatcaccggcaagggagtacctgatttaaacaccagactgcttgtaaagaaattgtgggacaccttccacgtgcccgtgttcactcttgtggacgccgatccccacggcatcgagatcatgtgcatctataaatatggtagcatgtcaatgtctttcgaggcacatcatctaaccgttcctgccatacgctggctgggtttactaccctccgatctaaagagattgaatgtgcctaaggatagcctcatccccttaaccaaaagagatcagatgaagctggactctatcctaagacgtccctacgtaacatgtcagccattttggagaaaggaaatggagataatggctgacagcaagatgaaggcggaaattcaggccctgacttttctgtcttccgattacctttccagagtctacctgcctaacaagctgaaattcggaggatggatttag

SEQ ID NO: 174474 - DNA, 1191 bp, Artificial Sequence
  derived and/or modified sequence
atggcctttgcccccatgggccctgaggccagcttctttgatgtgctggacagacaccgggagagcctgctggccgccctgcggcggggcggccgggagccccccaccggcggcagccggctggccagcagcagcgaggtgctggccagcattgagaacatcatccaggacatcatcaccagcctggccagaaatgaggccccagccttcaccatcgacaacagaagctcctgggagaacatcaagtttgaggacagcgtgggcctgcagatggtgagccactgcaccaccaggaagatcaagagtgacagccccaagagcgcccagaagttcagcctcatcctgaagatcctgtccatgatctacaagctggtgcagagcaacacctacgccaccaagagggacatctactacacagacagccagctgtttggaaaccagacagtggtggacaacatcatcaatgacatcagctgcatgctgaaggtgtccagaagaagcctgcacatcctgagcaccagcaagggcctgattgctggcaacctgcgctacattgaagaagatggcaccaaggtgaactgcacctgtggggccacagctgtggccgtgcccagcaacatccagggcatccggaacctggtgacagatgccaagtttgtgctgattgtggagaaggatgccaccttccagaggctgctggatgacaacttctgcaacaagctgagcccctgcatcatgatcaccgggaagggcgtgcctgacctgaacacccggctgctggtgaagaagctgtgggacaccttccacgtgcctgtgttcaccctggtggatgctgacccccatggaattgagatcatgtgcatctacaagtatggctccatgtccatgagctttgaggcccaccacctgactgtgcctgccatccgctggctgggcctgctgcccagcgacctgaagaggctgaatgtgcccaaggacagcctcatccccctgaccaagagggaccagatgaagctggacagcatcctgcggcggccctacgtgacctgccagcccttctggaggaaggagatggagatcatggctgacagcaagatgaaggccgagatccaggccctgaccttcctgagcagtgactacctgagccgggtgtacctgcccaacaagctgaagtttggaggctggatctag

SEQ ID NO: 174475 - DNA, 1191 bp, Artificial Sequence
  derived and/or modified sequence
atggccttcgcccccatgggccccgaggccagcttcttcgacgtgctggataggcatagagagagcctgttggccgctctgcggcgcggcggcagagaaccccccacagggggaagccgacttgcatccagttctgaagttctcgccagtatagaaaacataatacaggacattatcacatctctggctaggaacgaagctcctgcatttactatcgataacagaagcagctgggaaaacattaagtttgaggacagcgtggggttgcagatggtttcgcattgcaccacccggaaaatcaagagcgatagtcccaagtcggctcagaaattctccctcatactcaagattctctctatgatttacaagcttgtacaaagcaatacgtacgccaccaagcgcgacatttattacactgatagtcagcttttcggcaatcaaactgtggtggacaatattattaacgacatcagctgcatgctcaaggtgtctagacgttctctccacattctatcaaccagtaaaggactgatcgctgggaacttgaggtacatcgaggaggatggaacgaaagtgaattgtacttgtggggccactgcggtggcagtgccatcaaacattcagggaatccgaaaccttgttacagatgccaagttcgtgctgatcgtcgaaaaggacgccacgttccagcggctgttggacgacaacttttgcaacaagcttagtccatgcatcatgatcactggaaagggagttcccgacctcaacactcggctcctggtgaaaaaactgtgggacacatttcatgtccccgtctttaccctggttgacgctgacccacatggcattgaaataatgtgtatatacaaatacggcagtatgagtatgagttttgaggctcaccatctgacggtgcctgcaatccggtggcttgggctcctgccttccgacctgaagcgactgaacgttcccaaggactcgctcatcccccttactaaaagggaccagatgaagctcgattcaatccttcggcggccttacgtgacctgtcaaccattctggcggaaggagatggaaatcatggccgattccaagatgaaggccgaaattcaagctctgacctttctgagttctgactacctgagccgtgtttaccttcctaacaaactgaagtttggcgggtggatttag

SEQ ID NO: 174476 - DNA, 1191 bp, Artificial Sequence
  derived and/or modified sequence
atggcctttgctcccatgggtccagaggccagcttctttgacgtccttgaccgacatcgcgaatctctgttggctgccctgagaagaggaggaagagagccgcctacgggcggtagtcggctggcgagctcatcagaggtacttgctagtatagaaaatattatccaggatatcatcaccagcctggctcgaaatgaggccccagccttcaccattgacaatcggagttcttgggaaaacattaaatttgaagactctgttggattacagatggtgagccattgcacaactcgaaaaattaagagcgactcacctaagtccgctcagaagttctctctgattttgaagatcctctcgatgatttataagctcgtgcaaagtaacacatatgcaacaaagagggatatatattatacagatagccagctctttggaaatcagacagtggtagataatattatcaatgatattagctgtatgttgaaggtgagccgacgaagcctgcatattcttagtacttcaaagggtctgatcgcaggcaatctgaggtacatagaagaagatggcacaaaggtgaactgcacttgcggagccaccgcagttgccgttccctcgaacatacaagggattaggaacttagtgaccgacgctaaatttgtgctgatcgtcgagaaggacgccacattccagcggctgctggacgataacttttgcaacaagctgtctccctgcatcatgataaccggcaaaggcgtccccgatctcaacacgcgcctcctggtcaagaagctttgggatacctttcacgtgcccgttttcacgcttgtcgacgccgaccctcacgggatcgaaatcatgtgcatctacaagtacggcagcatgtccatgtctttcgaggcacaccatctcactgttcctgctattcggtggctggggctgttgccaagtgatctgaagcgactaaatgtgccaaaggattccctgattcctctaacgaagcgagaccaaatgaagctggacagcatccttagacggccttatgttacatgccagcctttttggaggaaggagatggagattatggccgattccaaaatgaaggctgagattcaggccctcacatttcttagttctgattaccttagtagggtgtacctgccgaataagctgaagttcggagggtggatctag

SEQ ID NO: 174477 - DNA, 1834 bp, Artificial Sequence
  derived and/or modified sequence
ggcgtgggcacgccggccgctcagaaagcgcgggaaaggcacgcagccacgccccaagggcgcagcctaggacaggggcttctggagcttctggcagccgtctgccctcatggcctttgcacctatggggcccgaggcctcgttcttcgacgttttggaccgacacagggagtccctgctggctgccctgaggagaggtggcagggagcccccaactgggggaagccgcctggcctccagttctgaggttcttgcatctatagaaaatattatccaagacataatcacaagcttggcaagaaatgaagcacctgcattcacgatagacaacagatcaagctgggaaaacataaagtttgaagattctgtgggtcttcagatggtatcccattgcaccaccagaaagatcaaaagtgattcaccaaaatcagctcaaaaattttctctaatccttaaaatattgtccatgatttataaattagtacagagcaacacttatgcaaccaaaagggacatatattacactgacagtcaactctttggtaaccagactgtcgtcgacaatattatcaatgacatttcttgcatgttaaaagtgtcaaggaggagtctacatatattatctacatcaaaaggtttaattgctggcaacttaagatacatcgaggaagatggcaccaaagtgaattgtacctgtggtgcaacggctgttgctgtgccatcgaatattcaaggaattcggaatttagttacagatgcaaagtttgtattaattgtagaaaaagatgcaacatttcagcggctcctagatgacaacttttgcaacaaattgtctccttgcatcatgattacgggaaagggagttcctgatctaaacacaagacttttagtcaagaaactgtgggatacatttcatgttcctgttttcactcttgtagatgctgatccacatggcatagaaataatgtgcatctataagtatggatctatgtctatgtcttttgaagctcatcatctcacagttccagctattagatggcttggtcttctcccttctgatcttaaaagattaaatgtacctaaagatagtttgattccactgacaaaaagggaccaaatgaaacttgacagtatcctgaggagaccttatgttacctgccaaccattttggagaaaagaaatggaaataatggcagactctaaaatgaaggcagaaattcaagctttgactttcctatcatcagattatctttccagagtgtacttacctaacaaattaaaatttggaggatggatataaaaataaatcagaagaacttctgattgccagaggcttttcattagttttgttttgattggcaaatactattgtggaaagaacatatattatattcttaattctgtaaaagtgaaataaaataactttccgttaattatatatttttgtcaaaacaaatgctgtactccaattttctttgcaaggccttattcttgcctctatagagacagatttctgtcctatcttctaaagcaaattataaaagaatatgttattttgacctttaaattatttttgaaaaaataatattttatacatgtcatcaaagtctacaaaatatttaccttctacgatacaactaatgttaacgcataaagtatcttactggtaacaaaaatcataatgatctgaatttgagatgttgcaaatgaattgtggtgtccggtagtttcttcttacattttcctttgcctttatactttaggggtcttactccattaattcatttgttacattagtaaaattcagtatgaataaatatttggattgatgtag

SEQ ID NO: 174478 - protein, 361 aa, Artificial Sequence
  derived and/or modified sequence
MYGKGKSNSSAVPSDSQAREKLALYVYEYLLHVGAQKSAQTFLSEIRWEKNITLGEPPGFLHSWWCVFWDLYCAAPERRETCEHSSEAKAFHDYSAAAAPSPVLGNIPPGDGMPVGPVPPGFFQPFMSPRYPGGPRPPLRIPNQALGGVPGSQPLLPSGMDPTRQQGHPNMGGPMQRMTPPRGMVPLGPQNYGGAMRPPLNALGGPGMPGMNMGPGGGRPWPNPTNANSIPYSSASPGNYVGPPGGGGPPGTPIMPSPADSTNSGDNMYTLMNAVPPGPNRPNFPMGPGSDGPMGGLGGMESHHMNGSLGSGDMDSISKNSPNNMSLSNQPGTPRDDGEMGGNFLNPFQSESYSPSMTMSV

SEQ ID NO: 174479 - protein, 314 aa, Artificial Sequence [sequence omitted]

SEQ ID NO: 174480 - DNA, 1086 bp, Artificial Sequence
  derived and/or modified sequence
atgtatgggaaaggcaaatctaattcctctgcagtgccctctgactcgcaggcaagggagaaactcgccctttacgtatatgagtacctcctgcatgtcggagctcaaaagtccgcccagaccttcctttctgagattcggtgggaaaagaacattaccttgggggagcctcccggatttctccatagttggtggtgcgtgttttgggacctctactgcgctgcccccgaaaggagggaaacttgtgagcacagcagtgaggccaaagcctttcacgattattcagctgcagccgcgcccagtccagtgctgggtaacataccacccggcgatggaatgccagtgggccccgtgccccctggattcttccagcccttcatgtcacctcgttatcccgggggtcctcgacccccactcaggatccccaaccaagccttgggcggtgtccccggatctcagcccctgctcccatctgggatggatcccacacgccagcaggggcatccaaatatgggcgggcccatgcagcgaatgacacccccccgaggcatggtgcctttgggtccccaaaactacgggggagcaatgcgaccccctttaaacgcactgggggggccaggtatgccagggatgaatatggggcctggaggcggcagaccctggccaaacccgaccaacgccaactctatcccctacagctctgcatcaccaggcaattacgtgggtcccccgggcggaggtggaccccctggcactccaatcatgccatccccagccgacagcactaattcaggagataacatgtacaccctcatgaacgctgtgcccccaggcccaaatcgccctaattttcccatgggcccaggaagtgatggccccatgggtgggctagggggcatggaatcacatcacatgaacgggtccctgggatccggcgatatggactccattagtaaaaactctccgaacaatatgtccttatcaaaccagcccggaactcctcgtgatgacggcgaaatggggggcaatttcctcaatccgttccagagcgagtcctactcaccaagcatgacaatgtcggtctag

SEQ ID NO: 174481 - DNA, 945 bp, Artificial Sequence
  derived and/or modified sequence
atggggaagaatataaccttgggggaaccacctgggtttctgcattcttggtggtgtgtcttttgggacctttactgcgcggcccccgaaagaagagagacatgtgaacatagttccgaggccaaggccttccatgattactctgccgccgctgcaccaagcccagtgttagggaatatcccaccgggtgatgggatgccggtgggacctgtgcctcccggtttcttccagccattcatgtctcctcgttatcctggtggaccccggccacccctccgcataccgaaccaggccctggggggtgttccaggatcccaaccgctgctcccatctggaatggatcccacacggcagcaaggtcaccccaacatgggtggccccatgcagcgcatgacccctccacgtggcatggtgccgctcgggccccagaactacggtggagcaatgagacctccactaaacgcactgggaggccctggcatgcccggaatgaacatgggaccaggaggggggcgaccatggcctaacccaacaaacgctaatagtataccttactcctctgcttcccccggaaactatgtgggtcctcctggcgggggtggccctccaggcacccctattatgccgtctcctgcagactccacaaacagtggtgacaacatgtacactctgatgaacgcagtacctccgggccccaaccgcccaaatttcccgatgggacctggatcagacggacctatgggcggattaggcgggatggaatcccaccacatgaacggctccctgggtagtggcgatatggactcaatttccaagaactctccgaataatatgtcccttagtaaccagcctggaacccccagggatgacggggagatgggcggtaactttctgaaccctttccagagcgagtcctactcccctagcatgaccatgtccgtctag

SEQ ID NO: 174482 - DNA, 1086 bp, Artificial Sequence
  derived and/or modified sequence
atgtatggcaagggcaagagcaacagcagcgctgtgcccagcgacagccaggcccgggagaagctggccctgtatgtgtatgagtacctgctgcacgtgggcgcccagaagagcgcccagaccttcctgtctgagatccgctgggagaagaacatcaccctgggggagcccccaggcttcctgcacagctggtggtgtgtgttctgggacctgtactgtgccgcccctgagcggcgggagacctgtgagcacagcagcgaggccaaggccttccatgactacagcgctgctgctgcccccagccctgtgctgggcaacatccccccaggagatggcatgcctgtgggccctgtgcccccaggcttcttccagcccttcatgagcccccgctacccaggcggccccaggcctcccctgcgcatccccaaccaggccctgggcggcgtgcccggcagccagcccctgctgcccagcggcatggaccccacccggcagcagggccaccccaacatgggcggccccatgcagaggatgaccccaccccggggcatggtgcccctgggcccccagaactacggcggggccatgaggcctcccctgaatgccctgggcggccctggcatgcctggcatgaacatgggccctgggggcggccggccctggcccaaccccaccaatgccaacagcatcccctacagcagcgccagccctggcaactacgtgggccccccaggcggcggcggccccccaggcacccccatcatgcccagccctgctgacagcaccaacagcggggacaacatgtacaccctgatgaatgctgtgcccccaggccccaaccggcccaacttccccatgggccctggcagtgatggccccatgggcggcctgggcggcatggagagccaccacatgaatggcagcctgggcagcggggacatggacagcatcagcaagaacagccccaacaacatgagcctgagcaaccagcccggcaccccaagagatgatggagagatgggcggcaacttcctgaaccccttccagagcgagagctacagccccagcatgaccatgtctgtgtag

SEQ ID NO: 174483 - DNA, 945 bp, Artificial Sequence
  derived and/or modified sequence
atgggcaagaacatcaccctgggggagcccccaggcttcctgcacagctggtggtgtgtgttctgggacctgtactgtgccgcccctgagcggcgggagacctgtgagcacagcagcgaggccaaggccttccatgactacagcgctgctgctgcccccagccctgtgctgggcaacatccccccaggagatggcatgcctgtgggccctgtgcccccaggcttcttccagcccttcatgagcccccgctacccaggcggcccccggccccccctgcgcatccccaaccaggccctgggcggcgtgcccggcagccagcccctgctgcccagcggcatggaccccacccggcagcagggccaccccaacatgggcggccccatgcagaggatgaccccaccccggggcatggtgcccctgggcccccagaactatggaggagccatgaggcctcccctgaatgccctgggcggccctggcatgcctggcatgaacatgggccctgggggcggccggccctggcccaaccccaccaatgccaacagcatcccctacagcagcgccagccctggcaactacgtgggccccccaggcggcggcggccccccaggcacccccatcatgcccagccctgctgacagcaccaacagcggggacaacatgtacaccctgatgaatgctgtgcccccaggccccaaccggcccaacttccccatgggccctggcagtgatggccccatgggcggcctgggcggcatggagagccaccacatgaatggcagcctgggcagcggggacatggacagcatcagcaagaacagccccaacaacatgagcctgagcaaccagcccggcaccccaagagatgatggagagatgggcggcaacttcctgaaccccttccagagcgagagctacagccccagcatgaccatgtctgtgtag

SEQ ID NO: 174484 - DNA, 1086 bp, Artificial Sequence
  derived and/or modified sequence
atgtacggcaagggcaagagcaacagcagcgccgtgcccagcgactctcaggcacgcgaaaagctggcactgtacgtgtatgagtatttgttgcacgtgggtgcacagaagtcagcccagacctttctttcagagatccggtgggaaaaaaatattacgctgggcgaacctcctggattcctgcattcctggtggtgtgtgttctgggacctttactgcgccgctccagagaggcgcgaaacttgcgagcatagttctgaggcgaaagcatttcatgactactctgccgctgccgctcctagcccagttctaggcaacatcccacccggcgatggcatgcccgttggacccgtgccaccaggctttttccagccattcatgagcccccggtacccaggtggtccaagacccccactgagaatcccgaatcaggcactgggaggtgttccaggaagccagccactgctgccatccggcatggaccccactaggcagcaggggcatcctaacatgggcggaccgatgcagcggatgactccccccagaggtatggttccactgggcccccagaattatgggggagctatgcgtccgccactgaatgctctggggggcccagggatgcctggtatgaacatgggcccgggaggtggccgtccctggccgaatccgaccaacgccaattctatcccatacagttcagcgtctcccggtaattacgttggtccccccgggggaggggggccgccaggcacacccattatgccctccccagccgactcaacgaactcaggcgataatatgtacactctcatgaatgccgttcccccaggccccaaccgacccaactttccgatgggacctggcagtgatggtcccatgggcggactcgggggcatggagtcacaccatatgaatggcagtctcggaagcggagatatggatagcattagtaaaaactctccaaacaacatgagtctgagcaatcaaccaggcacccctcgagatgatggtgagatgggggggaattttttaaacccctttcagtccgagtcctactcacccagtatgactatgtctgtgtag

SEQ ID NO: 174485 - DNA, 945 bp, Artificial Sequence
  derived and/or modified sequence
atgggcaagaacatcaccctgggcgagccccccggcttcctgcactcctggtggtgtgtgttttgggacctctactgcgctgcacctgaacgccgggagacatgcgaacatagttctgaagcgaaggcatttcacgattactccgcagctgccgcaccatcccctgtgctgggcaacattcctcctggagatggcatgcctgtaggacccgttcctcccggattttttcagcctttcatgtcccctcgttatcccggcggtccgcgcccacctcttcgcatccccaaccaggccctcgggggtgttccaggcagtcaaccactcctgccttccggaatggacccaacgcgccaacaggggcatcctaatatgggcggacctatgcagagaatgaccccaccccgagggatggttcctctggggccacagaattacggaggagctatgcggcctccattgaatgcacttggcggtcctggcatgccaggcatgaatatgggtccagggggaggtaggccatggccaaaccctacaaacgctaacagcataccttattcaagtgcctcccccggaaactacgtgggaccccccggcggcggcggacccccgggaacacccattatgcccagtcctgctgacagcactaatagcggcgataacatgtacactctaatgaatgccgtgccccccggaccaaataggccaaactttccgatgggccccgggtctgacggcccgatgggtgggttgggggggatggagagccaccacatgaacggctcactaggcagcggggacatggattctattagcaagaatagccccaataatatgagcctgtctaatcaaccaggcacaccccgggacgatggggaaatgggcgggaatttcctgaacccttttcagtctgaatcttattcaccttctatgacgatgtctgtttag

SEQ ID NO: 174486 - DNA, 1086 bp, Artificial Sequence
  derived and/or modified sequence
atgtacggaaaaggaaaaagcaactcatccgcagtgccttctgactcacaggcccgagaaaaacttgccctgtacgtatacgaatatctcctgcatgtcggtgctcagaagtctgcccagacatttctgtctgagatccggtgggaaaaaaacataacgcttggggagcctcctggcttcctgcatagttggtggtgcgtgttctgggacctgtattgtgccgctcccgagaggagggaaacgtgcgagcatagcagcgaggccaaggccttccacgactacagcgctgctgccgcaccatcaccagtcctgggtaatattcctcccggagatggaatgcctgtgggtccagtgccccctggcttcttccagcccttcatgtctcctcgataccccggaggccctagaccaccccttagaatcccaaaccaagcccttgggggtgtacccggttctcagccattgctccctagcggcatggatccaacccgccagcagggccacccgaatatgggcggtcctatgcagcggatgacgcctcccagagggatggtgccactgggacctcagaattatggtggagctatgcggcctcccctgaatgcacttggaggaccgggtatgcctggcatgaacatgggtcccggtggcggaagaccttggcctaacccaacaaatgccaactctatcccttacagttccgcctcccccggaaattacgtaggcccacccggaggaggaggacctccaggtacccccattatgcccagtccagcagactctaccaattcaggcgataatatgtataccctgatgaatgccgtgccccctggacctaatcgaccaaacttccccatgggcccaggctctgacgggcctatgggtggtttgggtggaatggagagtcaccatatgaatgggagcctgggatcgggtgatatggattcaatttctaagaacagtcccaacaacatgagcttatcaaaccagcctggcacccctcgcgatgacggagagatgggaggtaatttccttaacccgttccagagcgaatcttactcaccatccatgacaatgagtgtgtag

SEQ ID NO: 174487 - DNA, 945 bp, Artificial Sequence
  derived and/or modified sequence
atgggcaaaaatatcacgttgggcgaaccacctggattcctccactcttggtggtgcgtgttctgggacctttattgtgcagccccagagcgcagagagacttgcgaacactctagcgaagcaaaggcctttcacgactactcggccgctgcggcaccctctcccgtcctggggaacattcccccaggcgacggtatgcctgtggggccagtgcccccaggatttttccaaccatttatgtctcctcggtatcccggaggacctaggcctccactccgtatcccgaatcaagcactcggaggggtgcctggtagtcagcccctgctcccaagtggcatggacccaacacgacaacaagggcaccctaacatgggtggacccatgcaacgcatgaccccacctagaggcatggtgcccttgggtccccagaactatggaggggctatgcgaccacctttaaacgctctgggcggtccgggtatgcctggtatgaatatgggtcccggaggcggtcgtccgtggccaaatccgaccaatgccaattcaatcccctattcttccgcttcaccgggaaactacgttggaccccctggtggtggtggccctcccggtacaccaattatgcccagccccgctgactccacaaactcaggggataatatgtacacccttatgaatgctgttcccccaggtcccaatcgccctaatttccccatggggcctggttctgatggacctatgggcggattgggaggtatggaaagccaccacatgaatgggtctcttggtagcggggatatggacagcatctcaaaaaattctccaaataatatgagcctctcaaaccagcctggcaccccacgagatgacggagagatgggcggaaacttcttgaatccttttcaatctgagtcgtacagtccatccatgacaatgagtgtctag

SEQ ID NO: 174488 - DNA, 8780 bp, Artificial Sequence
  derived and/or modified sequence
ggcttagccgccaccgcgcgcttcggaaggccagagggagggggaggcctgtcagtctcgcgcgttgcctgggcgaagggggcggagctttggcgtggggcggccaatagtgggggtggctgcgtgggtcgccatggggacggggctgttcccggggaggctgtgatgggttgacaggtgcgtgacagtgggagctgctctcggcacaagcatgtacggcaaaggcaagagtaacagcagcgccgtcccgtccgacagccaggcccgggagaagttagcactctacgtatatgaatatctgctccatgtaggagctcagaaatcagctcaaacatttttatcagagataagatgggaaaaaaacatcacattgggggaaccaccaggattcttacattcttggtggtgtgtattttgggatctctactgtgcagctccagagagacgtgaaacatgtgaacactcaagtgaagcaaaagccttccatgattacagtgctgcagcagctcccagtccagtgctaggaaacattcccccaggagatggcatgccagtaggtcctgtaccaccagggttctttcagccttttatgtcacctcggtaccctggaggtccaaggcccccattgaggatacctaatcaggcacttggaggtgtcccaggaagtcagccattactccccagtggaatggatccaactcgacaacaaggacatccaaatatgggtgggccaatgcagagaatgactcctccaagaggaatggtgcccttaggaccacagaactatggaggtgcaatgagacccccactgaatgctttaggtggccctggaatgcctggaatgaacatgggtccaggtggtggtagaccttggccaaacccaacaaatgccaattcaataccatactcctcagcatctcctgggaattatgtaggtcctccaggaggtggagggccaccaggaacacccatcatgcctagtccagcagattcaaccaactctggtgataacatgtatactttaatgaatgcagtacctcctggacctaacagacctaattttccaatgggtcctgggtcagatggtcccatgggtggattaggaggaatggagtcacatcacatgaatggctctttaggctcaggagatatggacagtatttccaagaattctcccaataatatgagcctgagtaatcaaccgggcactccaagggatgatggcgaaatggggggaaatttcttaaatccttttcagagtgagagttactcccctagcatgacaatgagcgtgtgatccattaccaagtctcctcatgaaaaccacagtgagtcagcccttcacagaactactacggaagaaaattattcatcacagtgtacagttaaacaaaggaatctcagtcacaccaaaccaacctttttatttcctgctctctcccctcttttgtgaagaaagcgggtccaaatgtgattcaaacaactgtacggagtggcatattagaattgccctaaactgaactgcaaataattatgtgtgtatgtatatgtgtgggaaagagaatgtactgtatatgtgtatgttatacagacatatacacatacatacattgacccacaggacattgtaaaatattatcacatgacatcttaagtagaaataagtagggacttttattccatcctttttttcacgtttacattttaattattacaagttgctcctgccccctccctgaactattttgtgctgtgtatatcactgctttatataagttattttttaaggtgaactcagatgttatggttttgtaaatgtctgcaatcatggataggaataaaatcgcttatttgagagctttcattaaattgcgtctgatgcaagttatcctgtgaatcacaaagtgtactgtctcaaaaaatagaagaaaatgtgtcttcgtctttatgttgaatcaaacaatttctcagttaccttcagtgaaaagtatttttttaatttttatttgagaaaaacacttcaaatcagtaaaagcttaactggggcctcacacagtatatttctgcaataactgctttaaacggagttcttgatttgtttgtcttagatgatacagaaatcattaaatagcccaaatcatttagaccatagcaataaagtgaccggggttgtcatatatttagcaacatcttttctctttaacatgatgaagcccaaaagtgataacaaaagcatttgcttgaatttgtcacttctcaccaggagtactagaggtaaatttttaataacatactaatgtgaaatggtatctggtttttattcagactttttgtgagcatattcttatagacactagaaataaatacatagaaggagactttgagcacaagggagaagagagttattagcactcctgaggcctctggaatgctgcttttctatccaggtatcttgcttgctaccagcagaattgactggtattggttctcactggccagggagcctctgctctgttcctggaatataaggcttttattcaggagcaaatcattgatagtaactttgctttatctagccattgacttcagcaggctaaaactacattgtgtaactgactgttcaaaaaagaataagtaaattttttttaatctaattcccttatggaaagcaccttgctctatggcactttccagatcttttgggattttgtgcttaattatacatacatacaccaaaatcacaatagaaagatatgaagactttaattttagactctgaaagataactgggtgatcctttgtgttaaaattgtgatacaaacaaccattgataaataccaactatgaatccaaactctagagactttgaaaagcattgtttaattgcaggtaagaggaatcttctctttcctttaggcttatagtctctaaagtgaaaatttggcaggatatagtcatgcagctcataatgacattccaatcaaccacagactgcatatacagcagtggtcctataagattataataccatatttttagcatatcttttctatgcttagatacacaaataccattgtattacagttgcctttggtattcagtacagtaacatgctgtacaggtttgtagcctaggagcaatagtttatattatatagcctaggtgtgtaggagcctataccatctaggtttgtgtaagtacactctatgatgttcagacaaggacaatattgcctgacaatgcatttctcagaatgtatacttatcattaagtaacatatgactgtatgtactagttcctgatgacttacttctctcaaattcataatgatttagtccttgtaaaaataaagattttgcctgtgcctaaacagggatactaggcagaactgttgagaaaaaaaagctgaattaaatttatgttgcagatttaaactatcataaaatgagcctcagttaatcacacacagtattcaggtgcctaggagtgcacaccggagaacagcctcatgctgtcaagctgcagaaacctttcatgcaaattcagatgaaaaggtctttacctcaagccagggtaacctgaatgaaggtgatagtttgtccagacacctgactttaccaagaagaattttgactttcatattttatgacaatcatataaaaattgacagtcctttgattattaagcttaatcttataatgctagaattttcaaatattttgttgactcttctccattgttaccgatcttgaaattcttttcttcgccttctgagaaggtattatttcttatcacaaagaatgatgaatatgattttatctacccttattttgggggtaatacgagaatatgaattgcatcatgatccccattatttctaacctaaaagtaaaattcgttttttttttcaaggcagagcagtcaattgattataagtatttatttcttttttcttcttggagcccagattaaaaagagttattttagatttaaaaatttcctgaaatagttgaaaaattatttttgaggagaaaattgtatccaagaaacccagaatgtaaggatacttgatttttatatccagataattctttcatgcactgaatggaagacagtatatctgtatattaatttttgtttagattttgaatcatttaacccttatccttttttcttgtaataagactatttaatgtttttctcttgtgttttccatctttatcaatgcattcgtgttggtcttgatgtatactacctgttcctagtgttatttttacacgtcatctcacagtaataatatcagcaattcttgctgcattgaacatattaaatacacatgtaaaatgaaaaagtaagcagtaggtaaaatcttgttactctgctttgcattctgcctaactcactgcatttgaaaatacatgtcaaattctttctgagggtatgtatgattcttaactacgtgtcttacagcaaagttgcccatgggaacaaaggctgtagggtgtcattgatcttgtaatacaacacatatttgatgggtgaatcttattagcactcctttgaaaatgttccagtatggagtcagttgctgataaagaggaagttcacagctaggaatccgaagttaagatttctcaattgccgcctgggcactcatgcctgtaatcccagcacttgggaggccaaggtgggcagatcacctgaggtcgggagttcaagaccagcctggccaacctggtgaaacccccccatctctactaaaaatacaaaaattagccaggtatggtggtggctgcctgtaatcccagctactcaagaggctgaggcgggagaatcacttgaacccaggaggcggaggttgcagtgagccgagattgtgccactgcactccagcctgggtgacagagcaagactccatctcaaaaatagaaaagatttctcaattgccaaaaagattaacaagtaaatcaattctgctcccccagccatgaaaagtgcccaaaacagccctttccctccagaataaaataaaacttccatttctatttttatgattctctaagatatctgaactccattgcatttcatagggttattcagttagcacttctgtggtttaaaagacaacaaatgaaaataagtaagttcagtttggggcatgaagaagtcccacatctgtctatatcttttcttcatcatattgtccctaggaatgtatagcaaagcattcagaactgctcctttggctggggaagttttccaccgtccttaatactatgaagtcttgattacttcttccgtggctttatccttgcctccctcccaatccctgcatcttccaggagaaataaaataccaactgaacactgttaccttctcagcccttaccattttcatctgcatatagtgtatagtactaagagtagttttcccaggagaaataattgcaattttcatttcttgattatcactgctaattcgaaggagtgccacaaatcatagccacttgattttgattttggaatgcattttagtgttttgacactggttttccttttttttaaatttttttttcttttttttttttgagacagtcttgctctgtcacccaggctggagtgcagtggcacaatcttggctcactgccgtctccgcctcccaggttccagagattctcctgcctcagcctccagagtagctggattacaggcatgcgtcacaggctaatttttgtatttttagtagaggcagggtttcaccatgttggccaggctggtctggaactcctgacctcaagtgatctgcccgcctcagcctcccaaagtgctgggattacaggcatgagccactatgcttgatcaggttttcctcttttttttttttttttttgagtcagaatcttgctctgtcacccaggctggagtgcaatggtgtgatctcggctcactgcaaccttcacctcccgggttcatgcaattctcctgcctcagcctcccgagtggctgggactacaggtgctcaccaccatgcccagctaattttttgtatttttagtagagaccgggtttcaccgtgttagccaggatggtctcgatctcctgacctcgtgatccacccgccttggcctcccaaagtgttgggattacaggcatgagccaccgtacctggcccaggttttcctttttttttatgtcttctgtacaatagagttggccctccatatccacaggttccacatccctgattcaatcaactcctgataaaaaatattggaaaaaatttttataacaataaaaaccaataatacaacaataattacaaataatacattgtaacaatgatttccatggcatttataatacattgtattaggtattataagtaaacgagatgatttgaagtatattggaggatgtgcataggttatactatgccgttttatataaaggacttaagcgtctgtggattttggtatctgcagaggtcctggaaccggtctcccttggatacggagggacaactgtagttctctgtctttgaaaacattaatcgatacaagtggccagtgaatgtatagtatgggagggagtaatccagtatgggggacaaggttgccatatatttgccaaaagtagttgaatcttctttctgtttttccctcctggtggaataagtttattgtttgctatgaggagccagaggctgtgtttgtttaaagcaatggtacccaatcttaagcatgtgtaaaggtctccctgggtctgtgaaccataccttgagaaataactagaaaagtaaaagaatggtgaaccactattaataatacttccattttgcatactaaatatgttgcgtgtacctgtgtgtgtgtgttgggaatagtaatatgaagtttgctcacaaaacactcccactgtgattcacattattttatagcacaaccaataatgattaaacataattatttcctttgactacttttcatttcagtggtaaaacagctgatgaaagttatttgggatggaaagagtaatacaagacatacgcagatggagtctcctgtgcgtaggtttagcacacccatgttagcttgtccacattaggccttcttttgaaggtactgtatctaaagataagggcataagtgatcatttaattctcagccacttcactgatactacaaggtgttacacagtaattatagtggtttgatacagacatttgtttacaagaaactgaattggcattattaacttatttcacacaaaaaaagttagctttacccatgaactgtaattcagattgataaggtgacctacccatgaaaaagacacctgagacctgtttacttttttaaactatgaagtgaaatcctcagttcaataagtgtcccaaggagaatttcctctgttaaattttccctgttaacttagtataattggttttcttgaatagaagaataatgatttctgtaagatattttaatgtgaatatttttgctgtcttcatctttaaaaattaaatacagtactatatatagatattaaaattttaaagtgggactaggtgtttttatgtatacaattacagtttgtctcctctctttgcaaatttactggctattatcagaataaaggttggactcattttgcttatcccagtcattaaaatgttgtgatctgtttctaacatatttagcatttcatttttaaaatgagatgtgccattatcataacaaaggcaactattaatgttcctagaaaaaatgatgtaaaggacttactcctagtcaatattaacacttaatcccactttcttttttccaccaaatggcctcagtacattgccaagagagtgaaatttggattcctcacagtactcagaacacaatatgatatttgtcagctaactttccatcatgtcttggtaaaattgctcagttaaatataattggccatctacttattaaaaaacaattcaaataatctgtacagttaccataatttgacaacaaattactttaaatttagcaccatcttagaaatcttcttaatataaactactgattgaaatgtgtttatactttctatcatatttcaaactgttttactttccttgcattaagacaattaaaacacaaactacatgttagaatgaataatttaaaggacatgctgctgtttcagcataaaaaatggtaaagtctttataaatagaatacttatgatagccattaacgtattgaattgtttaattaacctagttgtgattttccgaatttaagacgttttcttactacatgtgttaaattgttacctataatatcttcctggaaaaatagaagtatttgtaaggtttttataaatgcacaatttatgtataaatataattggaatctgggatgactcttagtaatctactattcttaattcaacgatggccaccagctacctgacacattttgtaaatttagcatctgtgtatgtgtgttcgtgtatgtgtgtgtgcgtgcatgtgcacattactgcatttattctcaaatggatttataatttagtgtttttgtacaagtacttgagctattcatgtaatgggataagttgccataaagatgtacataaatgacccttaatttggcacgttttcacatttaattttttaaaatacagcttttcatatacagttcctaccctttcatttctagcctgtacttcattacttgttgaaaaagtcaagtttgtatgaagccagcataaacatcaaaatataactaatgtgga

SEQ ID NO: 174489 - DNA, 1698 bp, Artificial Sequence
  derived and/or modified sequence
gggttgacaggtgcgtgacagtgggagctgctctcggcacaagcatgtacggcaaaggcaagagtaacagcagcgccgtcccgtccgacagccaggcccgggagaagttagcactctacgtatatgaatatctgctccatgtaggagctcagaaatcagctcaaacatttttatcagagataagatgggaaaaaacatcacattgggggaaccaccaggattcttacattcttggtggtgtgtattttgggatctctactgtgcagctccagagagacgtgaaacatgtgaacactcaagtgaagcaaaagccttccatgattacagtgctgcagcagctcccagtccagtgctaggaaacattcccccaggagatggcatgccagtaggtcctgtaccaccagggttctttcagccttttatgtcacctcggtaccctggaggtccaaggcccccattgaggatacctaatcaggcacttggaggtgtcccaggaagtcagccattactccccagtggaatggatccaactcgacaacaaggacatccaaatatgggtgggccaatgcagagaatgactcctccaagaggaatggtgcccttaggaccacagaactatggaggtgcaatgagacccccactgaatgctttaggtggccctggaatgcctggaatgaacatgggtccaggtggtggtagaccttggccaaacccaacaaatgccaattcaataccatactcctcagcatctcctgggaattatgtaggtcctccaggaggtggagggccaccaggaacacccatcatgcctagtccagcagattcaaccaactctggtgataacatgtatactttaatgaatgcagtacctcctggacctaacagacctaattttccaatgggtcctgggtcagatggtcccatgggtggattaggaggaatggagtcacatcacatgaatggctctttaggctcaggagatatggacagtatttccaagaattctcccaataatatgagcctgagtaatcaaccgggcactccaagggatgatggcgaaatggggggaaatttcttaaatccttttcagagtgagagttactcccctagcatgacaatgagcgtgtgatccattaccaagtctcctcatgaaaaccacagtgagtcagcccttcacagaactactacggaagaaaattattcatcacagtgtacagttaaacaaaggaatctcagtcacaccaaaccaacctttttatttcctgctctctcccctcttttgtgaagaaagcgggtccaaatgtgattcaaacaactgtacggagtggcatattagaattgccctaaactgaactgcaaataattatgtgtgtatgtatatgtgtgggaaagagaatgtactgtatatgtgtatgttatacagacatatacacatacatacattgacccacaggacattgtaaaatattatcacatgacatcttaagtagaaataagtagggacttttattccatcctttttttcacgtttacattttaattattacaagttgctcctgccccctccctgaactattttgtgctgtgtatatcactgctttatataagttattttttaaggtgaactcagatgttatggttttgtaaatgtctgcaatcatggataggaataaaatcgcttatttgagagctttcatt

SEQ ID NO: 174490 - DNA, 1086 bp, Artificial Sequence
  derived and/or modified sequence
atgtacggcaagggcaagagcaacagcagcgccgtgcccagcgacagccaggccagagagaagctggccctgtacgtgtacgagtacctgctgcacgtgggcgcccagaagagcgcccagaccttcctgagcgagatcagatgggagaagaacatcaccctgggcgagccccccggcttcctgcacagctggtggtgcgtgttctgggacctgtactgcgccgcccccgagagaagagagacctgcgagcacagcagcgaggccaaggccttccacgactacagcgccgccgccgcccccagccccgtgctgggcaacatcccccccggcgacggcatgcccgtgggccccgtgccccccggcttcttccagcccttcatgagccccagataccccggcggccccagaccccccctgagaatccccaaccaggccctgggcggcgtgcccggcagccagcccctgctgcccagcggcatggaccccaccagacagcagggccaccccaacatgggcggccccatgcagagaatgaccccccccagaggcatggtgcccctgggcccccagaactacggcggcgccatgagaccccccctgaacgccctgggcggccccggcatgcccggcatgaacatgggccccggcggcggcagaccctggcccaaccccaccaacgccaacagcatcccctacagcagcgccagccccggcaactacgtgggcccccccggcggcggcggcccccccggcacccccatcatgcccagccccgccgacagcaccaacagcggcgacaacatgtacaccctgatgaacgccgtgccccccggccccaacagacccaacttccccatgggccccggcagcgacggccccatgggcggcctgggcggcatggagagccaccacatgaacggcagcctgggcagcggcgacatggacagcatcagcaagaacagccccaacaacatgagcctgagcaaccagcccggcacccccagagacgacggcgagatgggcggcaacttcctgaaccccttccagagcgagagctacagccccagcatgaccatgagcgtgtag

SEQ ID NO: 174491 - DNA, 945 bp, Artificial Sequence
  derived and/or modified sequence
atgggcaagaacatcaccctgggcgagccccccggcttcctgcacagctggtggtgcgtgttctgggacctgtactgcgccgcccccgagagaagagagacctgcgagcacagcagcgaggccaaggccttccacgactacagcgccgccgccgcccccagccccgtgctgggcaacatcccccccggcgacggcatgcccgtgggccccgtgccccccggcttcttccagcccttcatgagccccagataccccggcggccccagaccccccctgagaatccccaaccaggccctgggcggcgtgcccggcagccagcccctgctgcccagcggcatggaccccaccagacagcagggccaccccaacatgggcggccccatgcagagaatgaccccccccagaggcatggtgcccctgggcccccagaactacggcggcgccatgagaccccccctgaacgccctgggcggccccggcatgcccggcatgaacatgggccccggcggcggcagaccctggcccaaccccaccaacgccaacagcatcccctacagcagcgccagccccggcaactacgtgggcccccccggcggcggcggcccccccggcacccccatcatgcccagccccgccgacagcaccaacagcggcgacaacatgtacaccctgatgaacgccgtgccccccggccccaacagacccaacttccccatgggccccggcagcgacggccccatgggcggcctgggcggcatggagagccaccacatgaacggcagcctgggcagcggcgacatggacagcatcagcaagaacagccccaacaacatgagcctgagcaaccagcccggcacccccagagacgacggcgagatgggcggcaacttcctgaaccccttccagagcgagagctacagccccagcatgaccatgagcgtgtag

SEQ ID NO: 174492 - protein, 134 aa, Artificial Sequence
  derived and/or modified sequence
MIFSMLRKLPKVTCRDVLPEIRAICIEEIGCWMQSYSTSFLTDSYLKYIGWTLHDKHREVRVKCVKALKGLYGNRDLTARLELFTGRFKDWMVSMIVDREYSVAVEAVRLLILILKNMEGVLMDVDCESVYPIV

SEQ ID NO: 174493 - protein, 128 aa, Artificial Sequence
  derived and/or modified sequence
MIFSMLRKLPKVTCRDVLPEIRAICIEEIGCWMQSYSTSFLTDSYLKYIGWTLHDKHREVRVKCVKALKGLYGNRDLTARLELFTGRFKDWMVSMIVDREYSVAVEAVRLLILILKIGSQTPATRECI

SEQ ID NO: 174494 - protein, 134 aa, Artificial Sequence
  derived and/or modified sequence
MIFSMLRKLPKVTCRDVLPEIRAICIEEIGCWMQSYSTSFLTDSYLKYIGWTLHDKHREVRVKCVKALKGLYGNRDLTARLELFTGCFKDWMVSMIMDREYSVAVEAVRLLILILKNMEGVLMDVDCESVYPIV

SEQ ID NO: 174495 - protein, 116 aa, Artificial Sequence
  derived and/or modified sequence
MIFSMLRKLPKVTCRDVLPEIRAICIEEIGCWMQSYSTSFLTDSYLKYIGWTLHDKHREVRVKCVKALKGLYGNRDLTARLELFTGCFKDWMVSMIMDREYSVAVEAVRLLILILK

SEQ ID NO: 174496 - protein, 1225 aa, Artificial Sequence
  derived and/or modified sequence
MSSPLQRAVGDTKRALSASSSSSASLPFDDRDSNHTSEGNGDSLLADEDTDFEDSLNRNVKKRAAKRPPKTTPVAKHPKKGSRVVHRHSRKQSEPPANDLFNAVKAAKSDMQSLVDEWLDSYKQDQDAGFLELVNFFIQSCGCKGIVTPEMFKKMSNSEIIQHLTEQFNEDSGDYPLIAPGPSWKKFQGSFCEFVRTLVCQCQYSLLYDGFPMDDLISLLTGLSDSQVRAFRHTSTLAAMKLMTSLVKVALQLSVHQDNNQRQYEAERNKGPGQRAPERLESLLEKRKELQEHQEEIEGMMNALFRGVFVHRYRDVLPEIRAICIEEIGCWMQSYSTSFLTDSYLKYIGWTLHDKHREVRLKCVKALKGLYGNRDLTTRLELFTSRFKDRMVSMVMDREYDVAVEAVRLLILILKNMEGVLTDADCESVYPVVYASHRGLASAAGEFLYWKLFYPECEIRMMGGREQRQSPGAQRTFFQLLLSFFVESELHDHAAYLVDSLWDCAGARLKDWEGLTSLLLEKDQNLGDVQESTLIEILVSSARQASEGHPPVGRVTGRKGLTSKERKTQADDRVKLTEHLIPLLPQLLAKFSADAEKVTPLLQLLSCFDLHIYCTGRLEKHLELFLQQLQEVVVKHAEPAVLEAGAHALYLLCNPEFTFFSRADFARSQLVDLLTDRFQQELEELLQSSFLDEDEVYNLAATLKRLSAFYNTHDLTRWELYEPCCQLLQKAVDTGEVPHQVILPALTLVYFSILWTLTHISKSDASQKQLSSLRDRMVAFCELCQSCLSDVDTEIQEQAFVLLSDLLLIFSPQMIVGGRDFLRPLVFFPEATLQSELASFLMDHVFIQPGDLGSGDSQEDHLQIERLHQRRRLLAGFCKLLLYGVLEMDAASDVFKHYNKFYNDYGDIIKETLTRARQIDRSHCSRILLLSLKQLYTELLQEHGPQGLNELPAFIEMRDLARRFALSFGPQQLQNRDLVVMLHKEGIQFSLSELPPAGSSNQPPNLAFLELLSEFSPRLFHQDKQLLLSYLEKCLQHVSQAPGHPWGPVTTYCHSLSPVENTAETSPQVLPSSKRRRVEGPAKPNREDVSSSQEESLQLNSIPPTPTLTSTAVKSRQPLWGLKEMEEEDGSELDFAQGQPVAGTERSRFLGPQYFQTPHNPSGPGLGNQLMRLSLMEEDEEEELEIQDESNEERQDTDMQASSYSSTSERGLDLLDSTELDIEDF

SEQ ID NO: 174497 - protein, 145 aa, Artificial Sequence
  derived and/or modified sequence
MSSPLQRAVGDTKRALSASSSSSASLPFDDRDSNHTSEGNGDSLLADEDTDFEDSLNRNVKKRAAKRPPKTTPVAKHPKKGSRVVHRHSRKQSEPPANDLFNAVKAAKSDMQSLVDEWLDSYKQDQDAGFLELVNFFIQSCGCKG

SEQ ID NO: 174498 - DNA, 3678 bp, Artificial Sequence
  derived and/or modified sequence
atgagcagccccctgcagagagccgtgggcgacaccaagagagccctgagcgccagcagcagcagcagcgccagcctgcccttcgacgacagagacagcaaccacaccagcgagggcaacggcgacagcctgctggccgacgaggacaccgacttcgaggacagcctgaacagaaacgtgaagaagagagccgccaagagaccccccaagaccacccccgtggccaagcaccccaagaagggcagcagagtggtgcacagacacagcagaaagcagagcgagccccccgccaacgacctgttcaacgccgtgaaggccgccaagagcgacatgcagagcctggtggacgagtggctggacagctacaagcaggaccaggacgccggcttcctggagctggtgaacttcttcatccagagctgcggctgcaagggcatcgtgacccccgagatgttcaagaagatgagcaacagcgagatcatccagcacctgaccgagcagttcaacgaggacagcggcgactaccccctgatcgcccccggccccagctggaagaagttccagggcagcttctgcgagttcgtgagaaccctggtgtgccagtgccagtacagcctgctgtacgacggcttccccatggacgacctgatcagcctgctgaccggcctgagcgacagccaggtgagagccttcagacacaccagcaccctggccgccatgaagctgatgaccagcctggtgaaggtggccctgcagctgagcgtgcaccaggacaacaaccagagacagtacgaggccgagagaaacaagggccccggccagagagcccccgagagactggagagcctgctggagaagagaaaggagctgcaggagcaccaggaggagatcgagggcatgatgaacgccctgttcagaggcgtgttcgtgcacagatacagagacgtgctgcccgagatcagagccatctgcatcgaggagatcggctgctggatgcagagctacagcaccagcttcctgaccgacagctacctgaagtacatcggctggaccctgcacgacaagcacagagaggtgagactgaagtgcgtgaaggccctgaagggcctgtacggcaacagagacctgaccaccagactggagctgttcaccagcagattcaaggacagaatggtgagcatggtgatggacagagagtacgacgtggccgtggaggccgtgagactgctgatcctgatcctgaagaacatggagggcgtgctgaccgacgccgactgcgagagcgtgtaccccgtggtgtacgccagccacagaggcctggccagcgccgccggcgagttcctgtactggaagctgttctaccccgagtgcgagatcagaatgatgggcggcagagagcagagacagagccccggcgcccagagaaccttcttccagctgctgctgagcttcttcgtggagagcgagctgcacgaccacgccgcctacctggtggacagcctgtgggactgcgccggcgccagactgaaggactgggagggcctgaccagcctgctgctggagaaggaccagaacctgggcgacgtgcaggagagcaccctgatcgagatcctggtgagcagcgccagacaggccagcgagggccacccccccgtgggcagagtgaccggcagaaagggcctgaccagcaaggagagaaagacccaggccgacgacagagtgaagctgaccgagcacctgatccccctgctgccccagctgctggccaagttcagcgccgacgccgagaaggtgacccccctgctgcagctgctgagctgcttcgacctgcacatctactgcaccggcagactggagaagcacctggagctgttcctgcagcagctgcaggaggtggtggtgaagcacgccgagcccgccgtgctggaggccggcgcccacgccctgtacctgctgtgcaaccccgagttcaccttcttcagcagagccgacttcgccagaagccagctggtggacctgctgaccgacagattccagcaggagctggaggagctgctgcagagcagcttcctggacgaggacgaggtgtacaacctggccgccaccctgaagagactgagcgccttctacaacacccacgacctgaccagatgggagctgtacgagccctgctgccagctgctgcagaaggccgtggacaccggcgaggtgccccaccaggtgatcctgcccgccctgaccctggtgtacttcagcatcctgtggaccctgacccacatcagcaagagcgacgccagccagaagcagctgagcagcctgagagacagaatggtggccttctgcgagctgtgccagagctgcctgagcgacgtggacaccgagatccaggagcaggccttcgtgctgctgagcgacctgctgctgatcttcagcccccagatgatcgtgggcggcagagacttcctgagacccctggtgttcttccccgaggccaccctgcagagcgagctggccagcttcctgatggaccacgtgttcatccagcccggcgacctgggcagcggcgacagccaggaggaccacctgcagatcgagagactgcaccagagaagaagactgctggccggcttctgcaagctgctgctgtacggcgtgctggagatggacgccgccagcgacgtgttcaagcactacaacaagttctacaacgactacggcgacatcatcaaggagaccctgaccagagccagacagatcgacagaagccactgcagcagaatcctgctgctgagcctgaagcagctgtacaccgagctgctgcaggagcacggcccccagggcctgaacgagctgcccgccttcatcgagatgagagacctggccagaagattcgccctgagcttcggcccccagcagctgcagaacagagacctggtggtgatgctgcacaaggagggcatccagttcagcctgagcgagctgccccccgccggcagcagcaaccagccccccaacctggccttcctggagctgctgagcgagttcagccccagactgttccaccaggacaagcagctgctgctgagctacctggagaagtgcctgcagcacgtgagccaggcccccggccacccctggggccccgtgaccacctactgccacagcctgagccccgtggagaacaccgccgagaccagcccccaggtgctgcccagcagcaagagaagaagagtggagggccccgccaagcccaacagagaggacgtgagcagcagccaggaggagagcctgcagctgaacagcatcccccccacccccaccctgaccagcaccgccgtgaagagcagacagcccctgtggggcctgaaggagatggaggaggaggacggcagcgagctggacttcgcccagggccagcccgtggccggcaccgagagaagcagattcctgggcccccagtacttccagaccccccacaaccccagcggccccggcctgggcaaccagctgatgagactgagcctgatggaggaggacgaggaggaggagctggagatccaggacgagagcaacgaggagagacaggacaccgacatgcaggccagcagctacagcagcaccagcgagagaggcctggacctgctggacagcaccgagctggacatcgaggacttctag

SEQ ID NO: 174499 - DNA, 2667 bp, Artificial Sequence
  derived and/or modified sequence
atgagcagccccctgcagagagccgtgggcgacaccaagagagccctgagcgccagcagcagcagcagcgccagcctgcccttcgacgacagagacagcaaccacaccagcgagggcaacggcgacagcctgctggccgacgaggacaccgacttcgaggacagcctgaacagaaacgtgaagaagagagccgccaagagaccccccaagaccacccccgtggccaagcaccccaagaagggcagcagagtggtgcacagacacagcagaaagcagagcgagccccccgccaacgacctgttcaacgccgtgaaggccgccaagagcgacatgcagagcctggtggacgagtggctggacagctacaagcaggaccaggacgccggcttcctggagctggtgaacttcttcatccagagctgcggctgcaagggcatcgtgacccccgagatgttcaagaagatgagcaacagcgagatcatccagcacctgaccgagcagttcaacgagatggacgacctgatcagcctgctgaccggcctgagcgacagccaggtgagagccttcagacacaccagcaccctggccgccatgaagctgatgaccagcctggtgaaggtggccctgcagctgagcgtgcaccaggacaacaaccagagacagtacgaggccgagagaaacaagggccccggccagagagcccccgagagactggagagcctgctggagaagagaaaggagctgcaggagcaccaggaggagatcgagggcatgatgaacgccctgttcagaggcgtgttcgtgcacagatacagagacgtgctgcccgagatcagagccatctgcatcgaggagatcggctgctggatgcagagctacagcaccagcttcctgaccgacagctacctgaagtacatcggctggaccctgcacgacaagcacagagaggtgagactgaagtgcgtgaaggccctgaagggcctgtacggcaacagagacctgaccaccagactggagctgttcaccagcagattcaaggacagaatggtgagcatggtgatggacagagagtacgacgtggccgtggaggccgtgagactgctgatcctgatcctgaagaacatggagggcgtgctgaccgacgccgactgcgagagcgtgtaccccgtggtgtacgccagccacagaggcctggccagcgccgccggcgagttcctgtactggaagctgttctaccccgagtgcgagatcagaatgatgggcggcagagagcagagacagagccccggcgcccagagaaccttcttccagctgctgctgagcttcttcgtggagagcgagctgcacgaccacgccgcctacctggtggacagcctgtgggactgcgccggcgccagactgaaggactgggagggcctgaccagcctgctgctggagaaggaccagaacctgggcgacgtgcaggagagcaccctgatcgagatcctggtgagcagcgccagacaggccagcgagggccacccccccgtgggcagagtgaccggcagaaagggcctgaccagcaaggagagaaagacccaggccgacgacagagtgaagctgaccgagcacctgatccccctgctgccccagctgctggccaagttcagcgccgacgccgagaaggtgacccccctgctgcagctgctgagctgcttcgacctgcacatctactgcaccggcagactggagaagcacctggagctgttcctgcagcagctgcaggaggtggtggtgaagcacgccgagcccgccgtgctggaggccggcgcccacgccctgtacctgctgtgcaaccccgagttcaccttcttcagcagagccgacttcgccagaagccagctggtggacctgctgaccgacagattccagcaggagctggaggagctgctgcagagcagcttcctggacgaggacgaggtgtacaacctggccgccaccctgaagagactgagcgccttctacaacacccacgacctgaccagatgggagctgtacgagccctgctgccagctgctgcagaaggccgtggacaccggcgaggtgccccaccaggtgatcctgcccgccctgaccctggtgtacttcagcatcctgtggaccctgacccacagcctgagccccgtggagaacaccgccgagaccagcccccaggtgctgcccagcagcaagagaagaagagtggagggccccgccaagcccaacagagaggacgtgagcagcagccaggaggagagcctgcagctgaacagcatcccccccacccccaccctgaccagcaccgccgtgaagagcagacagcccctgtggggcctgaaggagatggaggaggaggacggcagcgagctggacttcgcccagggccagcccgtggccggcaccgagagaagcagattcctgggcccccagtacttccagaccccccacaaccccagcggccccggcctgggcaaccagctgatgagactgagcctgatggaggaggacgaggaggaggagctggagatccaggacgagagcaacgaggagagacaggacaccgacatgcaggccagcagctacagcagcaccagcgagagaggcctggacctgctggacagcaccgagctggacatcgaggacttctag

SEQ ID NO: 174500 - DNA, 3678 bp, Artificial Sequence
  derived and/or modified sequence
atgtcttctccgcttcaaagggcggttggcgacactaagagagccctgtctgcttcatcgagcagtagcgcaagtctgccttttgatgaccgcgactccaatcacactagtgaaggaaatggcgattccttgctggctgacgaggacacagatttcgaagattctcttaaccgcaacgtgaagaagcgcgccgccaaacggcccccgaagacgacaccagtagctaagcatcccaagaagggctccagagtggtacacaggcattcaagaaagcaatccgagcctcctgccaatgacctgtttaatgccgttaaggccgcaaagtccgatatgcaatccctcgtggacgagtggctggattcctataagcaggatcaggatgctgggttcttggagctggtcaattttttcatccagagctgcgggtgtaagggcatcgtgacgcccgagatgtttaaaaagatgagcaatagtgagattatccagcacctgaccgaacagtttaatgaagattctggggattatcctctcattgctcctggcccatcttggaagaaatttcagggttccttttgtgaatttgtaagaactctggtgtgccagtgccagtactctctgctgtacgatggatttccaatggacgacctgatttctttgttgacaggcctcagtgactcacaggttagagctttcagacatacttctaccctcgccgcaatgaagttgatgacctctctggtgaaggtagccctccagctgtctgtgcaccaagataataaccagcggcagtatgaggcagaaaggaataaagggcccggacagcgagcccccgaacgtctggagtctctcctggagaaacggaaggagttacaagaacatcaggaggaaattgaaggcatgatgaatgcattattcagaggtgtcttcgtccatcgctaccgggatgtactgccagagattagagccatctgtattgaagagattggttgctggatgcagagctactctacctctttcctgactgactcgtacctgaaatatatcggatggaccctacatgacaagcaccgcgaggtgaggctgaaatgcgtgaaggccctcaaggggttgtatggcaaccgcgacctgactacccggctagaactcttcacgtcaaggttcaaggacagaatggtgagcatggtgatggatcgtgagtacgatgtcgcagtcgaggcagtgcgtctcctgatcttgatcttaaagaatatggagggcgtgctcacagatgctgattgtgaatcagtttaccctgtcgtctatgcctcccaccgggggctggcctctgcagccggagaattcttgtactggaagctgttttacccagaatgtgaaatccgcatgatgggaggccgggaacagcgtcagagccccggtgcacagagaacctttttccagctgttgttatccttcttcgtggaaagcgagttacatgaccatgccgcatacctggtggattcattgtgggattgcgcaggagccagattgaaagactgggaaggtttgacatccctgctgctggagaaagaccaaaacctcggcgacgttcaagaaagcactcttattgagattttagtaagttccgctcgacaggcatccgaaggccaccctccggtggggcgcgtcacagggagaaaagggctcacatctaaagagagaaaaacacaggccgatgacagagtgaaattgacagaacaccttatccctctgctgcctcagctcctagccaagttttctgcagatgctgaaaaagttacccccctcctgcaactgctctcgtgtttcgatctgcatatttattgtactggccggctggagaaacatctcgagctgtttctgcagcagctgcaggaagtggttgttaaacatgcagagcccgccgtgctcgaggcaggagcccacgctttgtatctcctgtgcaacccggagttcacgtttttcagcagggccgacttcgcccgatcgcagctggtggatctactaactgatcggttccagcaagaattagaagaacttctccagagctcttttctggatgaagacgaggtgtataacctggctgccactttaaagcgcctctcagctttctacaacacgcacgatttgactcgatgggaactttacgagccttgctgccagctccttcagaaggctgttgatacaggcgaagtgcctcaccaggtcatcctgcccgccctgacactggtatacttctcaatcctttggactttgactcacatcagcaagagcgatgcctcgcagaaacagttgagctccctgcgagatcgaatggtggcattttgcgagctgtgtcagagttgcttgagcgacgtggatactgagatccaggagcaagcttttgtgctgttaagcgatctcctgcttatcttttcgccacagatgatagtcggtggccgcgattttctgcgccctctggtgtttttccccgaagctaccttgcagtccgagttagcttcctttttaatggatcacgtgttcatccagccaggcgacctgggttccggggactcacaggaagatcacctgcagattgaacggctgcatcagcgacggcgcctcctagctgggttttgcaagctgctgctatatggagttctggagatggatgctgcctccgacgtcttcaaacattataacaaattttataatgactacggggatattattaaggaaactctgactagagctaggcaaatcgataggtctcactgcagtcggattctcctgttatccttgaaacagctctacactgaacttctccaggagcacggcccccaggggctaaatgagctccctgcgtttatcgagatgagggaccttgctcggaggtttgccctgagcttcggtccacagcagctgcagaacagagatctggttgtaatgcttcacaaagagggcattcagttctctcttagcgagctgcctccagctgggagctcaaaccaaccccccaatctagcctttctggaactgctgagtgagttttcaccgaggctgttccaccaggacaaacagctcctcctgtcgtatctcgagaagtgcctacagcatgttagccaggcccccgggcacccctggggccccgtgaccacgtattgtcacagtctttccccggtggaaaacactgcagagaccagccctcaagtcctgccgtctagcaagagaaggagagtcgagggacccgcaaaaccgaatcgggaggatgtgagctctagccaggaagaatcccttcagcttaattccatcccccccacccctactctgacttccacagctgtgaagagccgacagccactttggggccttaaagagatggaggaagaggatggaagtgagctggatttcgcacaggggcaaccagttgccggtactgaacgaagccggtttctgggcccgcaatactttcagactcctcataacccttccgggccgggactcgggaatcaattaatgcgattgagtctgatggaagaagacgaggaggaggagctcgagatccaggacgagagcaatgaggaacgccaggataccgacatgcaggcaagctcctactccagtacaagtgagcgtggactcgaccttctcgattccactgagttggatattgaggacttttag

SEQ ID NO: 174501 - DNA, 2667 bp, Artificial Sequence
  derived and/or modified sequence
atgtccagccccctgcagcgtgccgtgggagatacaaagcgggcactgtctgccagtagcagctcgtctgcttctctgcctttcgatgaccgagactctaatcataccagcgagggcaacggagacagtctgttggcagatgaagataccgacttcgaggatagtctcaaccgcaatgtcaaaaagagggccgccaaacgccctccaaaaacaaccccagtggccaagcaccctaagaagggttcaagagtggttcatcgccacagcagaaagcagagcgaacccccagctaacgacttgtttaatgcagttaaggcagccaagtccgatatgcaaagcttggttgacgagtggttggattcctataagcaggatcaggatgcaggttttctggaactcgttaacttctttattcagtcatgtggatgtaaggggattgttactcctgagatgttcaaaaagatgtctaactcagaaatcatccaacatctgactgaacagttcaacgagatggatgacctgattagtcttctaaccggcctgtctgactcgcaggtacgggcattccgccacacctcaacgctcgcagccatgaagcttatgaccagtctggtcaaggttgccctgcagctgagcgtccatcaggataacaaccagcggcagtatgaggccgagcgcaataagggacctgggcagagggcaccagaacgcctcgaatccctactggaaaagcgaaaagaacttcaggagcatcaggaggagatcgagggcatgatgaacgcattatttcgcggagtgttcgttcaccggtatagggatgtattgcctgaaatcagggcaatttgcatagaagagattgggtgttggatgcagagctattcaacctcctttctgacagattcctatctaaagtatattggctggaccctgcacgataagcatcgagaagtacggctgaagtgcgtgaaagccttgaagggcctgtatggcaaccgcgacctgacaacgagactagagctcttcacaagcaggtttaaagaccgcatggtgagcatggtcatggatagagaatacgatgtggcagtggaagctgtgcgcctcttaattctgatcctcaagaacatggagggagttctaaccgatgcagattgcgagagtgtctaccctgtcgtctatgcaagccatcggggactggcctctgcggccggtgaatttctatattggaaactgttttaccctgaatgcgagatacgtatgatgggcggcagggaacagagacagtccccaggagcccagcggactttctttcaacttctgctgagtttcttcgtcgagagcgagctgcatgaccacgccgcctacctcgttgactcactatgggactgcgctggcgccagacttaaagactgggagggcctgacctcactcttactcgaaaaagaccagaacctgggcgatgtacaggagagtacattgatcgagatcctggtgtcctccgcccgacaggcctctgaaggccaccctccggtcggacgggtgacggggaggaaggggctcacgagtaaggagagaaagactcaagccgatgatagagtgaagctgactgaacatttgataccactgctgccccagcttctcgcgaagttcagcgctgacgcagagaaggtgacaccactcctgcagttgttgtcatgtttcgatttgcacatttactgcactggacgccttgaaaaacatctggagctgtttctgcagcaattgcaggaagtcgtcgtaaagcacgccgaaccggctgttcttgaggccggcgcacacgccctgtacctgctgtgtaatcctgagttcacattcttctcgagggcagactttgctagatctcagcttgtggacttattaactgatcgcttccagcaagagctggaagagctgctccagtcttcctttctggatgaggatgaggtctacaacttggctgcaaccctcaagaggctcagtgctttctacaatacacacgacctcacccgctgggagctctatgaaccctgttgtcagctgttgcagaaggccgtggatactggcgaggtcccccatcaggttatccttcccgccctgactctggtgtattttagcattctctggactctcacgcattcccttagcccagtagagaacactgccgaaacttctccacaggttctgccatcaagtaagcgacggagagtggagggcccggcaaagccgaatcgagaggacgtgagctcctcccaggaagaatccctgcagctgaactctatccctccgacgcctacgcttacatctaccgctgtgaaaagtaggcagcccctgtggggcctgaaagaaatggaggaagaggacggttccgagctggattttgcccaaggacaaccagtggcaggaacagaacgttccaggtttttggggcctcaatatttccagactccacacaacccttcaggacctggcctgggaaaccagcttatgcggctatcactgatggaggaagacgaggaagaggagctggaaatccaggacgagtctaacgaggagagacaggatactgacatgcaggccagttcttactccagcacttccgaacgcggccttgacctgctagacagtaccgaactcgacatcgaggacttttag

SEQ ID NO: 174502 - DNA, 3678 bp, Artificial Sequence
  derived and/or modified sequence
atgtcctctcccctccaaagagccgtgggggacactaagagagccctgtccgcctcatcctcttccagcgcaagtcttcccttcgacgatcgggacagcaaccataccagtgaggggaacggtgattccctcctagcagacgaagataccgattttgaggactcactgaacagaaatgtgaagaagagagctgccaagcgccctcccaagaccacccctgtggccaagcacccaaaaaaaggaagcagagtggttcatcgtcatagcaggaagcagagcgaaccaccagccaacgatctgttcaacgctgtcaaggcagccaaaagtgatatgcagtccctggtcgacgaatggttggactcttacaagcaggaccaggacgcaggcttcttagaattggtgaacttttttatccagtcctgcgggtgtaaaggaatcgttacccctgaaatgtttaaaaagatgtccaactccgagattatccagcaccttacagaacagttcaacgaggacagtggggactatccactgatcgctccaggaccctcttggaaaaaatttcagggaagcttctgtgagttcgtgcgcacactcgtctgccagtgccaatattcattgctgtacgatgggttcccgatggacgacctgatcagcctgctgacgggattaagcgactcccaggtgcgcgcctttcggcacactagtactctggcagccatgaagctgatgacctctttggtgaaagtcgctctgcagctgtcggttcaccaagataacaatcaacgccagtatgaagcagaacgcaataaaggccccggacagcgggctccggagagacttgaaagcttactggagaaaaggaaggagctccaggaacaccaggaagaaatcgagggtatgatgaatgctcttttccgcggggtgttcgtgcaccggtacagggatgtcttgcctgaaatcagggctatatgcattgaggaaattggatgctggatgcagagttacagcaccagttttttgacagactcatatctcaagtacattggatggacgctgcacgacaagcaccgcgaagtgcgcttgaaatgtgtgaaagcactgaaaggcctctatggcaacagggacctgacaacaagactggaattgtttacgagccgtttcaaggaccggatggtgtccatggtaatggatcgtgagtacgacgtagccgttgaggcggtccgtctgctgattctgatcctgaagaatatggagggtgttcttacggacgctgattgcgagagcgtctatcctgtcgtctatgcatcccatagagggttggcgtccgcagctggtgaatttctttattggaaactattttacccagagtgcgagattagaatgatgggggggcgcgaacagagacagtctcctggagcgcaaaggacattttttcagctcctcctgtcgtttttcgtggaatctgaactgcatgaccatgccgcctacctggtggacagcctttgggactgcgcaggggcgcggctgaaagactgggaggggctgacctccctgctgctggagaaggaccagaatctaggggatgttcaagaatccactttgatcgaaatactggtgtcatccgcccggcaagcttctgaaggacatccccctgtcggcagggtgactggtagaaagggactcacttccaaagaacgcaaaacccaggcggacgacagagtcaaactaaccgagcacctgattcccctcctaccccaactgctggccaaattcagtgcagatgctgagaaggtgaccccactgcttcagctcttatcctgctttgacctgcacatatactgtactgggcggttagaaaaacatcttgagctcttcctgcagcaattacaggaagttgtagttaaacatgctgagcctgcagttctggaggcaggggcacatgccctgtaccttctttgcaatccagaattcacatttttctcccgcgcagatttcgcgcgcagccagctggtagatttgttaaccgatagattccagcaggagcttgaagagctgctgcaatcctcttttcttgacgaggatgaggtgtacaacctcgccgccacactaaagaggctctccgccttctacaacacacacgacttgactaggtgggagctttatgaaccttgctgccagttgctgcaaaaggctgtggacaccggtgaagttccccaccaggtgattcttccagcattgactcttgtatatttttcgattctgtggactctgacacatatctctaagtcagacgcatctcagaagcaactctccagcctgagggacaggatggttgccttctgcgagctctgtcagtcctgtctcagtgatgtggacacagaaatccaggagcaagcattcgtacttttgagcgatctcctcctcatcttttcccctcagatgattgtgggaggccgcgactttctgcgccccctggtgttcttcccggaggccaccctccaatctgagctggcctcattcttaatggaccatgtgttcattcagccgggcgacttgggatcgggggatagtcaggaggatcacctccagattgagcggctgcatcaaaggaggagacttctagctggcttctgcaagctgctgttatacggcgtcctagaaatggacgcggcttccgatgtgttcaagcattataacaaattttataatgactatggtgacatcataaaggagacgctcaccagagcccggcagatcgaccggagtcactgttcccgcatcttgcttctttccctgaaacagttgtacaccgagcttctgcaggagcatggtccccaaggcttgaatgaacttcctgccttcatcgagatgcgggacttggctcggcgcttcgcattgagcttcgggccccagcagctgcagaacagggacctcgtggtcatgctgcataaagaggggattcagttcagtctgagcgaactcccgcccgccgggtcctccaaccagcctcccaacctagccttcctggagctcctgtccgagttttctccccgtctgtttcatcaggataaacaactcctgttgagctatctggagaagtgcctacagcacgtcagccaggcacctggacacccttggggaccggtcacgacttattgtcactccctgtcaccagtcgaaaacacagccgagacgagtccgcaggtgctcccgagttctaagcgaaggcgtgtagagggacctgccaagcccaatcgcgaagacgtgtcttcgtcccaggaggagtctctacagcttaatagcatccctcccaccccgaccctgaccagtaccgccgtcaagtcacgacaacctctctggggcctcaaggagatggaggaagaggatggctctgagctggattttgctcagggtcagcccgtggcgggaaccgaacggtccaggtttctgggacctcaatacttccagaccccacataatccctccggcccagggcttggcaatcagctgatgaggctcagcttgatggaggaggatgaagaggaagagctagagatccaggacgagtctaatgaagagcggcaagataccgacatgcaggcctcctcctattcaagtactagtgagcgaggcctggacctcctcgacagcacagagctagacattgaggatttctag

SEQ ID NO: 174503 - DNA, 3678 bp, Artificial Sequence
  derived and/or modified sequence
atgagcagccccctgcagagagctgtgggggacaccaagagggccctgagcgccagcagcagcagcagcgccagcctgccctttgatgaccgggacagcaaccacaccagcgagggcaatggagacagcctgctggctgatgaggacacagactttgaggacagcctgaacagaaatgtgaagaagagagctgccaagaggcctcccaagaccacccctgtggccaagcaccccaagaagggcagccgggtggtgcaccgccacagcaggaagcagagcgagcccccagccaatgacctcttcaatgctgtgaaggccgccaagagtgacatgcagagcctggtggatgagtggctggacagctacaagcaggaccaggatgctggcttcctggagctggtgaacttcttcatccagagctgtggctgcaagggcatcgtgaccccagagatgttcaagaagatgagcaacagcgagatcatccagcacctgacagagcagttcaatgaagacagcggggactaccccctcatcgcccctggccccagctggaagaagttccagggcagcttctgtgaatttgtgaggaccctggtgtgccagtgccagtacagcctgctgtatgatggcttccccatggatgacctgatcagcctgctgaccggcctgagtgacagccaggtgcgggccttccgccacaccagcaccctggccgccatgaagctgatgaccagcctggtgaaggtggccctgcagctgtctgtgcaccaggacaacaaccagaggcagtatgaggccgagaggaacaagggccctggccagagggcccctgagcggctggagagcctgctggagaagaggaaggagctgcaggagcaccaggaggagattgagggcatgatgaatgccctcttccggggcgtgtttgtgcaccgctacagagatgtgctgcctgagatccgggccatctgcatcgaggagatcggctgctggatgcagagctacagcaccagcttcctgacagacagctacctgaagtacatcggctggaccctgcatgacaagcaccgggaggtgcggctgaagtgtgtgaaggccctgaagggcctgtatggcaacagagacctgaccacccggctggagctgttcaccagccgcttcaaggacaggatggtgtccatggtgatggaccgggagtatgatgtggccgtggaggccgtgcggctgctgatcctgatcctgaagaacatggagggcgtgctgacagatgctgactgtgagagcgtgtaccctgtggtgtatgccagccaccggggcctggccagcgctgctggggagttcctgtactggaagctgttctacccagaatgtgagatccgcatgatgggcggccgggagcagaggcagagccctggggcccagaggaccttcttccagctgctgctgtccttctttgtggagagcgagctgcatgaccacgccgcctacctggtggacagcctgtgggactgtgccggggcccggctgaaggactgggagggcctgaccagcctgctgctggagaaggaccagaacctgggagatgtgcaggagagcaccctgattgagatcctggtgtcctctgcccggcaggccagcgagggccacccccctgtgggccgggtgacaggcaggaagggcctgaccagcaaggagaggaagacccaggctgatgacagagtgaagctgacagagcacctgatccccctgctgccccagctgctggccaagttcagcgcagatgctgagaaggtgacccccctgctgcagctgctgagctgctttgacctgcacatctactgcaccggccgcctggagaagcacctggagctgttcctgcagcagctgcaggaggtggtggtgaagcatgctgagcctgctgtgctggaggccggggcccacgccctgtacctgctgtgcaaccctgagttcaccttcttcagcagagctgactttgcccggagccagctggtggacctgctgacagaccgcttccagcaggagctggaggagctgctgcagagcagcttcctggatgaagatgaggtgtacaacctggccgccaccctgaagaggctgagcgccttctacaacacccatgacctgacccgctgggagctgtatgagccctgctgccagctgctgcagaaggctgtggacaccggggaggtgccccaccaggtgatcctgcctgccctgaccctggtgtacttcagcatcctgtggaccctgacccacatcagcaagagtgatgccagccagaagcagctgagcagcctgcgggacaggatggtggccttctgtgagctgtgccagagctgcctgagtgatgtggacacagagatccaggagcaggcctttgtgctgctgagtgacctgctgctgatcttcagcccccagatgattgtgggcggccgggacttcctgcggcccctggtgttcttccctgaggccaccctgcagagcgagctggccagcttcctgatggaccacgtgttcatccagcccggggacctgggcagcggggacagccaggaggaccacctgcagatcgagcggctgcaccagaggcggcggctgctggccggcttctgcaagctgctgctgtatggagtgctggagatggatgctgccagtgatgtgttcaagcactacaacaagttctacaatgactatggagacatcatcaaggagaccctgacccgggcccggcagattgacaggagccactgcagccgcatcctgctgctgagcctgaagcagctgtacacagagctgctgcaggagcacggcccccagggcctgaatgagctgcctgccttcatcgagatgagggacctggccaggagatttgccctgagctttggcccccagcagctgcagaacagagacctggtggtgatgctgcacaaggagggcatccagttcagcctgtctgagctgcccccagctggcagcagcaaccagccccccaacctggccttcctggagctgctgtctgagttcagccccaggctcttccaccaggacaagcagctgctgctgagctacctggagaagtgcctgcagcacgtgtcccaggcccctggccacccctggggccctgtgaccacctactgccacagcctgagccctgtggagaacacagctgagaccagcccccaggtgctgcccagcagcaagagaagaagagtggagggccctgccaagcccaacagagaagatgtgagcagcagccaggaggagagcctgcagctgaacagcatcccccccacccccaccctgaccagcacagctgtgaagagccggcagcccctgtggggcctgaaggagatggaggaggaggatggcagcgagctggactttgcccagggccagcctgtggccggcacagagaggagccgcttcctgggcccccagtacttccagaccccccacaaccccagcggccctggcctgggcaaccagctgatgaggctgagcctgatggaggaggatgaggaggaggagctggagatccaggatgagagcaatgaggagcggcaggacacagacatgcaggccagcagctacagcagcaccagcgagcggggcctggacctgctggacagcacagagctggacatcgaggacttctag

SEQ ID NO: 174504 - DNA, 2667 bp, Artificial Sequence
  derived and/or modified sequence
atgagcagccccctgcagagagctgtgggggacaccaagagggccctgagcgccagcagcagcagcagcgccagcctgccctttgatgaccgggacagcaaccacaccagcgagggcaatggagacagcctgctggctgatgaggacacagactttgaggacagcctgaacagaaatgtgaagaagagagctgccaagaggcctcccaagaccacccctgtggccaagcaccccaagaagggcagccgggtggtgcaccgccacagcaggaagcagagcgagcccccagccaatgacctcttcaatgctgtgaaggccgccaagagtgacatgcagagcctggtggatgagtggctggacagctacaagcaggaccaggatgctggcttcctggagctggtgaacttcttcatccagagctgtggctgcaagggcatcgtgaccccagagatgttcaagaagatgagcaacagcgagatcatccagcacctgacagagcagttcaatgagatggatgacctgatcagcctgctgaccggcctgagtgacagccaggtgcgggccttccgccacaccagcaccctggccgccatgaagctgatgaccagcctggtgaaggtggccctgcagctgtctgtgcaccaggacaacaaccagaggcagtatgaggccgagaggaacaagggccctggccagagggcccctgagcggctggagagcctgctggagaagaggaaggagctgcaggagcaccaggaggagattgagggcatgatgaatgccctcttccggggcgtgtttgtgcaccgctacagagatgtgctgcctgagatccgggccatctgcatcgaggagatcggctgctggatgcagagctacagcaccagcttcctgacagacagctacctgaagtacatcggctggaccctgcatgacaagcaccgggaggtgcggctgaagtgtgtgaaggccctgaagggcctgtatggcaacagagacctgaccacccggctggagctgttcaccagccgcttcaaggacaggatggtgtccatggtgatggaccgggagtatgatgtggccgtggaggccgtgcggctgctgatcctgatcctgaagaacatggagggcgtgctgacagatgctgactgtgagagcgtgtaccctgtggtgtatgccagccaccggggcctggccagcgctgctggggagttcctgtactggaagctgttctacccagaatgtgagatccgcatgatgggcggccgggagcagaggcagagccctggggcccagaggaccttcttccagctgctgctgtccttctttgtggagagcgagctgcatgaccacgccgcctacctggtggacagcctgtgggactgtgccggggcccggctgaaggactgggagggcctgaccagcctgctgctggagaaggaccagaacctgggagatgtgcaggagagcaccctgattgagatcctggtgtcctctgcccggcaggccagcgagggccacccccctgtgggccgggtgacaggcaggaagggcctgaccagcaaggagaggaagacccaggctgatgacagagtgaagctgacagagcacctgatccccctgctgccccagctgctggccaagttcagcgcagatgctgagaaggtgacccccctgctgcagctgctgagctgctttgacctgcacatctactgcaccggccgcctggagaagcacctggagctgttcctgcagcagctgcaggaggtggtggtgaagcatgctgagcctgctgtgctggaggccggggcccacgccctgtacctgctgtgcaaccctgagttcaccttcttcagcagagctgactttgcccggagccagctggtggacctgctgacagaccgcttccagcaggagctggaggagctgctgcagagcagcttcctggatgaagatgaggtgtacaacctggccgccaccctgaagaggctgagcgccttctacaacacccatgacctgacccgctgggagctgtatgagccctgctgccagctgctgcagaaggctgtggacaccggggaggtgccccaccaggtgatcctgcctgccctgaccctggtgtacttcagcatcctgtggaccctgacccacagcctgagccctgtggagaacacagctgagaccagcccccaggtgctgcccagcagcaagagaagaagagtggagggccctgccaagcccaaccgggaggatgtgagcagcagccaggaggagagcctgcagctgaacagcatcccccccacccccaccctgaccagcacagctgtgaagagccggcagcccctgtggggcctgaaggagatggaggaggaggatggcagcgagctggactttgcccagggccagcctgtggccggcacagagaggagccgcttcctgggcccccagtacttccagaccccccacaaccccagcggccctggcctgggcaaccagctgatgaggctgagcctgatggaggaggatgaggaggaggagctggagatccaggatgagagcaatgaggagcggcaggacacagacatgcaggccagcagctacagcagcaccagcgagcggggcctggacctgctggacagcacagagctggacatcgaggacttctag

SEQ ID NO: 174505 - DNA, 3678 bp, Artificial Sequence
  derived and/or modified sequence
atgagcagccccctgcagcgggccgtgggcgacaccaagcgggccctatcagctagctccagctcgtctgcatccctgccctttgacgaccgggactccaatcatacttccgagggaaatggtgactctctgcttgcggatgaagacacggacttcgaggactctttgaaccgcaatgtaaagaagcgcgctgcaaaacggccccccaagaccacgccagttgccaagcaccctaaaaagggcagccgggtggttcataggcatagccgaaagcaatctgagcctcctgcaaatgaccttttcaacgctgttaaggctgctaagtctgatatgcagagcttggtcgacgagtggctagattcgtacaaacaggaccaagatgccggcttcctcgaattggtcaattttttcatccaatcatgcggttgtaaaggcattgttacaccagagatgttcaaaaagatgagtaactctgagattatccagcacctgaccgagcagttcaatgaagactctggagattaccccctgatcgcccccggaccatcgtggaaaaagttccagggatctttttgcgagttcgttcggactctggtgtgccagtgtcagtattcattgctgtacgacggttttcccatggacgatttgatctcgctgctcacgggtctcagtgatagccaagtcagggcctttcgacatactagcacactcgccgcaatgaagctcatgacttcactggtaaaggtcgcgttgcaactctcagtgcatcaggataacaatcagcgtcagtacgaggcggagcgtaacaagggcccaggacagagggcccctgagagacttgagagcttgctggagaagaggaaggagttacaagagcaccaggaagagattgagggaatgatgaatgccctttttcggggggtgtttgttcataggtaccgagacgtgcttccggagatcagagcaatttgcattgaagagattggctgctggatgcagtcatattctacttctttcctgaccgactcctatctgaaatacatcgggtggacactgcacgataagcacagagaagttagattgaaatgtgtgaaggcactgaaaggcctatatggtaaccgggacttaacaaccagacttgaactatttacatcaagatttaaggaccgtatggttagcatggttatggatcgcgaatatgacgtggccgtggaggcggtgcggttgttgatcctgatcctcaaaaatatggagggcgtactcacagacgccgactgcgagtccgtgtacccggtggtgtatgcttcccacagaggattggcttccgcggccggtgaattcctgtactggaagctgttttatccggagtgtgagattagaatgatgggaggacgtgagcagcggcagtctcctggggctcaaagaacattctttcagctgctcctgagtttcttcgtagagagcgagctgcatgaccacgccgcttatctcgtcgacagcctgtgggattgtgctggagcgaggttgaaggattgggagggattgacttctctcttactggagaaggaccaaaatttgggagacgtgcaggaaagcacgttgatcgaaatccttgtttccagtgcccgtcaagctagcgagggccacccccccgtcggtagagtgacaggtaggaagggactgacctccaaagaaaggaagacccaggccgacgacagagtgaaactgaccgagcacctgatcccgcttctaccccaactgcttgctaaattctccgccgacgccgagaaggtgactccactgctgcagttgctgtcttgttttgatctgcatatttattgtacaggacgcctggagaaacacctcgagctgtttttacagcagctgcaagaggtggttgtgaagcatgccgagcccgcagtgctggaggctggagctcatgccctttatctgttgtgtaatccggagttcaccttcttcagccgcgctgacttcgcccgaagtcagctagtggacctcctgaccgatcggtttcaacaggagttggaggagttgttgcaaagtagcttcctggacgaagatgaggtttacaacctggctgctacactcaagcggctcagcgcgttctacaacacccatgacctcactagatgggaactgtacgagccatgctgtcagctgttacagaaagccgtggatactggggaagtgccgcaccaagtcattctgcccgcactaacgctcgtatacttcagcattctgtggaccttgacccacatctcaaagtccgatgcatcccagaagcagttgtcatcactgcgagacaggatggtcgccttctgtgaattgtgtcagtcctgtctctctgatgtggataccgagatccaggagcaggcctttgtgctgctgagcgatctgctcctcatcttctccccgcaaatgatcgtggggggaagagattttctgaggccattagtctttttccccgaagccacattgcagtcagaactggcatccttcctgatggaccacgttttcatccagcctggcgacctcggctccggagacagccaggaggatcacctacaaatagagaggttacaccagaggagaaggcttctggcaggattctgtaaacttttactctacggcgtcctcgagatggacgcagccagcgatgtgttcaaacattacaacaaattctataatgactacggagatattataaaagagaccctcacacgagcacggcagattgaccggtcccattgttcaaggatactgctgcttagcctgaaacagctgtacactgaactgctgcaggagcacggcccgcaagggctgaatgaactgcctgctttcatcgaaatgagagatcttgcccggcgctttgcactgagtttcggtcctcagcagctgcagaaccgggatctggtggttatgctgcacaaggagggcattcaattctcgctgtccgagctaccacccgctggctctagtaaccagccacctaatctcgcattcctggaacttttatctgagttttctccccgcctatttcaccaagataaacaacttctgctgagttatctagaaaagtgcctgcaacacgtgtctcaggccccggggcatccctggggcccggttaccacttactgtcacagtctgtcacccgttgagaacacagccgaaacctctccccaggtcctcccttcatctaagcgccgaagagtagaagggccggcgaagcctaatagggaggacgtgagctcctcccaggaggagtccctacagctgaacagcataccacctacgccaacgttaacatctactgccgtcaagtcgagacagccgctgtggggactgaaggaaatggaagaggaggatgggtctgagctcgacttcgcccaaggccaacctgtggcagggacagaacgttcgcgcttcctgggccctcagtattttcagaccccacacaatccctccggacctgggttggggaatcagctgatgcggttaagcttgatggaagaggatgaggaggaggaattggaaatacaggacgaatccaatgaagagagacaagatactgatatgcaggcttcctcttactcatcaacctccgaacgtggcctcgacctcctggatagcaccgaactcgacatcgaggacttttag

SEQ ID NO: 174506 - DNA, 2667 bp, Artificial Sequence
  derived and/or modified sequence
atgagcagccccctgcagcgggccgtgggcgacaccaagcgggcccttagtgctagcagttctagttctgcctcgcttcccttcgacgatcgagactccaaccatacatctgagggtaacggagattccttgctggctgacgaggatactgacttcgaagattcattaaaccggaacgtgaagaaaagggccgcaaagcggccacccaaaaccactcccgtggcaaagcacccgaagaaaggctccagagtcgtccatcggcacagtcgtaaacagtccgagccgcctgccaacgacctgttcaatgcagtgaaggctgctaaatcagacatgcagagcctcgtggacgaatggctggattcttataagcaggatcaggacgccggctttctggagctggtgaacttttttatacagtcatgcggatgcaaaggtatcgtgacgccagaaatgtttaaaaaaatgagcaatagtgagatcatccagcacctgaccgagcagtttaatgaaatggacgacctcattagtcttttgactggactttcagacagccaggttcgcgcttttagacacacgagcacattggccgcaatgaagctgatgacctcactggtgaaggtcgccctccagttgtcggtacatcaggataacaatcagcggcagtatgaagctgagcggaacaagggacccgggcagcgggcacctgaacggctagagtcgctattagagaagagaaaagaactccaagagcatcaggaggagatagaggggatgatgaatgccctgttcagaggggttttcgtgcaccgttaccgagacgttctgcctgaaatcagagctatctgtatcgaagaaatcggttgctggatgcagtcatactcaactagctttttaaccgactcttatttgaagtacattggctggacactgcacgacaagcatcgtgaagtcaggctgaagtgcgtgaaggccctcaaagggctgtatggaaatcgggatctgaccaccaggctggagctgtttacgagtaggttcaaagaccgtatggttagcatggtgatggatagagaatacgatgtagctgtcgaagccgtgaggctgttgatcctgatacttaaaaacatggaaggggttctgactgatgccgattgtgagtccgtgtaccccgttgtgtacgcttcgcacagagggctggcgagcgccgcaggcgagtttttatattggaagctgttctaccctgagtgtgagatcagaatgatgggaggccgggaacagcgccagagccccggggctcagagaaccttttttcagttgttattaagcttttttgtggaatccgagctgcacgaccatgccgcataccttgtagactcactgtgggactgtgccggtgctcgcctgaaggactgggagggtttgacaagtttactgttggaaaaagatcagaatctgggcgatgtccaggaatctacattaatcgagattctcgtctctagcgctagacaggccagcgaagggcacccgcccgtgggaagagttacaggaagaaagggccttacatccaaagaacggaagactcaggccgacgaccgagtcaaattgactgagcacctaatccccctgctcccgcaactgctggccaagttctctgcagatgccgagaaagtcactccattattgcagctgctctcgtgctttgatcttcatatatattgtaccggccgtcttgagaagcatctggagctttttttgcagcagttgcaggaggtcgtagtgaagcacgctgaaccggcagtgttggaggctggcgctcatgcgctgtacctactgtgcaaccctgagtttacatttttttccagagccgacttcgcaagaagtcagctggttgacctgctgacagaccgattccaacaagaactggaagagctattacaaagtagctttttggatgaagacgaggtttataacctggccgccactctgaagaggctttctgcattctataatacacacgaccttacacgttgggagctctacgaaccttgctgtcagttgctccaaaaagctgtcgataccggggaagtgcctcatcaagtgattctgcccgctctgacgctggtttacttctccatcctttggactctcactcactcattgtcccccgtggaaaacactgcagaaaccagcccccaggtgcttccatccagcaaacgacgtcgcgtcgagggacctgctaagccaaatcgggaagacgttagctcttcacaagaagaatcgctccagctcaatagcatccctcctactccaacacttacctctacggcagtgaagagtaggcagccactgtggggattaaaagaaatggaagaggaggacggtagtgagctggattttgctcaggggcagcctgtggcgggaacggagcgctcaaggttcttggggccacagtatttccagacaccgcataacccaagcggcccggggctaggtaatcagctgatgcggctgtcacttatggaggaagatgaggaagaggaattggaaattcaagacgaatccaacgaggaacggcaagataccgatatgcaagcctcttcttacagctctacctcagagcggggacttgacctcctggacagcaccgaacttgacattgaggacttttag

SEQ ID NO: 174507 - DNA, 3678 bp, Artificial Sequence
  derived and/or modified sequence
atgagcagccccctgcagcgggccgtgggcgacaccaagcgggccctgagcgcaagttccagcagttccgccagtctgccttttgacgatagagattctaaccacacctctgaaggtaacggcgattccctgctcgctgatgaggataccgacttcgaggacagcttgaataggaacgtcaagaaacgcgctgccaagcggcccccaaagactactccagtggccaaacatcctaagaaggggtctcgagtcgtccacagacatagtaggaaacagagcgaaccccccgcaaacgatctgtttaatgcagtgaaagccgccaagagcgatatgcagtcattagtcgatgaatggctggactcctataaacaggaccaggacgctgggttcttggagttggtcaattttttcattcaatcttgcggttgtaagggaatagtgacacccgagatgtttaaaaagatgagcaattcggaaatcattcaacacctgactgagcagtttaatgaggatagcggggattacccactgatagctcccggccccagctggaagaaattccagggatccttctgtgagtttgtgcggaccctggtgtgtcagtgtcagtacagtctcctgtacgatgggttcccaatggacgacctgataagcctgctcactgggttatctgactcacaagtccgagcctttcgccatacatccactctggctgccatgaagctgatgacatcgctggtgaaggtggccttacaactttcggttcaccaggataacaaccagcgacagtacgaggcagaaagaaataagggaccgggacagcgggctcctgaaagattggagagtttgctagaaaagcgcaaggaacttcaggaacaccaggaagagatcgagggcatgatgaatgccttattccggggcgtcttcgtccaccggtacagagacgtgttacccgagataagagccatctgtattgaagaaataggatgttggatgcagtcctacagtaccagttttttaacagactcctacttgaagtatattggctggacacttcacgacaagcatcgggaagttagactgaaatgcgtgaaggccctcaaagggctgtacggaaacagggacctgaccacccggctcgaactgtttacatctcggtttaaggaccgcatggtatcaatggtcatggatcgagaatatgacgttgccgtcgaagcggtcagattgttgatccttatactgaaaaatatggaaggcgtgctaaccgacgctgactgcgagtctgtctaccccgtagtatacgcctctcaccgcgggttggctagcgcagcgggtgagttcctttactggaaactgttctatcccgaatgtgagattcggatgatgggcggccgcgaacaaaggcagagccctggagctcagagaactttctttcagctgctgttgagctttttcgtcgagtccgagttacatgatcacgctgcataccttgtggactcactctgggattgcgcaggcgcccgcctcaaagattgggaaggtttgacctctttactgctggaaaaagaccagaacttgggagatgtccaagagtctactctgattgaaattttggtctctagtgcacgtcaggcctctgagggtcatccccccgtgggtcgggtgacaggaaggaaggggctcactagcaaagagaggaaaacacaggcagatgatcgggtcaagctgaccgaacatcttatcccactcctgccccagctactggctaagttctcggcggatgcggagaaagtaactcctttattgcaactgctgagttgttttgacctgcacatttactgtaccgggcggctggagaaacacctggaactgtttctacaacaactgcaggaggtggtggtgaagcatgctgagcctgcagtcctggaggcaggggcccatgctctgtacctgctctgtaaccccgagtttacttttttctctcgagccgactttgcccgctcgcagctggtggatttgctaacagaccgattccagcaggagcttgaagagctgctgcagtcttcttttctagacgaagacgaggtgtataacctcgccgcaacccttaaacgtctgagtgcgttttataacacccacgatctgacgagatgggaactatatgaaccgtgctgccagctcctgcagaaagccgtcgatacgggcgaggtacctcaccaggtgatcttgcccgctctcaccttagtctatttcagcattctgtggacactcacacacatttctaagtctgacgcctcccaaaaacagctgagctctctgcgggatcggatggttgctttttgtgagctgtgccagtcctgcctaagcgacgtggacactgagattcaggagcaggcatttgtgcttctgtctgacttgctgttgattttctcaccgcaaatgatcgtcgggggcagagatttcttaagaccattggtatttttccctgaagccaccttacagagtgagctggccagctttctgatggaccacgtgttcattcagccaggggacttagggagcggggacagccaagaagatcatctgcagatcgagaggcttcaccaaagacgcagactgctggccggcttctgtaaactgctactgtacggcgtattggagatggacgctgcgtcagacgttttcaaacactataataaattctataatgattacggagacatcatcaaagaaactctgacccgggcccgtcagattgaccggtcacattgtagccgaatattgctgctttcacttaagcagttgtataccgagctgcttcaagaacacggacctcaagggctgaatgagctcccggcattcatagagatgagagatctggccaggcgcttcgccctctcctttggaccccaacagctgcaaaatagggatcttgtagtgatgctgcataaagagggaatacagttctccctgtctgagttgcctccagcagggagctcgaaccagccacctaatctagccttcctcgagctgctgagcgaattttctcccaggctcttccaccaggacaagcagttactcctgtcttatcttgagaagtgcctccagcacgtaagtcaggctccgggccacccatgggggcccgtgacaacgtactgccattccttgtctccagtggagaatacagccgaaacctcacctcaggtcctgcctagctctaaaagaaggagagtcgagggccccgcgaagccaaacagggaggacgtgagttcgtcgcaagaagagagcttgcaacttaactcgattccccctacccccacccttactagtacggccgtgaaatctcgtcaacccttgtggggcctgaaagaaatggaggaggaggatggctcggaattggattttgctcagggtcagcccgttgctgggacggaacgcagtagatttcttggcccacagtattttcaaaccccacacaacccttctggaccggggctaggaaaccagctgatgaggctgtcattgatggaggaagacgaggaagaggagctggagatccaggatgagagcaacgaggagagacaggatacggacatgcaggcctcaagttactcaagcaccagcgagcgaggactcgacctgctggactctactgaactggacattgaagacttttag

SEQ ID NO: 174508 - DNA, 3678 bp, Artificial Sequence
  derived and/or modified sequence
atgtccagtcccctacagagagcagtgggggatactaagcgggcactgtctgctagctcctcaagcagtgcaagcctgcctttcgatgaccgggactcgaatcacacaagtgagggaaatggcgattcactgttggcagacgaagacacagacttcgaagacagcctgaacaggaacgtgaaaaaacgagccgcaaagcgccctcccaaaacgacccctgtggcgaagcatccaaagaaaggttctcgggttgtgcaccgacactcccgaaaacagagcgaacctccggcaaacgatctgttcaatgccgtcaaagcagccaagtctgacatgcagagcctggtggacgaatggctcgattcctacaagcaggatcaggacgccggattcctcgagttggtcaactttttcattcagtcatgcgggtgcaaggggattgtgactccggagatgtttaagaagatgtccaactctgaaattatccagcacctgacggagcagttcaacgaagatagtggcgactatcctttgattgcacctggcccaagctggaaaaagttccagggttctttctgcgaattcgtgcggacccttgtttgccagtgtcaatattctctattgtacgatggcttcccaatggatgatctgattagccttctgactggactgagcgactcacaggtgcgagctttccgccacacatcaactctcgccgctatgaagctgatgacgtcgttggtgaaagttgctttacagctcagtgtccatcaggacaataaccagagacagtacgaagccgaacgcaacaaaggccctggtcagcgcgcacctgaaagactggaatctctcctggaaaagagaaaggaactgcaagagcatcaggaagaaatagagggcatgatgaacgccctcttccgcggtgtcttcgtgcacaggtaccgggacgtcttgccggagatacgggcaatttgtattgaggagattggttgttggatgcagtcatactcaacttccttcctgacagactcatacctgaagtatatcgggtggaccctgcatgacaagcacagagaggtacgcctgaagtgtgtgaaagcccttaagggtctgtatgggaatcgcgacctgacaacccgtctggaactttttaccagtcgtttcaaggacaggatggtctctatggtcatggaccgggaatatgatgtggcagttgaagcggtaagactgctgatccttattctcaaaaacatggagggggttctcacggacgcagactgtgaatcagtttacccagtggtttacgccagccaccgcggacttgcctccgccgctggtgagttcctttactggaaattgttttaccccgagtgcgagattagaatgatgggaggcagagaacagagacagtcccccggagcacaacgcaccttctttcagctgctgctgagtttcttcgtcgaaagtgaactacacgatcacgctgcttacctcgtcgacagcttgtgggactgtgccggagctaggttgaaggattgggagggactgacatcactgttgctggaaaaagaccagaatctgggcgatgtacaagagtctacgctgatcgagattctggtgtcgagcgcgaggcaggcctcagagggccacccgcctgtagggagagtaacaggtcggaaagggcttacatctaaggagcgaaagacacaggctgacgatcgggtgaaattgacagaacacctcattccgctgcttccccaattgcttgcaaaattcagtgctgacgcagaaaaagtcacaccactgttgcaactgctgagttgcttcgatctgcacatatattgtaccggcaggctcgagaaacacctagaactgtttctgcagcaattgcaggaggtggtagttaaacacgcagagcctgctgtgttagaggctggggcacatgccttgtaccttctctgcaatccagagtttactttcttttcacgggcagactttgcgagatcacagctggtggatctgctcacggatcggttccagcaggagttggaagaactgttgcaaagctcatttctagatgaggacgaagtttataacttagccgctaccctgaaacgcctgagcgctttctataatacacacgacctaacccgttgggaactgtatgagccgtgttgtcaactccttcagaaggcagtggatactggcgaagttccgcatcaggttatattgcccgcactgaccctcgtgtatttctcgatcctctggacattgacccacatctcaaagtcagatgcatcgcagaaacagctgagttccctgcgggacagaatggtggcattctgtgaactgtgccagtcttgtttgtccgatgttgatacagagattcaggaacaagcatttgtgctgctgtccgatctgcttctgatattctccccccagatgatcgtgggaggtcgcgactttttacggcctctcgtttttttcccagaggccaccctccaatctgagttggccagcttcttaatggatcacgtgttcatccagccgggtgacctaggatctggtgattctcaggaggaccatttgcaaatagagcggttgcatcagcgccgtaggctcctggctggcttttgcaaactgctattgtacggggtgctcgaaatggacgcggcttcagatgtattcaagcactacaacaagttctataatgactatggcgacattattaaagagaccttaactagagcacgccaaatagacagatcccactgcagtcgtatactactgcttagtctgaaacaactttacacagagctgctgcaggaacatgggcctcaggggctcaacgagctacctgcgtttattgagatgcgagacctggcccgacggttcgccctgagcttcggtccccaacagctccagaacagagacctcgtcgtgatgctccataaggagggaatacaattctcgctctcagagctgccgccagccggttcaagcaaccagcccccaaatttggccttcctggagcttctcagcgaattcagcccaaggttattccaccaagataagcagttgttgctgtcttacctggaaaaatgtttacagcacgtgagccaggcccctggacacccgtggggaccagtcactacctactgtcacagcctgtctcccgtggagaacaccgccgaaacttcaccgcaggttcttccctcttccaagcggaggcgagttgaagggcctgccaagccaaatcgcgaggacgtgtctagcagtcaagaagagtctctccaacttaattctatccctcctactcccaccctcacatcaaccgcagtgaagtctcgacagccactttgggggctcaaggagatggaggaagaggacggcagcgaacttgactttgcccagggccaacccgtggcaggaacagagaggagtcggtttctgggaccccagtactttcagacccctcacaatccttcagggcctggcctcggcaaccagctgatgagattaagtttgatggaagaggacgaggaggaggaacttgagatccaggacgaaagcaacgaagaaaggcaggacacggacatgcaagcctcctcctacagttcaacctctgaacggggactggaccttctcgacagtacggaactggacatcgaggacttctag

SEQ ID NO: 174509 - DNA, 2667 bp, Artificial Sequence
  derived and/or modified sequence
atgagttcgcctctgcagagagcagttggcgacaccaagcgggctttgtccgcatcatcttcgtctagcgcatcactgccctttgacgacagagatagcaaccacacttcagaaggaaatggagattcactgttggccgatgaagatacagatttcgaggactctttaaatagaaatgtcaagaagcgggcagccaaaagacctcctaaaacaacgcctgtcgcaaaacaccccaagaaggggtctcgggttgtacaccggcactccagaaagcaatccgagcctcccgctaacgatctgttcaacgcggttaaggccgcaaagagcgacatgcaatcattggtcgatgagtggcttgattcgtataaacaggaccaagacgcaggctttctcgagttggtcaatttctttatacagtcctgtgggtgcaaagggatagtcacccctgaaatgtttaagaagatgagcaattctgagatcattcagcacttgactgaacagtttaacgaaatggacgacctgatcagcctgttgacaggactgagtgatagccaagtccgggcattcaggcacacaagtaccctggccgctatgaagctgatgacttccttggtgaaagtggccctgcagctgtccgtgcatcaagataataaccagcggcagtacgaggccgaaagaaataaagggcctggacagagagccccagaacgactagaatctctgttagaaaagcgcaaagaactgcaggaacaccaggaagaaatcgaggggatgatgaacgctttgtttagaggcgtatttgtgcacagatacagagacgtgttgcctgagatccgcgctatctgcatcgaggagatcgggtgttggatgcagtcttacagcacgtccttcctgacagatagctatcttaagtacataggctggaccctccacgataaacaccgggaagtgcgattaaagtgtgttaaggcgcttaaggggctgtatggcaatcgggacctcaccactcgcctagaattgttcaccagcagatttaaagatcgtatggtgagcatggtcatggatcgggaatacgacgttgccgtggaagcagttaggcttctgattctgattctgaagaatatggaaggagtccttactgatgcagattgtgagagtgtttacccagtggtgtatgccagtcacaggggcttggcgtctgctgctggggaatttctttattggaaactattttaccccgagtgtgagatccggatgatggggggtcgtgagcagcgtcagagccctggagcccagaggactttctttcagctgttgctgtctttttttgtggagtccgagttacacgatcacgcggcttacctcgtggactccctgtgggactgtgcaggagccaggctcaaggactgggaaggtttgacaagcctcctattagagaaggaccaaaacctgggagacgttcaagaaagtaccctgatcgaaattttagtgagttcggctaggcaggcctccgagggtcatccgcctgttgggcgtgtgactggcaggaagggccttacaagtaaagaacgcaagacacaggcagatgaccgtgtgaaactaacagagcacctgattcctcttctgccccagctcctcgccaagttcagcgcagacgccgagaaggtcaccccgctgctgcagctcctttcttgctttgacctgcatatctactgcaccggccgactggaaaaacacctggaacttttcttgcagcagctgcaagaagtagtcgtgaagcacgctgagccagcagtgctggaagcgggtgctcacgccctctacctgttatgcaaccccgagttcaccttctttagccgagccgacttcgccaggtcacaattggtagatttgttgactgataggttccagcaggaactcgaggagctcctgcagtcttcatttctggacgaggatgaggtatataacctcgctgcaacgttgaagaggctgagtgctttctataacacacatgatctcacacgctgggaactctacgaaccctgctgtcagcttttgcagaaggcagttgacacaggtgaggttccgcaccaagttatcctcccggctttgaccctggtatacttcagtatcttgtggaccttaacacattccctttcccctgtggagaacacggcagaaacatcaccacaggtcctgcctagcagcaaaaggcggagagtggaggggcctgcgaagcctaacagggaagatgtctcttcctctcaggaagagtccctgcagctgaactcgattcctcccacgccaaccctgacctccaccgcggtgaaatcacgccaacccttgtgggggctgaaggagatggaagaagaggatggtagcgaactggacttcgcccagggacagccagtggctggaaccgagcgttcgcggtttctcggccctcagtacttccagacacctcataatcccagcggccctggactcggaaaccaattgatgcgactgagcctcatggaggaggatgaggaagaggaactcgagatacaggatgaatctaacgaggaaagacaggataccgacatgcaggcatccagctattcgagtacttccgagaggggactggacctcctggacagcactgagctggacatcgaagatttttag

SEQ ID NO: 174510 - DNA, 3678 bp, Artificial Sequence
  derived and/or modified sequence
atgagttcacccttacaacgggcagtgggcgatacaaaacgcgctcttagcgcaagttcatcctcttctgctagtctgccgttcgacgaccgcgactcaaatcataccagcgagggcaacggcgactctcttctcgcagacgaggatacggacttcgaggactcgctaaatcgaaacgtgaagaagcgtgcagctaaacgaccgcctaaaaccactcccgtcgccaagcaccctaagaaaggctcgagagtggtccaccgacattcccggaagcaatcggagccacccgctaacgacttgtttaatgccgtgaaggccgctaaatcagacatgcaaagcttggtggacgagtggctagatagctataaacaggaccaggacgccggtttcttagagctggttaatttcttcatacagtcctgcgggtgtaaaggcattgtgactcctgagatgttcaagaagatgtccaacagtgaaataatacagcacctcaccgagcagttcaacgaagacagtggcgattacccactaatcgcccctggaccaagctggaagaagttccagggctcattctgtgaatttgtgaggacgttggtgtgtcagtgccaatactctctgctctacgatggctttccaatggacgacctgatctcacttttgacaggactcagtgactctcaggtgagagctttccggcacacctctactctggctgccatgaaactgatgacctccctggtgaaagtggccctgcagctgagcgtgcaccaagacaataaccagagacagtacgaggccgaaaggaataagggtccgggtcagcgggctccagaacgcctcgaaagcctgctggagaaaagaaaggaactgcaggaacaccaagaggaaattgaggggatgatgaacgcactctttagaggcgttttcgtgcacaggtatagggacgtgctccctgagattcgcgcaatctgcattgaagaaattggctgctggatgcagtcgtactctacaagtttcctcacagacagctaccttaagtatattggctggactctccacgacaagcatcgggaggttcggcttaaatgtgtgaaggccctgaaaggactgtatggaaaccgggacttgactacacgtctagagctcttcaccagtaggttcaaagatcgcatggtgagtatggttatggaccgcgaatatgatgttgcagttgaagcagtgcgattgctaattctgatcctgaagaacatggaaggggtgctgactgacgctgattgtgagtccgtctaccccgtagtatacgctagccacagaggactcgccagcgcggcaggcgagttcctctactggaaacttttctaccccgaatgtgaaattagaatgatggggggtcgggagcagaggcaaagtccaggggcacagaggactttcttccagctgctgctgagttttttcgttgagagtgagttgcacgaccatgccgcatacttagtcgatagcctctgggactgtgccggtgccaggctaaaggactgggaaggactgacatcgttgctgctcgaaaaagaccaaaacctcggcgacgtgcaggagagcactctaatcgagattcttgtgtcctctgccagacaggcttctgaggggcacccacctgtaggtagggttactggacgaaaaggcctgacgtcaaaagaacgcaagacacaggctgatgaccgcgtgaaattgacggagcatctgattccactgctcccacaactgctcgccaaatttagcgccgacgccgaaaaggtgaccccattgctgcagctgctatcctgcttcgacctgcatatctactgcacagggcgactcgaaaaacatctggagctctttctccaacagctgcaagaggttgttgtgaaacatgcagaacctgccgtgcttgaagctggtgcgcacgctctgtatctcctctgcaaccccgaattcacatttttctctagggcagacttcgctcgcagccagcttgtcgacctgctaacagaccggttccagcaagaactcgaagaactccttcagtcttcattcctggatgaggacgaggtgtacaatcttgccgctactctcaagcggttgtccgccttctacaacactcacgacctgacaagatgggaattgtacgagccatgttgccagctcctgcagaaggctgttgataccggcgaggtgccacaccaagtaatcctgcctgccttgacgctcgtgtatttttccattctctggaccttgacccacatctctaaatccgatgctagccagaagcagctgagctccctaagagaccgcatggtggcgttctgcgagctgtgtcagagttgtttgtctgacgtggacactgagattcaagagcaggcattcgtactcctgtccgatctgctgctaattttttcgccccaaatgatcgtgggagggagagactttctccgcccattggtgtttttcccagaggccacactccagagcgagctcgcgtcattcctgatggatcatgtgtttatccaacccggagaccttggcagcggtgacagtcaagaggaccacttgcagatcgaaaggcttcatcagcgaaggaggctgttagcagggttctgcaaactactgctatacggcgtgctggaaatggatgcagcatctgacgtcttcaagcactacaacaaattttataatgattacggtgacatcatcaaagagaccttaacaagggccaggcagatcgataggtcccactgctcgaggattttacttctgtcactgaaacagctttacaccgagctcctccaggagcatggaccccagggacttaacgaactaccagcgtttattgaaatgagggatttggccaggagattcgcactgtcattcggccctcagcagctgcagaacagagacctggtggtgatgttgcataaagagggaatccagttctctctatcagagctaccacctgcaggctcttctaatcaaccacccaacctggcattcctagaactgttgtccgagtttagtccacgacttttccaccaggacaagcagctgctgttgtcctacctcgagaagtgcctccaacacgtgagccaagctcccggacacccttggggccctgtgacaacctattgccattccttaagtcctgtggagaacacagccgagacaagcccacaagtgctccccagctctaagaggcgcagggtggaagggcctgcaaagccgaacagggaggatgtgtctagctcacaggaggaatctctacagcttaacagcatcccacccacccccacactcacctcgaccgcagttaaaagccgtcagcctctgtgggggcttaaagagatggaagaggaggacgggagcgaactggactttgcccagggccagcctgtagccggtaccgagaggtcacgattccttgggcctcaatacttccaaacaccacataacccctccggtccagggttgggaaaccaactgatgcgcttgagtctcatggaggaggacgaggaagaggaactggagattcaggatgaatctaatgaggagaggcaggacactgacatgcaagcctcttcatactcctcaactagtgagagggggttagatctcctggactctacagagctggacatcgaggatttttag

SEQ ID NO: 174511 - DNA, 4198 bp, Artificial Sequence
  derived and/or modified sequence
gcgcttttctggaatctttcgcccccggaagggcagcggcgggcgcctgtgtggaaggtggggtggccagagacacccgagggacctgagctggatcgccatacctaccctgtggtcctcatcttcctggcctcatagctcctcctctccaagcatgtcttccccgttgcaaagagctgtgggagataccaagagggccttgtctgcatcttctagttcctctgccagtctaccctttgatgacagggactcaaaccatacctcagaggggaatggcgactctttgttagctgatgaagacactgactttgaagacagcttgaatcgcaatgtgaagaagagagcagcaaaacgaccaccgaaaacaacaccggtggcaaaacatccaaagaaagggtcccgagtggtacatcgtcatagccggaaacagtcagagccaccagccaatgatcttttcaatgctgtgaaagccgccaaaagtgacatgcagtctttggtagatgagtggctggatagctacaagcaagaccaggatgcaggatttctggagcttgttaactttttcatccaatcttgcggatgtaaaggcattgtgacccctgagatgttcaagaagatgtccaactcagagatcatccagcacctaacagagcagtttaatgaggactcgggggactaccctctcatagctccaggtccatcctggaagaagttccagggcagcttctgtgaatttgtgaggacattggtctgtcagtgccagtacagcctcctctatgatggcttccctatggacgacctcatctccctgctcactggcctctcagactcacaagtccgcgccttccgtcacactagcaccctggctgctatgaaactgatgacctccctggtaaaagttgccctccaactgagtgtgcaccaagataacaatcagcgtcagtatgaggctgaaagaaacaaggggccagggcagagggcacctgagcggctggagagcctgttggagaaacgcaaagagctccaagagcatcaagaggagattgaggggatgatgaatgccctcttcaggggtgtctttgttcatcggtacagggatgtccttcctgagatccgtgctatctgcattgaggaaattgggtgttggatgcaaagctacagcacgtctttcctcaccgacagctatttaaaatatattggttggactctgcatgataagcaccgagaagtccgcctgaagtgtgtgaaggccctgaaagggctgtacggtaaccgggacctgaccacacgcctggagctcttcaccagccgcttcaaggaccggatggtttccatggtcatggacagagagtatgatgtggcagtggaggctgtcagattactgatacttatccttaagaacatggaaggggtgctgacggacgcggattgtgagagcgtctacccagttgtgtatgcctctcatcgaggcctggcctctgccgcaggcgaatttctgtactggaaactcttctaccctgagtgcgagataagaatgatgggtggaagagagcaacgccagagcccaggcgcccagaggactttcttccagcttctgctgtccttctttgtggagagcgagctccatgaccacgctgcttacttagtagacagtctgtgggactgtgcaggggctcggctgaaggactgggagggtctgacaagcctgctgctggagaaggaccagaacctgggtgatgtgcaggagagcacactgatagaaatccttgtgtccagtgcccggcaagcttcagaggggcacccgcctgtgggccgggtcactgggaggaagggcttaacctctaaggagcgcaagacccaagccgatgacagggtgaagttgactgagcacctcatccccctgctgccccagctcctggccaagttctcagctgatgcagagaaggtcactcccctgctccagcttctcagctgctttgacctccacatctactgcactgggcgcttggagaagcacctggagctgttcctgcagcaactccaggaggtggtggtgaagcatgcagagccagcggtgcttgaggctggggcgcatgccctctacctgctctgtaatcccgaattcactttcttcagccgggcggactttgcccgcagccagctagtagatttgctgactgaccgcttccagcaggagcttgaagagctgttacagtcgtccttcctagatgaggatgaggtatataatctggcagccactctgaaacgcctctctgccttctacaacactcatgacctgactcgctgggagctctatgagccatgttgccaactcctgcagaaggctgtggacacaggagaggttcctcaccaggttatcctgccagccttgactcttgtctatttttccattctctggacactaacccacatttctaaatcagatgcttcccagaagcagctgtcgagtttgagggacagaatggtggccttctgtgaactctgccagagttgcctctcagatgtggatactgagatccaggagcaggcttttgtcttattaagtgatctacttctcatctttagccctcagatgattgttgggggccgtgatttccttaggccacttgtcttttttcctgaagctactctccagtctgagctagccagcttcctcatggaccacgtcttcatccagccgggagacctgggcagtggtgattcccaggaggatcatttacagatagagcggctacaccagcggcgccgcctcctagccgggttctgcaagctgttgctttatggggtgctggagatggatgcagcctcagatgttttcaaacactacaacaagttctacaatgactatggtgacattatcaaggaaacattaactagagcaaggcagattgaccgaagtcattgttcccgaatcctgctgctgagcctcaagcagctgtacacagaactgctgcaggagcatgggccccagggcctgaatgagcttcctgccttcatcgagatgagggacctggcccggaggtttgccttgagttttggaccccagcagctgcagaaccgtgacctcgtggtcatgctacacaaggaaggcatccagttctccttgtctgagcttcctccagctggctcctccaatcagcctccaaatctggcattcctggagctcctttcagagttttccccccgactcttccatcaggacaagcagcttttactgtcctatctagaaaagtgcctgcagcatgtctcccaggcacctggccatccctggggcccagtcaccacctactgccactccctcagccctgtggagaacacagcagagaccagccctcaggtcctccccagctccaagaggaggcgcgttgaagggcctgccaagcctaacagagaggacgtctcctcgtcccaggaagaaagtctgcagctgaacagcatcccgcccacgcccaccctcacctccacagctgtgaagagcaggcagcccctgtgggggttgaaagagatggaggaagaagatggctcagagttggattttgcccagggtcagcccgtcgcaggcaccgagaggtcaaggttcttgggtccacaatatttccagactccacacaacccttcaggtcctggcctgggcaaccagctgatgcgactcagccttatggaagaggacgaggaagaagagttagaaatccaggatgagtcaaatgaagaacggcaggatacagacatgcaagcaagtagctactcttccaccagtgagcgcgggctggacctcttagattctacagagctggatattgaggatttctgacaggactctgggcccctccccagctccactccctacctcaagaatgtgaccatttggaaaaggcaaagagaaaaggagcaaaatgaagcattcccccaggcttcagccctgggctctgaggggaaagagttgggcattgtttttctaacctaacctttccctctggggtagagaagccgagagaccctgtcctccctaatgcactgtggcccagtccccttgcctttttcctgttctgtttggagtggagaagggcagcacctctgtgtttaatggaaatagcccatagtctcctggatttttggaacatctttctcagcctattttgtgtcctaatgattcgctcaataaacatgtttgaatcca

SEQ ID NO: 174512 - DNA, 3194 bp, Artificial Sequence
  derived and/or modified sequence
cgcgcttttctggaatctttcgcccccggaagggcagcggcgggcgcctgtgtggaaggtggggtggccagagacacccgagggacctgagctggatcgccatacctaccctgtggtcctcatcttcctggcctcatagctcctcctctccaagcatgtcttccccgttgcaaagagctgtgggagataccaagagggccttgtctgcatcttctagttcctctgccagtctaccctttgatgacagggactcaaaccatacctcagaggggaatggcgactctttgttagctgatgaagacactgactttgaagacagcttgaatcgcaatgtgaagaagagagcagcaaaacgaccaccgaaaacaacaccggtggcaaaacatccaaagaaagggtcccgagtggtacatcgtcatagccggaaacagtcagagccaccagccaatgatcttttcaatgctgtgaaagccgccaaaagtgacatgcagtctttggtagatgagtggctggatagctacaagcaagaccaggatgcaggatttctggagcttgttaactttttcatccaatcttgcggatgtaaaggcattgtgacccctgagatgttcaagaagatgtccaactcagagatcatccagcacctaacagagcagtttaatgagatggacgacctcatctccctgctcactggcctctcagactcacaagtccgcgccttccgtcacactagcaccctggctgctatgaaactgatgacctccctggtaaaagttgccctccaactgagtgtgcaccaagataacaatcagcgtcagtatgaggctgaaagaaacaaggggccagggcagagggcacctgagcggctggagagcctgttggagaaacgcaaagagctccaagagcatcaagaggagattgaggggatgatgaatgccctcttcaggggtgtctttgttcatcggtacagggatgtccttcctgagatccgtgctatctgcattgaggaaattgggtgttggatgcaaagctacagcacgtctttcctcaccgacagctatttaaaatatattggttggactctgcatgataagcaccgagaagtccgcctgaagtgtgtgaaggccctgaaagggctgtacggtaaccgggacctgaccacacgcctggagctcttcaccagccgcttcaaggaccggatggtttccatggtcatggacagagagtatgatgtggcagtggaggctgtcagattactgatacttatccttaagaacatggaaggggtgctgacggacgcggattgtgagagcgtctacccagttgtgtatgcctctcatcgaggcctggcctctgccgcaggcgaatttctgtactggaaactcttctaccctgagtgcgagataagaatgatgggtggaagagagcaacgccagagcccaggcgcccagaggactttcttccagcttctgctgtccttctttgtggagagcgagctccatgaccacgctgcttacttagtagacagtctgtgggactgtgcaggggctcggctgaaggactgggagggtctgacaagcctgctgctggagaaggaccagaacctgggtgatgtgcaggagagcacactgatagaaatccttgtgtccagtgcccggcaagcttcagaggggcacccgcctgtgggccgggtcactgggaggaagggcttaacctctaaggagcgcaagacccaagccgatgacagggtgaagttgactgagcacctcatccccctgctgccccagctcctggccaagttctcagctgatgcagagaaggtcactcccctgctccagcttctcagctgctttgacctccacatctactgcactgggcgcttggagaagcacctggagctgttcctgcagcaactccaggaggtggtggtgaagcatgcagagccagcggtgcttgaggctggggcgcatgccctctacctgctctgtaatcccgaattcactttcttcagccgggcggactttgcccgcagccagctagtagatttgctgactgaccgcttccagcaggagcttgaagagctgttacagtcgtccttcctagatgaggatgaggtatataatctggcagccactctgaaacgcctctctgccttctacaacactcatgacctgactcgctgggagctctatgagccatgttgccaactcctgcagaaggctgtggacacaggagaggttcctcaccaggttatcctgccagccttgactcttgtctatttttccattctctggacactaacccactccctcagccctgtggagaacacagcagagaccagccctcaggtcctccccagctccaagaggaggcgcgttgaagggcctgccaagcctaacagagaggacgtctcctcgtcccaggaagaaagtctgcagctgaacagcatcccgcccacgcccaccctcacctccacagctgtgaagagcaggcagcccctgtgggggttgaaagagatggaggaagaagatggctcagagttggattttgcccagggtcagcccgtcgcaggcaccgagaggtcaaggttcttgggtccacaatatttccagactccacacaacccttcaggtcctggcctgggcaaccagctgatgcgactcagccttatggaagaggacgaggaagaagagttagaaatccaggatgagtcaaatgaagaacggcaggatacagacatgcaagcaagtagctactcttccaccagtgagcgcgggctggacctcttagattctacagagctggatattgaggatttctgacaggactctgggcccctccccagctccactccctacctcaagaatgtgaccatttggaaaaggcaaagagaaaaggagcaaaatgaagcattcccccaggcttcagccctgggctctgaggggaaagagttgggcattgtttttctaacctaacctttccctctggggtagagaagccgagagaccctgtcctccctaatgcactgtggcccagtccccttgcctttttcctgttctgtttggagtggagaagggcagcacctctgtgtttaatggaaatagcccatagtctcctggatttttggaacatctttctcagcctattttgtgtcctaatgattcgctcaataaacatgtttgaatccacacgtt

SEQ ID NO: 174513 - DNA, 4450 bp, Artificial Sequence
  derived and/or modified sequence
gtggcgatccggctcaaaaggcggggcctgggtggaacctagcctatggcaattgagaagccagattaaaggggttactagcagtctggtccaaaacccgcccaatggagtaggagattgagggtagcgggggtgggacctgggtgggggcggggctaaagcgggccgcccgcgtgcccaagcccacgtgagagggcaggacgcctgagagcttgaggccacacgaggctgtggagcggcgtgactcaaacgtggcgcgcatcagctcgcacacttccaaacctcgcgatagctactggccctgggcgagccgttgggattgcgcttgcgcacagcgtgtcttctggatcgccatacctaccctgtggtcctcatcttcctggcctcatagctcctcctctccaagcatgtcttccccgttgcaaagagctgtgggagataccaagagggccttgtctgcatcttctagttcctctgccagtctaccctttgatgacagggactcaaaccatacctcagaggggaatggcgactctttgttagctgatgaagacactgactttgaagacagcttgaatcgcaatgtgaagaagagagcagcaaaacgaccaccgaaaacaacaccggtggcaaaacatccaaagaaagggtcccgagtggtacatcgtcatagccggaaacagtcagagccaccagccaatgatcttttcaatgctgtgaaagccgccaaaagtgacatgcagtctttggtagatgagtggctggatagctacaagcaagaccaggatgcaggatttctggagcttgttaactttttcatccaatcttgcggatgtaaaggcattgtgacccctgagatgttcaagaagatgtccaactcagagatcatccagcacctaacagagcagtttaatgaggactcgggggactaccctctcatagctccaggtccatcctggaagaagttccagggcagcttctgtgaatttgtgaggacattggtctgtcagtgccagtacagcctcctctatgatggcttccctatggacgacctcatctccctgctcactggcctctcagactcacaagtccgcgccttccgtcacactagcaccctggctgctatgaaactgatgacctccctggtaaaagttgccctccaactgagtgtgcaccaagataacaatcagcgtcagtatgaggctgaaagaaacaaggggccagggcagagggcacctgagcggctggagagcctgttggagaaacgcaaagagctccaagagcatcaagaggagattgaggggatgatgaatgccctcttcaggggtgtctttgttcatcggtacagggatgtccttcctgagatccgtgctatctgcattgaggaaattgggtgttggatgcaaagctacagcacgtctttcctcaccgacagctatttaaaatatattggttggactctgcatgataagcaccgagaagtccgcctgaagtgtgtgaaggccctgaaagggctgtacggtaaccgggacctgaccacacgcctggagctcttcaccagccgcttcaaggaccggatggtttccatggtcatggacagagagtatgatgtggcagtggaggctgtcagattactgatacttatccttaagaacatggaaggggtgctgacggacgcggattgtgagagcgtctacccagttgtgtatgcctctcatcgaggcctggcctctgccgcaggcgaatttctgtactggaaactcttctaccctgagtgcgagataagaatgatgggtggaagagagcaacgccagagcccaggcgcccagaggactttcttccagcttctgctgtccttctttgtggagagcgagctccatgaccacgctgcttacttagtagacagtctgtgggactgtgcaggggctcggctgaaggactgggagggtctgacaagcctgctgctggagaaggaccagaacctgggtgatgtgcaggagagcacactgatagaaatccttgtgtccagtgcccggcaagcttcagaggggcacccgcctgtgggccgggtcactgggaggaagggcttaacctctaaggagcgcaagacccaagccgatgacagggtgaagttgactgagcacctcatccccctgctgccccagctcctggccaagttctcagctgatgcagagaaggtcactcccctgctccagcttctcagctgctttgacctccacatctactgcactgggcgcttggagaagcacctggagctgttcctgcagcaactccaggaggtggtggtgaagcatgcagagccagcggtgcttgaggctggggcgcatgccctctacctgctctgtaatcccgaattcactttcttcagccgggcggactttgcccgcagccagctagtagatttgctgactgaccgcttccagcaggagcttgaagagctgttacagtcgtccttcctagatgaggatgaggtatataatctggcagccactctgaaacgcctctctgccttctacaacactcatgacctgactcgctgggagctctatgagccatgttgccaactcctgcagaaggctgtggacacaggagaggttcctcaccaggttatcctgccagccttgactcttgtctatttttccattctctggacactaacccacatttctaaatcagatgcttcccagaagcagctgtcgagtttgagggacagaatggtggccttctgtgaactctgccagagttgcctctcagatgtggatactgagatccaggagcaggcttttgtcttattaagtgatctacttctcatctttagccctcagatgattgttgggggccgtgatttccttaggccacttgtcttttttcctgaagctactctccagtctgagctagccagcttcctcatggaccacgtcttcatccagccgggagacctgggcagtggtgattcccaggaggatcatttacagatagagcggctacaccagcggcgccgcctcctagccgggttctgcaagctgttgctttatggggtgctggagatggatgcagcctcagatgttttcaaacactacaacaagttctacaatgactatggtgacattatcaaggaaacattaactagagcaaggcagattgaccgaagtcattgttcccgaatcctgctgctgagcctcaagcagctgtacacagaactgctgcaggagcatgggccccagggcctgaatgagcttcctgccttcatcgagatgagggacctggcccggaggtttgccttgagttttggaccccagcagctgcagaaccgtgacctcgtggtcatgctacacaaggaaggcatccagttctccttgtctgagcttcctccagctggctcctccaatcagcctccaaatctggcattcctggagctcctttcagagttttccccccgactcttccatcaggacaagcagcttttactgtcctatctagaaaagtgcctgcagcatgtctcccaggcacctggccatccctggggcccagtcaccacctactgccactccctcagccctgtggagaacacagcagagaccagccctcaggtcctccccagctccaagaggaggcgcgttgaagggcctgccaagcctaacagagaggacgtctcctcgtcccaggaagaaagtctgcagctgaacagcatcccgcccacgcccaccctcacctccacagctgtgaagagcaggcagcccctgtgggggttgaaagagatggaggaagaagatggctcagagttggattttgcccagggtcagcccgtcgcaggcaccgagaggtcaaggttcttgggtccacaatatttccagactccacacaacccttcaggtcctggcctgggcaaccagctgatgcgactcagccttatggaagaggacgaggaagaagagttagaaatccaggatgagtcaaatgaagaacggcaggatacagacatgcaagcaagtagctactcttccaccagtgagcgcgggctggacctcttagattctacagagctggatattgaggatttctgacaggactctgggcccctccccagctccactccctacctcaagaatgtgaccatttggaaaaggcaaagagaaaaggagcaaaatgaagcattcccccaggcttcagccctgggctctgaggggaaagagttgggcattgtttttctaacctaacctttccctctggggtagagaagccgagagaccctgtcctccctaatgcactgtggcccagtccccttgcctttttcctgttctgtttggagtggagaagggcagcacctctgtgtttaatggaaatagcccatagtctcctggatttttggaacatctttctcagcctattttgtgtcctaatgattcgctcaataaacatgtttgaatcc

SEQ ID NO: 174514 - protein, 787 aa, Artificial Sequence
  derived and/or modified sequence
MAVWIQAQQLQGEALHQMQALYGQHFPIEVRHYLSQWIESQAWDSVDLDNPQENIKATQLLEGLVQELQKKAEHQVGEDGFLLKIKLGHYATQLQNTYDRCPMELVRCIRHILYNEQRLVREANNGSSPAGSLADAMSQKHLQINQTFEELRLVTQDTENELKKLQQTQEYFIIQYQESLRIQAQFGPLAQLSPQERLSRETALQQKQVSLEAWLQREAQTLQQYRVELAEKHQKTLQLLRKQQTIILDDELIQWKRRQQLAGNGGPPEGSLDVLQSWCEKLAEIIWQNRQQIRRAEHLCQQLPIPGPVEEMLAEVNATITDIISALVTSTFIIEKQPPQVLKTQTKFAATVRLLVGGKLNVHMNPPQVKATIISEQQAKSLLKNENTRNDYSGEILNNCCVMEYHQATGTLSAHFRNMSLKRIKRSDRRGAESVTEEKFTILFESQFSVGGNELVFQVKTLSLPVVVIVHGSQDNNATATVLWDNAFAEPGRVPFAVPDKVLWPQLCEALNMKFKAEVQSNRGLTKENLVFLAQKLFNNSSSHLEDYSGLSVSWSQFNRENLPGRNYTFWQWFDGVMEVLKKHLKPHWNDGAILGFVNKQQAHDLLINKPDGTFLLRFSDSEIGGITIAWKFDSQERMFWNLMPFTTRDFSIRSLADRLGDLNYLIYVFPDRPKDEVYSKYYTPVPCESATAKAVDGYVKPQIKQVVPEFVNASADAGGGSATYMDQAPSPAVCPQAHYNMYPQNPDSVLDTDGDFDLEDTMDVARRVEELLGRPMDSQWIPHAQS

SEQ ID NO: 174515 - DNA, 5171 bp, Artificial Sequence
  derived and/or modified sequence
ggcgggaggagagtcggcggccggagccgtcaccccgggcggggacccagcgcaggcaactccgcgcggcggcccggccgagggagggagcgagcgggcgggcgggcaagccagacagctgggccggagcagccgcgggcgcccgaggggccgagcgagattgtaaaccatggctgtgtggatacaagctcagcagctccaaggagaagcccttcatcagatgcaagcgttatatggccagcattttcccattgaggtgcggcattatttatcccagtggattgaaagccaagcatgggactcagtagatcttgataatccacaggagaacattaaggccacccagctcctggagggcctggtgcaggagctgcagaagaaggcagagcaccaggtgggggaagatgggtttttactgaagatcaagctggggcactatgccacacagctccagaacacgtatgaccgctgccccatggagctggtccgctgcatccgccatatattgtacaatgaacagaggttggtccgagaagccaacaatggtagctctccagctggaagccttgctgatgccatgtcccagaaacacctccagatcaaccagacgtttgaggagctgcgactggtcacgcaggacacagagaatgagttaaaaaagctgcagcagactcaggagtacttcatcatccagtaccaggagagcctgaggatccaagctcagtttggcccgctggcccagctgagcccccaggagcgtctgagccgggagacggccctccagcagaagcaggtgtctctggaggcctggttgcagcgtgaggcacagacactgcagcagtaccgcgtggagctggccgagaagcaccagaagaccctgcagctgctgcggaagcagcagaccatcatcctggatgacgagctgatccagtggaagcggcggcagcagctggccgggaacggcgggccccccgagggcagcctggacgtgctacagtcctggtgtgagaagttggccgagatcatctggcagaaccggcagcagatccgcagggctgagcacctctgccagcagctgcccatccccggcccagtggaggagatgctggccgaggtcaacgccaccatcacggacattatctcagccctggtgaccagcacgttcatcattgagaagcagcctcctcaggtcctgaagacccagaccaagtttgcagccactgtgcgcctgctggtgggcgggaagctgaacgtgcacatgaaccccccccaggtgaaggccaccatcatcagtgagcagcaggccaagtctctgctcaagaacgagaacacccgcaatgattacagtggcgagatcttgaacaactgctgcgtcatggagtaccaccaagccacaggcacccttagtgcccacttcaggaatatgtccctgaaacgaattaagaggtcagaccgtcgtggggcagagtcggtgacagaagaaaaatttacaatcctgtttgaatcccagttcagtgttggtggaaatgagctggtttttcaagtcaagaccctgtccctgccagtggtggtgatcgttcatggcagccaggacaacaatgcgacggccactgttctctgggacaatgcttttgcagagcctggcagggtgccatttgccgtgcctgacaaagtgctgtggccacagctgtgtgaggcgctcaacatgaaattcaaggccgaagtgcagagcaaccggggcctgaccaaggagaacctcgtgttcctggcgcagaaactgttcaacaacagcagcagccacctggaggactacagtggcctgtctgtgtcctggtcccagttcaacagggagaatttaccaggacggaattacactttctggcaatggtttgacggtgtgatggaagtgttaaaaaaacatctcaagcctcattggaatgatggggccattttggggtttgtaaacaagcaacaggcccatgacctactcattaacaagccagatgggaccttcctcctgagattcagtgactcagaaattggcggcatcaccattgcttggaagtttgattctcaggaaagaatgttttggaatctgatgccttttaccaccagagacttctccattcggtccctagccgaccgcttgggagacttgaattaccttatctacgtgtttcctgatcggccaaaagatgaagtatactccaaatactacacaccagttccctgcgagtctgctactgctaaagctgttgatggatacgtgaagccacagatcaagcaagtggtccctgagtttgtgaacgcatctgcagatgccgggggcggcagcgccacgtacatggaccaggccccctccccagctgtgtgtccccaggctcactataacatgtacccacagaaccctgactcagtccttgacaccgatggggacttcgatctggaggacacaatggacgtagcgcggcgtgtggaggagctcctgggccggccaatggacagtcagtggatcccgcacgcacaatcgtgaccccgcgacctctccatcttcagcttcttcatcttcaccagaggaatcactcttgtggatgttttaattccatgaatcgcttctcttttgaaacaatactcataatgtgaagtgttaatactagttgtgaccttagtgtttctgtgcatggtggcaccagcgaagggagtgcgagtatgtgtttgtgtgtgtgtgtgtgtgtgtgtgtgtgtgcgtgtttgcacgttatggtgtttctccctctcactgtctgagagtttagttgtagcagaggggccacagacagaagctgtggtggtttttactttgtgcaaaaaggcagtgagtttcgtgaagcctggaagttggccatgtgtcttaagagtggctggactttgacatgtggctgtttgaataagagaaggacaaagggaggagaaagcacatgtgctccagtgagtcttcgtcactctgtctgccaagcaattgatatataaccgtgattgtctctgcttttcttctgaaatgtagataactgctttttgacaaagagagccttccctctcccccacccctgtgttcttgggtaggaatgggaaaaggggcaacctacaaagattgttggggcaagggaagtcacaagctttcggatgggcggtggcttttcacaaaacatttagctcatcttattctctctttgtcctctctcccctcctgcccgcccgcaccctggaattgccactcagttcctctgggtgtgcacatatgtttggagaaatagaggagagaaaagagggccacgtaactgagagcttacagtgccaatgccgtttgtgttctggccagagtggagtgcgcagccctgactcccaggcgctgagattgttgcctggttacccaggaagctgctgttccggctgcccagcctttctctgagccagcggatgcacagtccgtggccttcttcaggcttattgatgatgctttttgcaaatgttgaatcatggttctgtttctaagttggatcttttttgttttctccttgccaccctaatttgacatcaaaattctctcttgtgcattgggccctgggtcattcaaacccaggtcacctcattccccttctctgttcacacctaatgtcttgaagagtaggtagcagcagtgtgggctgaacctaggccagcttgcttagcgggtcaccctgctgtgaagtcctggcaggtgttggtaatgtgtggaaatgcagtcagcaagtttgctggggagtttgataaaagtataaaacaaaacaaaaaaagcctcggtataattttgttccacgacttcttctgtagctttacaccagaaggaaggaatgggctacagcaggtagtggaggaagaggggggtgagcaggtgtattaaaatagcttacgggtaaggcctaaaaggtcacccctcggccccctctccaaaagaagggcatgggcacccccaggagaggatggccccaaaaaccttatttttatacatgagagtaaataaacatattttttttacaaaaataacttctgaatttatcagtgttttgccgttaaaaatattcctctatagtaaattatttattggaagatgacttttttaaagctgccgtttgccttggcttggtttcatacactgatttatttttctatgccaggcagtagagtctctctgcctctgaggagcaggctacccgcatcccactcagcccctccctacccctcaagatttgatgaaaattccaaccatgaggatgggtgcatcggggaagggtgagaaggagagcctgcctgctcagggatccaggctcgtagagtcactccctgcccgtctcccagagatgcttcaccagcacctgcctctgagacctcgctctctgttccagcaaccctggttggggggtcagacttgatacactttcaggttgggagtggacccaccccagggcctgctgaggacagagcagccaggccgtcctggctcactttgcagttggcactgggttggggaggaagagagctgatgagtgtggcttccctgagctggggtttccctgcttgtccagttgtgagctgtcctcggtgttaccgaggctgtgcctagagagtggagatttttgatgaaaggtgtgctcgctctctgcgttctatcttctctctcctccttgttcctgcaaaccacaagataaaggtagtggtgtgtctcgaccccatcagcctctcacccactcccagacacacacaagtcctcaaaagtttcagctccgtgtgtgagatgtgcaggttttttctagggggtagggggagactaaaatcgaatataacttaaaatgaaagtatactttttataatttttctttttaaaacttggtgaaattatttcagatacatattttagtgtcaaggcagattagttatttagccaccaaaaaaaagtattgtgtacaatttggggcctcaaatttgactctgcctcaaaaaaaagaaatatatcctatgcagagttacagtcacaaagttgtgtattttatgttacaataaagccttcctctgaagggaaaaaaaaaaaaaaaaaaaaaaaaaaaaaaaaaaaaaaaaaaaaaaaaaaaaaaaaaaaaaaaaaaaaaaaaaaaaaa

SEQ ID NO: 174516 - DNA, 2364 bp, Artificial Sequence
  derived and/or modified sequence
atggccgtgtggatccaggcccagcagctgcagggcgaggccctgcaccagatgcaggccctgtacggccagcacttccccatcgaggtgagacactacctgagccagtggatcgagagccaggcctgggacagcgtggacctggacaacccccaggagaacatcaaggccacccagctgctggagggcctggtgcaggagctgcagaagaaggccgagcaccaggtgggcgaggacggcttcctgctgaagatcaagctgggccactacgccacccagctgcagaacacctacgacagatgccccatggagctggtgagatgcatcagacacatcctgtacaacgagcagagactggtgagagaggccaacaacggcagcagccccgccggcagcctggccgacgccatgagccagaagcacctgcagatcaaccagaccttcgaggagctgagactggtgacccaggacaccgagaacgagctgaagaagctgcagcagacccaggagtacttcatcatccagtaccaggagagcctgagaatccaggcccagttcggccccctggcccagctgagcccccaggagagactgagcagagagaccgccctgcagcagaagcaggtgagcctggaggcctggctgcagagagaggcccagaccctgcagcagtacagagtggagctggccgagaagcaccagaagaccctgcagctgctgagaaagcagcagaccatcatcctggacgacgagctgatccagtggaagagaagacagcagctggccggcaacggcggcccccccgagggcagcctggacgtgctgcagagctggtgcgagaagctggccgagatcatctggcagaacagacagcagatcagaagagccgagcacctgtgccagcagctgcccatccccggccccgtggaggagatgctggccgaggtgaacgccaccatcaccgacatcatcagcgccctggtgaccagcaccttcatcatcgagaagcagcccccccaggtgctgaagacccagaccaagttcgccgccaccgtgagactgctggtgggcggcaagctgaacgtgcacatgaaccccccccaggtgaaggccaccatcatcagcgagcagcaggccaagagcctgctgaagaacgagaacaccagaaacgactacagcggcgagatcctgaacaactgctgcgtgatggagtaccaccaggccaccggcaccctgagcgcccacttcagaaacatgagcctgaagagaatcaagagaagcgacagaagaggcgccgagagcgtgaccgaggagaagttcaccatcctgttcgagagccagttcagcgtgggcggcaacgagctggtgttccaggtgaagaccctgagcctgcccgtggtggtgatcgtgcacggcagccaggacaacaacgccaccgccaccgtgctgtgggacaacgccttcgccgagcccggcagagtgcccttcgccgtgcccgacaaggtgctgtggccccagctgtgcgaggccctgaacatgaagttcaaggccgaggtgcagagcaacagaggcctgaccaaggagaacctggtgttcctggcccagaagctgttcaacaacagcagcagccacctggaggactacagcggcctgagcgtgagctggagccagttcaacagagagaacctgcccggcagaaactacaccttctggcagtggttcgacggcgtgatggaggtgctgaagaagcacctgaagccccactggaacgacggcgccatcctgggcttcgtgaacaagcagcaggcccacgacctgctgatcaacaagcccgacggcaccttcctgctgagattcagcgacagcgagatcggcggcatcaccatcgcctggaagttcgacagccaggagagaatgttctggaacctgatgcccttcaccaccagagacttcagcatcagaagcctggccgacagactgggcgacctgaactacctgatctacgtgttccccgacagacccaaggacgaggtgtacagcaagtactacacccccgtgccctgcgagagcgccaccgccaaggccgtggacggctacgtgaagccccagatcaagcaggtggtgcccgagttcgtgaacgccagcgccgacgccggcggcggcagcgccacctacatggaccaggcccccagccccgccgtgtgcccccaggcccactacaacatgtacccccagaaccccgacagcgtgctggacaccgacggcgacttcgacctggaggacaccatggacgtggccagaagagtggaggagctgctgggcagacccatggacagccagtggatcccccacgcccagagctag

SEQ ID NO: 174517 - DNA, 2364 bp, Artificial Sequence
  derived and/or modified sequence
atggccgtttggattcaggcccagcaactacaaggtgaagctcttcaccagatgcaggcactctacggtcagcacttccccattgaggtaaggcattacctgtcccagtggatcgagtcccaagcctgggactcagtggacttggacaatccgcaggagaatattaaagccacccaactcctagaggggctggtacaggagctgcagaagaaggctgaacaccaggtaggggaagacggcttccttctgaaaatcaagctgggccactacgccacacagctgcagaacacctacgacagatgcccaatggaattagttaggtgtattagacatatcctgtacaacgagcagcgtttggtccgggaggcaaacaacggttcttctcctgccggcagcctggccgatgccatgagccagaagcacctccagattaaccagacgtttgaggagctcaggctcgtcacccaggatacggagaatgaactgaaaaagctacagcagactcaggagtattttatcatacaataccaggaatcactgcgcatacaggctcagttcggccccctggcacaactttcccctcaagaacggctgagtcgggaaacggctcttcagcaaaagcaagttagcctagaggcctggttacagagagaggcacagacgctccaacagtatagagtcgaacttgccgaaaagcatcagaagaccttgcaactgttgaggaagcagcaaactattattctggacgatgaactgatacagtggaaacgacgccagcaactcgccggcaacggagggccccccgaaggcagtctcgatgttttgcagtcttggtgtgagaaactggcggagatcatatggcagaataggcaacagatccggcgtgccgaacacttatgccagcagctgcctattcccgggcccgttgaggaaatgctggctgaagtgaatgctacaatcaccgatataatatccgccctggtaacctctacgtttatcatagagaagcagccaccccaagttcttaagactcagactaagttcgctgcgactgtgcgtttgttagtgggcgggaagctgaacgtacatatgaaccccccacaggtgaaggcgacgatcatttctgaacagcaggctaagagccttctgaaaaacgagaacacaagaaatgattacagcggggaaattctaaataattgctgcgtcatggaatatcaccaggcgacggggacactgtccgcccactttcggaatatgagtctaaagagaatcaagcggtccgatcggcggggagctgagtccgttaccgaagagaaattcacgatcttattcgagagccagtttagcgttggcgggaacgaactggtgttccaggttaagaccctctctctccctgtggtagtgattgttcatggcagccaggataataacgctactgccaccgtactgtgggacaacgccttcgctgagcccggacgagtgccatttgctgttccggacaaggttctctggccccagctctgtgaagctctgaacatgaaattcaaggcagaggtccaatctaataggggtctgactaaagaaaatctggtgttcttagcacagaagttgtttaacaactcctctagtcacctggaggattattccggactgagtgtatcctggtctcagttcaatcgggagaatttgcccggcaggaattatacgttctggcagtggtttgacggggtcatggaggtgctgaaaaagcatctaaagcctcattggaacgatggcgcaatcctgggcttcgtgaacaagcaacaagctcatgatctcttgataaataaacctgacggcactttcctgctcaggttctcagactcagagatcggagggatcaccatagcgtggaagtttgactcacaagaacgcatgttctggaacttgatgccgttcactacccgggatttcagcatacgatcgttagccgatagactcggcgacctcaattatctgatctacgtttttccggaccgccctaaagatgaagtgtacagcaagtattatactcctgtcccctgcgagagtgcgaccgccaaagccgttgacgggtatgtgaagcctcagatcaagcaggtcgtccctgaattcgttaatgctagcgcagatgcaggcggcggctctgccacctacatggatcaggctcctagccctgccgtctgtccccaggcccattataacatgtaccctcagaatcccgacagtgtacttgacaccgatggtgacttcgatctcgaggatactatggacgttgcccggcgggtggaggaattgctagggagacctatggatagccagtggattccccatgctcagtcctag

SEQ ID NO: 174518 - DNA, 2364 bp, Artificial Sequence
  derived and/or modified sequence
atggctgtgtggatccaggcccagcagctgcagggcgaggccctgcaccagatgcaggccctgtatggccagcacttccccatcgaggtgcgccactacctgagccagtggattgagagccaggcctgggacagcgtggacctggacaacccccaggagaacatcaaggccacccagctgctggagggcctggtgcaggagctgcagaagaaggccgagcaccaggtgggggaggatggcttcctgctgaagatcaagctgggccactacgccacccagctgcagaacacctatgaccgctgccccatggagctggtgcgctgcatccgccacatcctgtacaatgagcagaggctggtgcgggaggccaacaacggcagcagccctgctggcagcctggctgatgccatgagccagaagcacctgcagatcaaccagacctttgaggagctgcggctggtgacccaggacacagaaaatgagctgaagaagctgcagcagacccaggagtacttcatcatccagtaccaggagagcctgcgcatccaggcccagtttggccccctggcccagctgagcccccaggagcggctgagccgggagacagccctgcagcagaagcaggtgtccctggaggcctggctgcagcgggaggcccagaccctgcagcagtacagagtggagctggccgagaagcaccagaagaccctgcagctgctgaggaagcagcagaccatcatcctggatgatgagctgatccagtggaagaggcggcagcagctggccggaaatggaggccccccagagggcagcctggatgtgctgcagagctggtgtgagaagctggccgagatcatctggcagaaccggcagcagatccggcgggcagagcacctgtgccagcagctgcccatccctggccctgtggaggagatgctggccgaggtgaatgccaccatcacagacatcatcagcgccctggtgaccagcaccttcatcatcgagaagcagcccccccaggtgctgaagacccagaccaagtttgctgccaccgtgcggctgctggtgggcggcaagctgaatgtgcacatgaaccccccccaggtgaaggccaccatcatcagcgagcagcaggccaagagcctgctgaagaatgaaaacaccagaaatgactacagcggggagatcctgaacaactgctgcgtgatggagtaccaccaggccaccggcaccctgagcgcccacttcaggaacatgagcctgaagaggatcaagagaagtgacagaagaggagctgagagcgtgacagaggagaagttcaccatcctgtttgagagccagttctctgtgggcggcaatgagctggtgttccaggtgaagaccctgagcctgcctgtggtggtgattgtgcacggcagccaggacaacaatgccacagccaccgtgctgtgggacaatgcctttgctgagcccggccgggtgccctttgctgtgcctgacaaggtgctgtggccccagctgtgtgaggccctgaacatgaagttcaaggccgaggtgcagagcaacagaggcctgaccaaggagaacctggtgttcctggcccagaagctgttcaacaacagcagcagccacctggaggactacagcggcctgtctgtgtcctggagccagttcaaccgggagaacctgcccggcaggaactacaccttctggcagtggtttgatggagtgatggaggtgctgaagaagcacctgaagccccactggaatgatggagccatcctgggctttgtgaacaagcagcaggcccatgacctgctgatcaacaagccagatggcaccttcctgctgcgcttcagtgacagcgagatcggcggcatcaccatcgcctggaagtttgacagccaggagaggatgttctggaacctgatgcccttcaccacccgggacttcagcatccgcagcctggccgaccggctgggggacctgaactacctgatctacgtgtttcctgaccggcccaaggatgaggtgtacagcaagtactacacccctgtgccctgtgagagcgccacagccaaggctgtggatggctacgtgaagccccagatcaagcaggtggtgcctgagtttgtgaatgccagcgcagatgctgggggcggcagcgccacctacatggaccaggcccccagccctgctgtgtgcccccaggcccactacaacatgtacccccagaacccagattctgtgctggacacagatggagactttgacctggaggacaccatggatgtggccaggagagtggaggagctgctgggccggcccatggacagccagtggatcccccacgcccagagctag

SEQ ID NO: 174519 - DNA, 2364 bp, Artificial Sequence
  derived and/or modified sequence
atggccgtgtggatccaggcccagcagctgcagggcgaggccctgcatcaaatgcaagctctgtacggtcagcacttcccaatagaggtgcggcattacctttcgcagtggattgaaagccaagcctgggattccgtcgacttggacaatccccaagagaatatcaaggctacacagctgctggaggggttagtgcaggaacttcagaaaaaggccgaacatcaggttggcgaggatgggttcttgcttaagatcaagctgggccactacgcaactcagctgcagaacacctacgatagatgccccatggaattggtgcgatgcataaggcacattctgtacaatgagcagcgcctcgtcagggaggcaaacaatgggagtagcccagctggttcactagccgacgcgatgtctcagaaacacctccagatcaaccagaccttcgaggaactgcgccttgtgacacaggatactgagaacgaactaaaaaagctgcagcagacgcaagagtacttcattatccaataccaggagtcactgcgaatccaggctcagtttgggccactggcccagttgtccccgcaggagcgcttatctcgtgaaactgctctccagcagaagcaagtcagcctggaagcttggctgcaacgcgaggcacaaacactgcagcagtaccgagtcgagctggcagaaaaacatcagaaaacacttcagctgctgaggaagcagcagactatcattctagatgatgagctgatacagtggaaacggcgacagcagctggctggaaacggcggcccccctgaggggtcgcttgacgtcttgcagtcttggtgcgagaagctggccgagataatatggcagaatagacaacaaatcagacgcgcagaacatctgtgccagcagttgccaatccctggaccagtcgaggaaatgctagcggaagtgaacgccactattactgatataatttcggccttggtcactagcacctttattatagaaaagcagccaccgcaagtcctcaaaactcagaccaagttcgcggctacagtgcggctcctggtgggcggtaagttgaatgtgcatatgaacccgccgcaagtaaaggccactattatatcagagcagcaggcaaaaagcctgctgaagaatgaaaacactcgcaatgattacagtggcgagatcctgaacaattgctgtgttatggagtaccaccaagctacagggacactcagcgcccacttccgaaatatgagcctgaaaagaattaaaaggtccgatcgacgtggggctgagagcgttaccgaagagaagtttaccatcctcttcgaatcacaatttagtgtcgggggaaatgagctggtattccaggtgaagacgctgagtttgcctgtggtggtgatagtgcacggatcccaggataacaacgccacagctaccgttctgtgggataacgcctttgctgagccggggcgcgtgccattcgctgtgcctgacaaggttttatggcctcaactgtgcgaagcgcttaacatgaaattcaaagccgaagtccagtccaataggggcctgactaaagagaatctcgtcttcttagcacagaaactgtttaacaatagttcaagccacttggaagactacagcggactgtccgtctcatggtctcaatttaatagggagaatctcccgggaagaaactacacgttctggcagtggtttgacggtgtgatggaagtcttgaaaaaacacctcaagccacattggaacgacggggctatcctcggctttgtcaacaagcagcaggctcatgacttgctcataaataagcccgacggcacgtttttgttgcggtttagcgattcggagatcgggggtataactatcgcttggaaattcgacagccaggagcgcatgttctggaatctgatgcctttcactactagggacttcagtataaggagtctggccgataggcttggggatcttaattacctgatctacgtctttcccgatagacccaaagacgaggtatacagcaagtactacacaccagtgccgtgcgaaagcgcaacagcaaaggctgtggatggatatgtcaagccacagattaagcaagtggttcccgagtttgttaacgcgtctgccgacgccggaggaggcagcgctacttacatggaccaggccccaagtccggcggtttgtccccaggcacattacaacatgtacccccagaacccagactccgtgttagacaccgatggcgattttgacctagaggatactatggatgtcgcaaggcgggtagaggaactgttgggtagacccatggactctcagtggattcctcacgcacagagctag

SEQ ID NO: 174520 - DNA, 2364 bp, Artificial Sequence
  derived and/or modified sequence
atggctgtgtggatccaagcccagcagctgcaaggggaggccctgcaccagatgcaggcactgtatggacagcacttccccattgaagttcggcattatttgtcccagtggattgagagccaggcctgggacagcgtcgatctggataatccccaggagaatatcaaggctacacaactgctggaagggcttgttcaggagctgcagaaaaaggccgagcaccaagtgggagaggacggcttcctgttgaaaattaagctgggtcactatgcaacgcagctgcagaacacctacgataggtgtccgatggagctagtaagatgtatcaggcacatcctttacaatgaacagcgtctcgtgagagaggcaaacaacggatcctcacccgcaggatccctggccgacgctatgagtcagaaacatctccagatcaaccagacatttgaggaattacgcctggtgacccaggacactgagaacgagctgaagaagctgcagcagacacaggagtattttatcatccagtatcaggaatccttacgtatccaagcccaatttggaccgctggcacagttaagcccccaggagagactctcgcgcgaaaccgctctgcagcagaaacaagtgtctctggaggcctggttgcagagggaggcccagacattacagcagtacagagtcgaactcgccgaaaagcatcaaaaaaccctgcagctcctgcgaaagcaacagacaattattttggacgatgaacttatccaatggaaaaggagacagcagctggcgggaaatggaggccctcctgaggggtcgctagacgtgcttcaatcatggtgcgaaaagttggccgagattatctggcagaaccgtcagcagatacgcagggctgaacacctttgtcagcaattgcctatccccggtcccgtggaggagatgctcgccgaggtcaatgccactataaccgacataatttcagctcttgtaacatcgacttttattattgaaaagcagcctccacaggtgcttaagacgcaaaccaagtttgccgcaactgtgaggcttttggtgggcggaaaactcaacgtgcacatgaatcctccgcaggtgaaggcaactattatcagcgagcagcaagcgaaaagtctgctgaagaacgagaatactagaaacgactattcaggagagatcttgaacaactgttgcgtgatggagtaccaccaggccactggcacactcagcgctcatttccggaatatgtctctgaagcggatcaagagaagtgatcgtagaggcgctgaaagcgtgaccgaagagaagtttactattctgttcgaatcacagttttccgtggggggaaatgagctcgtgttccaggtgaagaccctttccttgcctgtggtcgttattgtgcacggatcccaggacaataatgcaactgccactgtgctgtgggataatgccttcgctgagccaggaagggtgcctttcgccgttcccgacaaagtgctgtggccacagctctgcgaggctctgaacatgaaattcaaagcagaagtgcagtctaaccgcggactaaccaaggagaatctggtgttcctggcacagaagttgttcaataatagctcttcacacctggaggactattctgggctgtcagtctcctggagccagttcaacagagagaacctgccaggcaggaactataccttttggcagtggtttgatggggtcatggaggtcctgaaaaaacatctcaaaccacattggaatgacggggcaatcctggggtttgttaacaagcagcaggctcacgacctcttgattaacaagcccgacggaactttcctgcttagatttagcgattccgaaattggtgggatcactattgcttggaaatttgatagccaggagaggatgttctggaacctgatgcccttcacaactcgggacttctcaatcagatctctggccgaccggctaggggatctgaattacctgatttacgtattccctgaccgcccaaaggatgaagtctatagtaaatactacactccagtgccatgtgaaagtgcaaccgctaaagctgtggacggttacgtgaaaccacagattaagcaggtcgtcccagagttcgtgaatgcatcagccgatgctgggggtggatcggcaacatacatggaccaagccccttcaccggctgtgtgtccacaggcccactacaatatgtaccctcaaaacccggactctgttctggacacggacggcgacttcgatcttgaagacaccatggacgtagcgaggagagttgaggaactgttaggcagaccgatggacagccaatggataccccacgcccagagttag

SEQ ID NO: 174521 - DNA, 5103 bp, Artificial Sequence
  derived and/or modified sequence
ggcgggaggagagtcggcggccggagccgtcaccccgggcggggacccagcgcaggcaactccgcgcggcggcccggccgagggagggagcgagcgggcgggcgggcaagccagacagctgggccggagcagccgcgggcgcccgaggggccgagcgagattgtaaaccatggctgtgtggatacaagctcagcagctccaaggagaagcccttcatcagatgcaagcgttatatggccagcattttcccattgaggtgcggcattatttatcccagtggattgaaagccaagcatgggactcagtagatcttgataatccacaggagaacattaaggccacccagctcctggagggcctggtgcaggagctgcagaagaaggcagagcaccaggtgggggaagatgggtttttactgaagatcaagctggggcactatgccacacagctccagaacacgtatgaccgctgccccatggagctggtccgctgcatccgccatatattgtacaatgaacagaggttggtccgagaagccaacaatggtagctctccagctggaagccttgctgatgccatgtcccagaaacacctccagatcaaccagacgtttgaggagctgcgactggtcacgcaggacacagagaatgagttaaaaaagctgcagcagactcaggagtacttcatcatccagtaccaggagagcctgaggatccaagctcagtttggcccgctggcccagctgagcccccaggagcgtctgagccgggagacggccctccagcagaagcaggtgtctctggaggcctggttgcagcgtgaggcacagacactgcagcagtaccgcgtggagctggccgagaagcaccagaagaccctgcagctgctgcggaagcagcagaccatcatcctggatgacgagctgatccagtggaagcggcggcagcagctggccgggaacggcgggccccccgagggcagcctggacgtgctacagtcctggtgtgagaagttggccgagatcatctggcagaaccggcagcagatccgcagggctgagcacctctgccagcagctgcccatccccggcccagtggaggagatgctggccgaggtcaacgccaccatcacggacattatctcagccctggtgaccagcacgttcatcattgagaagcagcctcctcaggtcctgaagacccagaccaagtttgcagccactgtgcgcctgctggtgggcgggaagctgaacgtgcacatgaaccccccccaggtgaaggccaccatcatcagtgagcagcaggccaagtctctgctcaagaacgagaacacccgcaatgattacagtggcgagatcttgaacaactgctgcgtcatggagtaccaccaagccacaggcacccttagtgcccacttcaggaatatgtccctgaaacgaattaagaggtcagaccgtcgtggggcagagtcggtgacagaagaaaaatttacaatcctgtttgaatcccagttcagtgttggtggaaatgagctggtttttcaagtcaagaccctgtccctgccagtggtggtgatcgttcatggcagccaggacaacaatgcgacggccactgttctctgggacaatgcttttgcagagcctggcagggtgccatttgccgtgcctgacaaagtgctgtggccacagctgtgtgaggcgctcaacatgaaattcaaggccgaagtgcagagcaaccggggcctgaccaaggagaacctcgtgttcctggcgcagaaactgttcaacaacagcagcagccacctggaggactacagtggcctgtctgtgtcctggtcccagttcaacagggagaatttaccaggacggaattacactttctggcaatggtttgacggtgtgatggaagtgttaaaaaaacatctcaagcctcattggaatgatggggccattttggggtttgtaaacaagcaacaggcccatgacctactcattaacaagccagatgggaccttcctcctgagattcagtgactcagaaattggcggcatcaccattgcttggaagtttgattctcaggaaagaatgttttggaatctgatgccttttaccaccagagacttctccattcggtccctagccgaccgcttgggagacttgaattaccttatctacgtgtttcctgatcggccaaaagatgaagtatactccaaatactacacaccagttccctgcgagtctgctactgctaaagctgttgatggatacgtgaagccacagatcaagcaagtggtccctgagtttgtgaacgcatctgcagatgccgggggcggcagcgccacgtacatggaccaggccccctccccagctgtgtgtccccaggctcactataacatgtacccacagaaccctgactcagtccttgacaccgatggggacttcgatctggaggacacaatggacgtagcgcggcgtgtggaggagctcctgggccggccaatggacagtcagtggatcccgcacgcacaatcgtgaccccgcgacctctccatcttcagcttcttcatcttcaccagaggaatcactcttgtggatgttttaattccatgaatcgcttctcttttgaaacaatactcataatgtgaagtgttaatactagttgtgaccttagtgtttctgtgcatggtggcaccagcgaagggagtgcgagtatgtgtttgtgtgtgtgtgtgtgtgtgtgtgtgtgtgcgtgtttgcacgttatggtgtttctccctctcactgtctgagagtttagttgtagcagaggggccacagacagaagctgtggtggtttttactttgtgcaaaaaggcagtgagtttcgtgaagcctggaagttggccatgtgtcttaagagtggctggactttgacatgtggctgtttgaataagagaaggacaaagggaggagaaagcacatgtgctccagtgagtcttcgtcactctgtctgccaagcaattgatatataaccgtgattgtctctgcttttcttctgaaatgtagataactgctttttgacaaagagagccttccctctcccccacccctgtgttcttgggtaggaatgggaaaaggggcaacctacaaagattgttggggcaagggaagtcacaagctttcggatgggcggtggcttttcacaaaacatttagctcatcttattctctctttgtcctctctcccctcctgcccgcccgcaccctggaattgccactcagttcctctgggtgtgcacatatgtttggagaaatagaggagagaaaagagggccacgtaactgagagcttacagtgccaatgccgtttgtgttctggccagagtggagtgcgcagccctgactcccaggcgctgagattgttgcctggttacccaggaagctgctgttccggctgcccagcctttctctgagccagcggatgcacagtccgtggccttcttcaggcttattgatgatgctttttgcaaatgttgaatcatggttctgtttctaagttggatcttttttgttttctccttgccaccctaatttgacatcaaaattctctcttgtgcattgggccctgggtcattcaaacccaggtcacctcattccccttctctgttcacacctaatgtcttgaagagtaggtagcagcagtgtgggctgaacctaggccagcttgcttagcgggtcaccctgctgtgaagtcctggcaggtgttggtaatgtgtggaaatgcagtcagcaagtttgctggggagtttgataaaagtataaaacaaaacaaaaaaagcctcggtataattttgttccacgacttcttctgtagctttacaccagaaggaaggaatgggctacagcaggtagtggaggaagaggggggtgagcaggtgtattaaaatagcttacgggtaaggcctaaaaggtcacccctcggccccctctccaaaagaagggcatgggcacccccaggagaggatggccccaaaaaccttatttttatacatgagagtaaataaacatattttttttacaaaaataacttctgaatttatcagtgttttgccgttaaaaatattcctctatagtaaattatttattggaagatgacttttttaaagctgccgtttgccttggcttggtttcatacactgatttatttttctatgccaggcagtagagtctctctgcctctgaggagcaggctacccgcatcccactcagcccctccctacccctcaagatttgatgaaaattccaaccatgaggatgggtgcatcggggaagggtgagaaggagagcctgcctgctcagggatccaggctcgtagagtcactccctgcccgtctcccagagatgcttcaccagcacctgcctctgagacctcgctctctgttccagcaaccctggttggggggtcagacttgatacactttcaggttgggagtggacccaccccagggcctgctgaggacagagcagccaggccgtcctggctcactttgcagttggcactgggttggggaggaagagagctgatgagtgtggcttccctgagctggggtttccctgcttgtccagttgtgagctgtcctcggtgttaccgaggctgtgcctagagagtggagatttttgatgaaaggtgtgctcgctctctgcgttctatcttctctctcctccttgttcctgcaaaccacaagataaaggtagtggtgtgtctcgaccccatcagcctctcacccactcccagacacacacaagtcctcaaaagtttcagctccgtgtgtgagatgtgcaggttttttctagggggtagggggagactaaaatcgaatataacttaaaatgaaagtatactttttataatttttctttttaaaacttggtgaaattatttcagatacatattttagtgtcaaggcagattagttatttagccaccaaaaaaaagtattgtgtacaatttggggcctcaaatttgactctgcctcaaaaaaaagaaatatatcctatgcagagttacagtcacaaagttgtgtattttatgttacaataaagccttcctctgaagggatggtattga

SEQ ID NO: 174522 - protein, 339 aa, Artificial Sequence
  derived and/or modified sequence
MESRKDITNQEELWKMKPRRNLEEDDYLHKDTGETSMLKRPVLLHLHQTAHADEFDCPSELQHTQELFPQWHLPIKIAAIIASLTFLYTLLREVIHPLATSHQQYFYKIPILVINKVLPMVSITLLALVYLPGVIAAIVQLHNGTKYKKFPHWLDKWMLTRKQFGLLSFFFAVLHAIYSLSYPMRRSYRYKLLNWAYQQVQQNKEDAWIEHDVWRMEIYVSLGIVGLAILALLAVTSIPSVSDSLTWREFHYIQSKLGIVSLLLGTIHALIFAWNKWIDIKQFVWYTPPTFMIAVFLPIVVLIFKSILFLPCLRKKILKIRHGWEDVTKINKTEICSQL

SEQ ID NO: 174523 - DNA, 1020 bp, Artificial Sequence
  derived and/or modified sequence
atggagagcagaaaggacatcaccaaccaggaggagctgtggaagatgaagcccagaagaaacctggaggaggacgactacctgcacaaggacaccggcgagaccagcatgctgaagagacccgtgctgctgcacctgcaccagaccgcccacgccgacgagttcgactgccccagcgagctgcagcacacccaggagctgttcccccagtggcacctgcccatcaagatcgccgccatcatcgccagcctgaccttcctgtacaccctgctgagagaggtgatccaccccctggccaccagccaccagcagtacttctacaagatccccatcctggtgatcaacaaggtgctgcccatggtgagcatcaccctgctggccctggtgtacctgcccggcgtgatcgccgccatcgtgcagctgcacaacggcaccaagtacaagaagttcccccactggctggacaagtggatgctgaccagaaagcagttcggcctgctgagcttcttcttcgccgtgctgcacgccatctacagcctgagctaccccatgagaagaagctacagatacaagctgctgaactgggcctaccagcaggtgcagcagaacaaggaggacgcctggatcgagcacgacgtgtggagaatggagatctacgtgagcctgggcatcgtgggcctggccatcctggccctgctggccgtgaccagcatccccagcgtgagcgacagcctgacctggagagagttccactacatccagagcaagctgggcatcgtgagcctgctgctgggcaccatccacgccctgatcttcgcctggaacaagtggatcgacatcaagcagttcgtgtggtacaccccccccaccttcatgatcgccgtgttcctgcccatcgtggtgctgatcttcaagagcatcctgttcctgccctgcctgagaaagaagatcctgaagatcagacacggctgggaggacgtgaccaagatcaacaagaccgagatctgcagccagctgtag

SEQ ID NO: 174524 - DNA, 1020 bp, Artificial Sequence
  derived and/or modified sequence
atggagagcagaaaggacattacgaatcaggaggagctgtggaaaatgaagccccgccgcaacctggaggaggacgattacttgcataaggatactggagagacatcaatgttgaaacgtcctgtgttactccacctgcatcagactgctcacgctgacgagtttgactgtccaagtgaactgcagcatactcaggagctgtttccccagtggcacttgccaattaagatcgccgcaattatcgcatccctgacctttctttacaccctcctgcgagaagttattcatcctctggcgacaagccatcaacagtatttttataagatacccattctggtaattaacaaggtccttcccatggtaagtatcacacttctggccttggtgtacctgcccggagtgatcgccgccatcgtgcagctccacaatgggaccaagtataagaagtttcctcattggttggataaatggatgctgacaaggaaacagtttggcttgctgtcattcttcttcgctgtcctccacgctatatacagccttagttacccaatgcgtcgttcatatcgttacaagcttctgaattgggcttatcagcaggtccagcaaaataaggaggatgcatggatagagcatgacgtttggcggatggaaatctacgtgtctctcggtattgtgggcttggcaattctagcgctgctggccgtgacctccatcccctccgtttcagacagcctgacttggcgcgagttccattatatccagtccaaactgggcattgtgagtctcctgcttggtactatccacgcgctcatatttgcttggaacaaatggatcgacatcaaacagttcgtgtggtacacccctcctaccttcatgatcgctgtcttcctgccaatcgtggtcctcatctttaaaagcatcttgtttctgccgtgcctccgaaaaaagattctgaaaattaggcacggctgggaggacgtgaccaaaataaacaaaacagagatttgctcccaactctag

SEQ ID NO: 174525 - DNA, 1020 bp, Artificial Sequence
  derived and/or modified sequence
atggagagcaggaaggacatcaccaaccaggaggagctgtggaagatgaagcccaggaggaacctggaggaggatgactacctgcacaaggacaccggggagacctccatgctgaagaggcctgtgctgctgcacctgcaccagacagcccacgcagatgaatttgactgccccagcgagctgcagcacacccaggagctgttcccccagtggcacctgcccatcaagattgctgccatcatcgccagcctgaccttcctgtacaccctgctgcgggaggtgatccaccccctggccaccagccaccagcagtacttctacaagatccccatcctggtgatcaacaaggtgctgcccatggtgtccatcaccctgctggccctggtgtacctgcccggggtgattgctgccatcgtgcagctgcacaacggcaccaagtacaagaagttcccccactggctggacaagtggatgctgaccaggaagcagtttggcctgctgtccttcttctttgctgtgctgcacgccatctacagcctgagctaccccatgagaagaagctaccgctacaagctgctgaactgggcctaccagcaggtgcagcagaacaaggaggatgcctggattgaacatgatgtgtggaggatggagatctacgtgtccctgggcatcgtgggcctggccatcctggccctgctggccgtgaccagcatccccagcgtgtctgacagcctgacctggagggagttccactacatccagagcaagctgggcatcgtgtccctgctgctgggcaccatccacgccctgatctttgcctggaacaagtggattgacatcaagcagtttgtgtggtacaccccacccaccttcatgattgctgtgttcctgcccatcgtggtgctgatcttcaagagcatcctcttcctgccctgcctgaggaagaagatcctgaagatccgccacggctgggaggatgtgaccaagatcaacaagacagagatctgcagccagctgtag

SEQ ID NO: 174526 - DNA, 1020 bp, Artificial Sequence
  derived and/or modified sequence
atggagagccggaaggacatcaccaaccaggaggagctgtggaagatgaaacctaggcgcaacctggaggaggacgactacctgcataaagatactggtgaaacgtctatgctgaagagacctgtcctactgcacctccatcagacagctcatgccgacgagtttgattgccccagtgagctgcagcacacacaggagctgttccctcagtggcatctgcctatcaaaattgctgctattatcgcttctctgaccttcctctatacgctcctgcgggaggtcattcacccccttgccacctcacaccagcagtatttttacaagattccaattttggtaattaataaagtgctgcccatggtctcaattacattacttgctttggtgtacctccctggagtgattgcggctatcgtacagcttcacaatggcaccaagtacaagaaattcccacattggctagataaatggatgcttacccgcaaacagtttgggttactgtccttcttttttgcagtcctgcatgccatatacagcctgagttatccaatgcgcagatcataccgatacaagctgctgaattgggcttaccagcaggtccaacagaacaaggaggacgcctggatcgaacatgatgtgtggaggatggaaatctacgtgtcattggggatcgtgggactcgctatactagccctgctggctgtgacttctatcccaagcgtctctgatagcctgacctggcgggaattccactacatccagagcaagctgggaatcgtatctctgctacttggaaccatccacgctctcatatttgcctggaacaaatggattgatatcaaacagtttgtgtggtataccccacctacttttatgatcgccgtatttctgcctattgtggtcttaatatttaagagcatcctgtttctcccttgcctccggaaaaaaattttgaaaatccgtcacggatgggaagacgttacaaaaattaataagactgaaatctgctcccaactgtag

SEQ ID NO: 174527 - DNA, 1020 bp, Artificial Sequence
  derived and/or modified sequence
atggaatcccggaaggatataaccaatcaggaggaactctggaaaatgaagcccagaagaaacctcgaagaggatgactacctccacaaagacacgggggagactagtatgctcaagaggcctgtgctgctgcacttacatcagactgcacacgctgacgagttcgattgtccaagcgaactccagcacacccaagaactttttccccagtggcacctgcctattaaaattgccgcaatcatagccagtcttacatttctgtacacactcctgagggaggtgatccatcccctggccacaagccaccagcaatacttctacaaaatccccatactggtaatcaacaaggtgctccctatggtatccatcacgcttttagcgctagtttacctgccgggtgtaatcgctgcaattgttcagctgcacaacggaacaaagtacaaaaagttccctcactggctcgataaatggatgctcacaaggaagcagtttggtctgttgtcctttttctttgcagtcctgcacgctatctactctcttagctatcccatgaggcgaagctatcgatacaagctgctgaattgggcctatcagcaggtgcagcagaataaagaggacgcctggatagagcacgacgtgtggcggatggagatttatgtgtcattgggaattgtgggtttagccattttggcactgttggctgtgaccagcatcccctcagtctccgatagccttacatggagagagttccactacatccagagtaagctcggcatagtctcactgcttctggggactatccacgccttgattttcgcttggaataagtggattgacataaagcaattcgtgtggtacacaccccctacttttatgattgctgtgttcctgccaatagtcgttctgatattcaagtccatcttattcttaccatgcctccggaagaagatcctgaaaatcagacacggatgggaggacgtgacaaaaattaataagactgagatttgcagtcagttgtag

SEQ ID NO: 174528 - DNA, 1313 bp, Artificial Sequence
  derived and/or modified sequence
gcggacgcggggcgccagcaggtggcgctggacgcgcaacggacaaggaggcggggcctgcagctggcttggaggctccgcgctctggaggctcaggcgccgcgtggggcccgcacctctgggcagcagcggcagccgagactcacggtcaagctaaggcgaagagtgggtggctgaagccatactattttatagaattaatggaaagcagaaaagacatcacaaaccaagaagaactttggaaaatgaagcctaggagaaatttagaagaagacgattatttgcataaggacacgggagagaccagcatgctaaaaagacctgtgcttttgcatttgcaccaaacagcccatgctgatgaatttgactgcccttcagaacttcagcacacacaggaactctttccacagtggcacttgccaattaaaatagctgctattatagcatctctgacttttctttacactcttctgagggaagtaattcaccctttagcaacttcccatcaacaatatttttataaaattccaatcctggtcatcaacaaagtcttgccaatggtttccatcactctcttggcattggtttacctgccaggtgtgatagcagcaattgtccaacttcataatggaaccaagtataagaagtttccacattggttggataagtggatgttaacaagaaagcagtttgggcttctcagtttcttttttgctgtactgcatgcaatttatagtctgtcttacccaatgaggcgatcctacagatacaagttgctaaactgggcatatcaacaggtccaacaaaataaagaagatgcctggattgagcatgatgtttggagaatggagatttatgtgtctctgggaattgtgggattggcaatactggctctgttggctgtgacatctattccatctgtgagtgactctttgacatggagagaatttcactatattcagagcaagctaggaattgtttcccttctactgggcacaatacacgcattgatttttgcctggaataagtggatagatataaaacaatttgtatggtatacacctccaacttttatgatagctgttttccttccaattgttgtcctgatatttaaaagcatactattcctgccatgcttgaggaagaagatactgaagattagacatggttgggaagacgtcaccaaaattaacaaaactgagatatgttcccagttgtagaattactgtttacacacatttttgttcaatattgatatattttatcaccaacatttcaagtttgtatttgttaataaaatgattattcaagga

SEQ ID NO: 174529 - protein, 293 aa, Artificial Sequence
  derived and/or modified sequence
MSGLGRSRRGGRSRVDQEERFPQGLWTGVAMRSCPEEQYWDPLLGTCMSCKTICNHQSQRTCAAFCRSLSCRKEQGKFYDHLLRDCISCASICGQHPKQCAYFCENKLRSPVNLPPELRRQRSGEVENNSDNSGRYQGLEHRGSEASPALPGLKLSADQVALVYSTLGLCLCAVLCCFLVAVACFLKKRGDPCSCQPRSRPRQSPAKSSQDHAMEAGSPVSTSPEPVETCSFCFPECRAPTQESAVTPGTPDPTCAGRWGCHTRTTVLQPCPHIPDSGLGIVCVPAQEGGPGA

SEQ ID NO: 174530 - protein, 248 aa, Artificial Sequence
  derived and/or modified sequence
MSGLGRSRRGGRSRVDQEERWSLSCRKEQGKFYDHLLRDCISCASICGQHPKQCAYFCENKLRSPVNLPPELRRQRSGEVENNSDNSGRYQGLEHRGSEASPALPGLKLSADQVALVYSTLGLCLCAVLCCFLVAVACFLKKRGDPCSCQPRSRPRQSPAKSSQDHAMEAGSPVSTSPEPVETCSFCFPECRAPTQESAVTPGTPDPTCAGRKTKPPPVLTAGNCGVHRPPPETSTGSPRGQRLLWTQ

SEQ ID NO: 174531 - DNA, 882 bp, Artificial Sequence
  derived and/or modified sequence
atgagcggcctgggcagaagcagaagaggcggcagaagcagagtggaccaggaggagagattcccccagggcctgtggaccggcgtggccatgagaagctgccccgaggagcagtactgggaccccctgctgggcacctgcatgagctgcaagaccatctgcaaccaccagagccagagaacctgcgccgccttctgcagaagcctgagctgcagaaaggagcagggcaagttctacgaccacctgctgagagactgcatcagctgcgccagcatctgcggccagcaccccaagcagtgcgcctacttctgcgagaacaagctgagaagccccgtgaacctgccccccgagctgagaagacagagaagcggcgaggtggagaacaacagcgacaacagcggcagataccagggcctggagcacagaggcagcgaggccagccccgccctgcccggcctgaagctgagcgccgaccaggtggccctggtgtacagcaccctgggcctgtgcctgtgcgccgtgctgtgctgcttcctggtggccgtggcctgcttcctgaagaagagaggcgacccctgcagctgccagcccagaagcagacccagacagagccccgccaagagcagccaggaccacgccatggaggccggcagccccgtgagcaccagccccgagcccgtggagacctgcagcttctgcttccccgagtgcagagcccccacccaggagagcgccgtgacccccggcacccccgaccccacctgcgccggcagatggggctgccacaccagaaccaccgtgctgcagccctgcccccacatccccgacagcggcctgggcatcgtgtgcgtgcccgcccaggagggcggccccggcgcctag

SEQ ID NO: 174532 - DNA, 747 bp, Artificial Sequence
  derived and/or modified sequence
atgagcggcctgggcagaagcagaagaggcggcagaagcagagtggaccaggaggagagatggagcctgagctgcagaaaggagcagggcaagttctacgaccacctgctgagagactgcatcagctgcgccagcatctgcggccagcaccccaagcagtgcgcctacttctgcgagaacaagctgagaagccccgtgaacctgccccccgagctgagaagacagagaagcggcgaggtggagaacaacagcgacaacagcggcagataccagggcctggagcacagaggcagcgaggccagccccgccctgcccggcctgaagctgagcgccgaccaggtggccctggtgtacagcaccctgggcctgtgcctgtgcgccgtgctgtgctgcttcctggtggccgtggcctgcttcctgaagaagagaggcgacccctgcagctgccagcccagaagcagacccagacagagccccgccaagagcagccaggaccacgccatggaggccggcagccccgtgagcaccagccccgagcccgtggagacctgcagcttctgcttccccgagtgcagagcccccacccaggagagcgccgtgacccccggcacccccgaccccacctgcgccggcagaaagaccaagcccccccccgtgctgaccgccggcaactgcggcgtgcacagacccccccccgagaccagcaccggcagccccagaggccagagactgctgtggacccagtag

SEQ ID NO: 174533 - DNA, 882 bp, Artificial Sequence
  derived and/or modified sequence
atgagcggcttggggcgatctagacgcggggggcgcagtagagtcgatcaggaggaacggttccctcaggggctctggacaggggtggctatgaggtcttgtccggaggagcaatattgggaccctttgctgggtacatgtatgagctgcaaaacaatttgcaatcatcagtcgcagcggacctgtgcagccttttgccgatcgctgtcttgcaggaaagagcagggaaagttctatgatcatctgttacgcgattgcataagctgtgctagcatatgtggacagcatcccaaacaatgcgcatacttctgcgaaaataagcttcgcagtcctgtaaatctgccacccgagctgaggagacaacggtcaggtgaagtggagaataattcagataattcaggccgttatcaggggttagagcaccgcggaagcgaggccagcccggccctgcctggcctgaaactgtccgctgaccaagtggccctggtctactcaacactcggactgtgcctgtgtgctgtcctctgttgtttcctggttgccgtggcctgttttctcaagaagaggggggatccatgcagttgtcagcctcgctctcggcctcggcaatctcccgccaagtccagtcaggatcacgccatggaagccgggtcacctgtttctaccagccccgagcctgtggaaacgtgctctttctgtttcccagaatgtcgtgctcccacacaggaatcggcggtcacgccaggaacccctgacccgacttgtgccgggcggtggggatgccacactagaaccactgtcctccaaccatgtccacacatccctgactccggattaggcatcgtgtgtgtgccagctcaggagggaggacccggtgcgtag

SEQ ID NO: 174534 - DNA, 747 bp, Artificial Sequence
  derived and/or modified sequence
atgagcgggcttgggagaagtcgacgcgggggtaggtctcgtgttgaccaggaggagcgttggtccctgtcatgcagaaaggaacaaggtaaattctatgaccatcttttgagagactgtatatcgtgtgccagtatatgcggtcaacatccaaagcagtgcgcctatttttgcgagaataagctgagatccccggtcaacttaccccccgaattgcggagacagaggagcggcgaagtggagaacaacagtgataactcagggagataccagggtctggaacaccgcgggagcgaagcatcaccagcgctaccaggcctgaaactgagcgctgaccaggtagcactcgtctactcaactttgggtttatgtctctgcgctgttttatgctgctttctcgtggctgtcgcttgtttcttgaaaaagcgcggcgatccatgttcctgccagccccgctcaaggcctcgacaatcccccgctaaatctagccaggatcacgccatggaggccgggtcacctgtgagcaccagtccagagccagtcgagacgtgtagtttctgcttccccgaatgtagggcccccacccaagagagtgcagttactccggggactcccgacccaacctgtgctggccgcaaaaccaagcctccccccgtcctcactgcaggtaattgtggagtgcacaggcccccaccagaaacctcaaccggatccccccgcgggcagaggttgctctggacccagtag

SEQ ID NO: 174535 - DNA, 882 bp, Artificial Sequence
  derived and/or modified sequence
atgagcggcctgggccgcagccggcggggcggccgcagccgggtggaccaggaggagcgcttcccccagggcctgtggacaggagtggccatgaggagctgcccagaggagcagtactgggaccccctgctgggcacctgcatgagctgcaagaccatctgcaaccaccagagccagaggacctgtgccgccttctgccgcagcctgagctgcaggaaggagcagggcaagttctatgaccacctgctgcgggactgcatcagctgtgccagcatctgtggccagcaccccaagcagtgtgcctacttctgtgagaacaagctgcggagccctgtgaacctgcccccagagctgcggcggcagaggtctggagaggtggagaacaacagcgacaacagcggccgctaccagggcctggagcaccggggcagcgaggccagccctgccctgcccggcctgaagctgtctgctgaccaggtggccctggtgtacagcaccctgggcctgtgcctgtgtgctgtgctgtgctgcttcctggtggccgtggcctgcttcctgaagaagagaggagacccctgcagctgccagcccaggagccggccccggcagagccctgccaagagcagccaggaccacgccatggaggccggcagccctgtgtccaccagccctgagcctgtggagacctgcagcttctgcttccctgagtgccgggcccccacccaggagagcgctgtgaccccaggcaccccagaccccacctgtgccggccgctggggctgccacaccaggaccaccgtgctgcagccctgcccccacatcccagattctggcctgggcatcgtgtgtgtgcctgcccaggagggcggccctggggcctag

SEQ ID NO: 174536 - DNA, 747 bp, Artificial Sequence
  derived and/or modified sequence
atgagcggcctgggccgcagccggcggggcggccgcagccgggtggaccaggaggagcgctggagcctgagctgcaggaaggagcagggcaagttctatgaccacctgctgcgggactgcatcagctgtgccagcatctgtggccagcaccccaagcagtgtgcctacttctgtgagaacaagctgcggagccctgtgaacctgcccccagagctgcggcggcagaggtctggagaggtggagaacaacagcgacaacagcggccgctaccagggcctggagcaccggggcagcgaggccagccctgccctgcccggcctgaagctgtctgctgaccaggtggccctggtgtacagcaccctgggcctgtgcctgtgtgctgtgctgtgctgcttcctggtggccgtggcctgcttcctgaagaagagaggagacccctgcagctgccagcccaggagccggccccggcagagccctgccaagagcagccaggaccacgccatggaggccggcagccctgtgtccaccagccctgagcctgtggagacctgcagcttctgcttccctgagtgccgggcccccacccaggagagcgctgtgaccccaggcaccccagaccccacctgtgccggcaggaagaccaagcccccacctgtgctgacagctggcaactgtggggtgcaccggcccccacctgagaccagcacaggcagcccccggggccagaggctgctgtggacccagtag

SEQ ID NO: 174537 - DNA, 882 bp, Artificial Sequence
  derived and/or modified sequence
atgagcggcctgggccggagccggcggggcggccggagccgggtggaccaggaagagagattccctcagggactgtggactggtgtcgccatgcgctcttgccctgaggagcagtactgggatccgctgctcgggacatgcatgagctgtaagaccatctgtaatcaccagagtcaacgcacctgtgccgctttctgcaggagtctgtcctgccggaaagagcagggaaagttttacgaccatctgttgcgtgattgtattagttgtgcaagtatctgcggccagcaccctaagcagtgcgcctatttctgcgagaataaactccggtctccagtgaacctccctccagagctgcggaggcagaggtctggcgaagttgagaacaactctgacaacagcgggcgctaccagggcctagaacacagaggctcagaagcctccccggctctgcccgggctgaagcttagtgccgatcaggtggccctggtctattcaaccctcggcctatgtctctgcgccgttctatgctgcttcctggttgctgtcgcatgttttcttaagaaacggggagatccatgcagctgccagcccaggtctcggcccagacagagccctgcgaaatcttctcaggaccacgcaatggaggccggaagccccgtgtcaacctcaccagagcctgtagagacgtgctcattttgttttcctgagtgcagggctcctactcaggagtccgcggttacaccaggcacacctgatccaacctgcgcagggcgctggggatgtcacactcgtactacagttctccaaccttgccctcatatcccagattctggactagggattgtctgtgttccagcccaggagggcggtcccggtgcctag

SEQ ID NO: 174538 - DNA, 747 bp, Artificial Sequence
  derived and/or modified sequence
atgagcggcctgggccggagccggcggggcggccggagccgggtggatcaggaagagaggtggagcctgagctgcagaaaggaacagggtaagttttatgatcatttgctgcgcgactgtatatcttgtgccagtatctgcggtcagcatcctaagcagtgtgcttatttttgtgagaacaagttaaggagcccagttaatcttccacccgagctgcggagacaacggagtggcgaagttgaaaataacagcgacaattctggaaggtatcaaggtctggagcaccggggaagtgaggccagccccgccttaccaggtctgaagctaagcgctgaccaggtcgccttggtgtattccactcttgggctgtgcctgtgtgccgtgctctgctgttttctcgtcgctgtcgcctgcttcttgaaaaaaaggggcgacccttgttcttgtcaaccacggtcccgcccacggcagagccccgcaaagtcatcgcaagatcatgccatggaggcaggaagcccagtatccacatcgcccgaacctgtcgaaacttgcagcttctgtttccctgagtgtagagcacccacacaggagtcagctgttacacctggaaccccagaccctacctgtgccggccgcaaaaccaaaccacctccagtgctgaccgctggcaattgcggtgtacatcgccctcctcccgagacaagtaccggaagcccacgaggacaacgcttgctttggacccagtag

SEQ ID NO: 174539 - DNA, 882 bp, Artificial Sequence
  derived and/or modified sequence
atgagcggattaggaaggagcagacgcggaggcaggtcaagggtcgatcaagaggagcgcttccctcagggcctgtggacgggggttgcaatgaggtcatgccctgaagaacagtattgggatccccttcttggtacatgcatgtcctgtaagacaatatgcaaccaccagtcccagagaacctgtgccgctttctgcaggagtctgagctgtcgaaaggagcaaggcaagttctatgaccatctgctgcgggactgcatcagttgtgcttcaatctgcggccaacacccaaagcaatgcgcatacttttgtgagaacaaattaaggtcgcccgtgaatctgccgccagagttaaggcggcagcgaagcggggaggttgaaaacaattccgacaacagtggacgctaccaaggactggagcacagggggtctgaggcctctcccgctttgccgggactcaagctgtctgctgaccaagtggctctggtatacagtactctaggcttgtgtctgtgtgccgtcctatgctgtttccttgtggccgtagcttgcttcctgaaaaagcgcggtgatccatgttcatgccaacccaggtcccgacccaggcaaagtcctgctaagagttcccaggatcacgctatggaagcaggatctcctgtatccacaagcccagaaccagtggagacttgtagcttctgtttccccgaatgtcgggctccaacgcaggagtcagccgtcacgccaggtacgccagatccaacgtgtgctggaaggtggggctgccacactcgaactaccgtgctgcagccatgtcctcatattcctgacagcggcctgggcatagtttgtgtaccagctcaagagggcggtccgggagcatag

SEQ ID NO: 174540 - DNA, 747 bp, Artificial Sequence
  derived and/or modified sequence
atgtccggactgggcagatcaagacgcggaggcagaagtcgggtggaccaggaagagaggtggagtctctcgtgcaggaaggagcaaggaaagttttacgatcacctgctacgcgattgcatatcctgtgctagcatttgcggacaacacccaaagcagtgcgcctacttttgcgagaacaagctgagatcaccagttaacctgccgcctgaactgcgcagacagcggagtggcgaggtcgaaaataattcagacaacagtggacgctaccaaggtttagaacatcgcggtagcgaggcgtctcctgctctcccgggtctcaagttatccgccgaccaggtggccttggtgtactcaacacttggactatgtctgtgtgctgtgctctgctgttttttggtggctgtagcgtgcttccttaagaagcggggagacccttgtagctgccagccaaggtctcggcctcgccagtccccagccaagagttcacaggaccatgccatggaggctggaagcccagtctctactagtcctgagccagtggaaacatgctccttctgttttcccgagtgccgtgcgccaacgcaggagagcgccgtgaccccagggacaccagaccctacctgcgctggacgaaagactaaacctccaccagttctgaccgccggaaactgtggggtgcaccgacctccaccggagacttccacgggctcacctcgcggtcagcgcctgctatggactcagtag

SEQ ID NO: 174541 - DNA, 1357 bp, Artificial Sequence
  derived and/or modified sequence
agcatcctgagtaatgagtggcctgggccggagcaggcgaggtggccggagccgtgtggaccaggaggagcgctttccacagggcctgtggacgggggtggctatgagatcctgccccgaagagcagtactgggatcctctgctgggtacctgcatgtcctgcaaaaccatttgcaaccatcagagccagcgcacctgtgcagccttctgcaggtcactcagctgccgcaaggagcaaggcaagttctatgaccatctcctgagggactgcatcagctgtgcctccatctgtggacagcaccctaagcaatgtgcatacttctgtgagaacaagctcaggagcccagtgaaccttccaccagagctcaggagacagcggagtggagaagttgaaaacaattcagacaactcgggaaggtaccaaggattggagcacagaggctcagaagcaagtccagctctcccggggctgaagctgagtgcagatcaggtggccctggtctacagcacgctggggctctgcctgtgtgccgtcctctgctgcttcctggtggcggtggcctgcttcctcaagaagaggggggatccctgctcctgccagccccgctcaaggccccgtcaaagtccggccaagtcttcccaggatcacgcgatggaagccggcagccctgtgagcacatcccccgagccagtggagacctgcagcttctgcttccctgagtgcagggcgcccacgcaggagagcgcagtcacgcctgggacccccgaccccacttgtgctggaaggtgggggtgccacaccaggaccacagtcctgcagccttgcccacacatcccagacagtggccttggcattgtgtgtgtgcctgcccaggaggggggcccaggtgcataaatgggggtcagggagggaaaggaggagggagagagatggagaggaggggagagagaaagagaggtggggagaggggagagagatatgaggagagagagacagaggaggcagagagggagagaaacagaggagacagagagggagagagagacagagggagagagagacagaggggaagagaggcagagagggaaagaggcagagaaggaaagagacaggcagagaaggagagaggcagagagggagagaggcagagagggagagaggcagagagacagagagggagagagggacagagagagatagagcaggaggtcggggcactctgagtcccagttcccagtgcagctgtaggtcgtcatcacctaaccacacgtgcaataaagtcctcgtgcctgctgctcacagcccccgagagcccctcctcctggagaataaaacctttggcagctgcccttcctc

SEQ ID NO: 174542 - DNA, 1397 bp, Artificial Sequence
  derived and/or modified sequence
tcctgagtaatgagtggcctgggccggagcaggcgaggtggccggagccgtgtggaccaggaggagcgctggtcactcagctgccgcaaggagcaaggcaagttctatgaccatctcctgagggactgcatcagctgtgcctccatctgtggacagcaccctaagcaatgtgcatacttctgtgagaacaagctcaggagcccagtgaaccttccaccagagctcaggagacagcggagtggagaagttgaaaacaattcagacaactcgggaaggtaccaaggattggagcacagaggctcagaagcaagtccagctctcccggggctgaagctgagtgcagatcaggtggccctggtctacagcacgctggggctctgcctgtgtgccgtcctctgctgcttcctggtggcggtggcctgcttcctcaagaagaggggggatccctgctcctgccagccccgctcaaggccccgtcaaagtccggccaagtcttcccaggatcacgcgatggaagccggcagccctgtgagcacatcccccgagccagtggagacctgcagcttctgcttccctgagtgcagggcgcccacgcaggagagcgcagtcacgcctgggacccccgaccccacttgtgctggaaggaaaacgaagccccctcctgtattgacagctgggaattgtggagtccaccgtcctccacctgagacgagcacagggtctccacgaggacagaggctgctttggactcaatagaaaactgggcatcttcatggtcctagaaggatcccaggaggctgatcctatagagacgtctggttcctgaccccaactgcctccaggtgcctggaacagcccatcgtgggccctttaccctcagcaggtggacgccgttggtcctgccagggcaagatggagatggatgagcacccggatatcctgcccacccaggggcaaggcaacatcatcattactaagtatgagcagggacgctgagctggggcagcagtggacacagagcatgagcgtgttgacatctggaaattcaccagtcgtctctgggttgtgtgtgagacagagctgcccgtgtcagtgccctggaggtgaagggaagagcctgtgcctgctgcgtgggagactggtccagggacagggaatcaggagtggttgcaaaggtgtcaggaaataaaatgtactgacaagtggctgaagatgcttggagactggccaaaatataagaacagcaagaagctgggcacggtggcgggcacctgtaatcccagctactcaggaggctgaggcacgagaattgcttgaacccaggcagtggaggttgcagtgagccaagatcgcaccactgaactccagcctgggcgacaagagggagacttcatctc

SEQ ID NO: 174543 - protein, 447 aa, Artificial Sequence
  derived and/or modified sequence
MELSQMSELMGLSVLLGLLALMATAAVARGWLRAGEERSGRPACQKANGFPPDKSSGSKKQKQYQRIRKEKPQQHNFTHRLLAAALKSHSGNISCMDFSSNGKYLATCADDRTIRIWSTKDFLQREHRSMRANVELDHATLVRFSPDCRAFIVWLANGDTLRVFKMTKREDGGYTFTATPEDFPKKHKAPVIDIGIANTGKFIMTASSDTTVLIWSLKGQVLSTINTNQMNNTHAAVSPCGRFVASCGFTPDVKVWEVCFGKKGEFQEVVRAFELKGHSAAVHSFAFSNDSRRMASVSKDGTWKLWDTDVEYKKKQDPYLLKTGRFEEAAGAAPCRLALSPNAQVLALASGSSIHLYNTRRGEKEECFERVHGECIANLSFDITGRFLASCGDRAVRLFHNTPGHRAMVEEMQGHLKRASNESTRQRLQQQLTQAQETLKSLGALKK

SEQ ID NO: 174544 - protein, 446 aa, Artificial Sequence [sequence omitted]

SEQ ID NO: 174545 - DNA, 1344 bp, Artificial Sequence
  derived and/or modified sequence
atggagctgagccagatgagcgagctgatgggcctgagcgtgctgctgggcctgctggccctgatggccaccgccgccgtggccagaggctggctgagagccggcgaggagagaagcggcagacccgcctgccagaaggccaacggcttcccccccgacaagagcagcggcagcaagaagcagaagcagtaccagagaatcagaaaggagaagccccagcagcacaacttcacccacagactgctggccgccgccctgaagagccacagcggcaacatcagctgcatggacttcagcagcaacggcaagtacctggccacctgcgccgacgacagaaccatcagaatctggagcaccaaggacttcctgcagagagagcacagaagcatgagagccaacgtggagctggaccacgccaccctggtgagattcagccccgactgcagagccttcatcgtgtggctggccaacggcgacaccctgagagtgttcaagatgaccaagagagaggacggcggctacaccttcaccgccacccccgaggacttccccaagaagcacaaggcccccgtgatcgacatcggcatcgccaacaccggcaagttcatcatgaccgccagcagcgacaccaccgtgctgatctggagcctgaagggccaggtgctgagcaccatcaacaccaaccagatgaacaacacccacgccgccgtgagcccctgcggcagattcgtggccagctgcggcttcacccccgacgtgaaggtgtgggaggtgtgcttcggcaagaagggcgagttccaggaggtggtgagagccttcgagctgaagggccacagcgccgccgtgcacagcttcgccttcagcaacgacagcagaagaatggccagcgtgagcaaggacggcacctggaagctgtgggacaccgacgtggagtacaagaagaagcaggacccctacctgctgaagaccggcagattcgaggaggccgccggcgccgccccctgcagactggccctgagccccaacgcccaggtgctggccctggccagcggcagcagcatccacctgtacaacaccagaagaggcgagaaggaggagtgcttcgagagagtgcacggcgagtgcatcgccaacctgagcttcgacatcaccggcagattcctggccagctgcggcgacagagccgtgagactgttccacaacacccccggccacagagccatggtggaggagatgcagggccacctgaagagagccagcaacgagagcaccagacagagactgcagcagcagctgacccaggcccaggagaccctgaagagcctgggcgccctgaagaagtag

SEQ ID NO: 174546 - DNA, 1341 bp, Artificial Sequence
  derived and/or modified sequence
atggagctgagccagatgagcgagctgatgggcctgagcgtgctgctgggcctgctggccctgatggccaccgccgccgtggccagaggctggctgagagccggcgaggagagaagcggcagacccgcctgccagaaggccaacggcttcccccccgacaagagcagcggcagcaagaagcagaagcagtaccagagaatcagaaaggagaagccccagcagcacaacttcacccacagactgctggccgccgccctgaagagccacagcggcaacatcagctgcatggacttcagcagcaacggcaagtacctggccacctgcgccgacgacagaaccatcagaatctggagcaccaaggacttcctgcagagagagcacagaagcatgagagccaacgtggagctggaccacgccaccctggtgagattcagccccgactgcagagccttcatcgtgtggctggccaacggcgacaccctgagagtgttcaagatgaccaagagagaggacggcggctacaccttcaccgccacccccgaggacttccccaagaagcacaaggcccccgtgatcgacatcggcatcgccaacaccggcaagttcatcatgaccgccagcagcgacaccaccgtgctgatctggagcctgaagggccaggtgctgagcaccatcaacaccaaccagatgaacaacacccacgccgccgtgagcccctgcggcagattcgtggccagctgcggcttcacccccgacgtgaaggtgtgggaggtgtgcttcggcaagaagggcgagttccaggaggtggtgagagccttcgagctgaagggccacagcgccgccgtgcacagcttcgccttcagcaacgacagcagaagaatggccagcgtgagcaaggacggcacctggaagctgtgggacaccgacgtggagtacaagaagaagcaggacccctacctgctgaagaccggcagattcgaggaggccgccggcgccgccccctgcagactggccctgagccccaacgcccaggtgctggccctggccagcggcagcagcatccacctgtacaacaccagaagaggcgagaaggaggagtgcttcgagagagtgcacggcgagtgcatcgccaacctgagcttcgacatcaccggcagattcctggccagctgcggcgacagagccgtgagactgttccacaacacccccggccacagagccatggtggaggagatgcagggccacctgaagagagccagcaacgagagcaccagacagagactgcagcagcagctgacccaggcccaggtgaccctgggcggccccggcgccgaggactag

SEQ ID NO: 174547 - DNA, 1344 bp, Artificial Sequence
  derived and/or modified sequence
atggaattgtctcaaatgtctgagctgatgggactgtctgtgttattgggattgctggcactcatggccacggcggcagtggccagggggtggctgcgagcaggcgaggaacgtagcggccgaccggcctgtcaaaaggcaaatgggtttccacccgacaagagctcagggtcaaagaagcaaaaacagtatcagagaattaggaaggagaaaccccaacaacacaactttacccataggctgttagccgcggctttaaaatctcactcaggcaatataagttgcatggatttcagcagcaatgggaagtacttggctacttgtgcagacgaccggaccattcgtatctggtctactaaggattttctgcagagggagcataggtctatgagagccaacgtcgaacttgaccacgcgactctcgttaggtttagtcctgattgtagggctttcatcgtctggttagcaaatggggataccctgcgcgtgttcaagatgacaaagcgggaggacgggggatacacgttcactgctacaccagaggatttcccaaagaagcacaaggcaccggtcatcgatatcggcattgctaacactggcaaattcataatgacagccagttctgacacgacagttttaatatggtcactgaaagggcaggtgctgtctacaattaacactaatcagatgaataatacccacgccgctgtgtcgccctgcggaaggtttgtggcatcgtgtggctttaccccagatgttaaagtctgggaggtgtgctttggcaagaagggagagttccaggaagtagtgcgcgcctttgagctgaaggggcactccgctgcagtacactctttcgctttctctaacgactcgcggcgaatggcttccgtctccaaagatggcacctggaagctttgggatactgatgtagaatacaagaaaaagcaggatccctatctactgaaaactggtaggtttgaggaagctgcaggagcggccccgtgcagactcgcactctctccaaatgctcaggtgcttgcgctggcaagcggcagttctatccacctatacaatacacgaaggggggaaaaagaggaatgctttgaacgggttcacggagagtgcatcgccaacctgtcttttgatattaccggcagatttctcgccagctgcggcgatcgagcagtcagacttttccacaacactcccgggcaccgagcaatggtcgaggaaatgcaaggccacttaaagcgggccagtaatgaatctactagacagcggttacagcaacagttgacgcaggctcaggaaaccctgaagagcctgggcgcccttaagaagtag

SEQ ID NO: 174548 - DNA, 1341 bp, Artificial Sequence
  derived and/or modified sequence
atggaactaagtcaaatgtccgagcttatggggctttccgtgctgttgggcctgctggcactcatggcgaccgccgccgttgcccgcggctggcttcgggccggggaggagcgatcagggaggccagcatgccagaaagccaacgggttccctccagataaaagcagtggatcaaaaaaacagaagcaataccagagaattcgaaaagaaaaaccacagcagcataatttcacccataggctcctggccgccgcactgaagtcgcactcaggaaacatttcctgtatggacttttcaagcaacggaaaatatttagccacttgtgccgatgacaggaccatacgcatttggtccactaaggatttcctgcaaagagagcatagaagtatgagagcaaacgtggagctggaccatgcaacactggtgaggttttcgcccgactgtcgggcctttattgtttggctggcaaacggagatactttacgcgtgttcaagatgaccaaaagggaagatggcggttacacttttacagctaccccagaagacttcccaaaaaaacacaaggcgcctgttatagacatcggcattgctaacacggggaagttcatcatgacagcctcttccgacaccactgtgttaatctggtcgcttaagggacaggtgctcagtaccatcaacacaaaccagatgaacaacacacacgcagcagtgtcaccttgtggacggttcgtggccagttgtggatttactcctgacgtcaaggtctgggaggtgtgtttcggcaaaaagggggaattccaggaagtcgttcgagctttcgagcttaaaggccattcagctgccgtccactcctttgctttctcaaatgactctaggagaatggcatcagtgagcaaggatggaacctggaaactttgggacaccgatgtcgagtataagaaaaagcaggatccatacctgcttaaaacaggtagattcgaggaagcagctggcgcagcgccttgtcggctggctttaagtccaaatgcccaggtgcttgcacttgcctccgggtcttcaattcacttgtataacacccgacgcggagagaaagaggagtgcttcgagagggtgcacggcgaatgtattgctaacctttcgttcgatataacgggccgattcctggctagttgtggagaccgagcagtgagactgttccacaacacccctgggcaccgtgccatggtcgaagaaatgcaggggcaccttaagcgggcatccaatgaatcgactcgtcagcgcctgcagcagcagttgactcaggcgcaggtgaccctgggcggtccaggggctgaagattag

SEQ ID NO: 174549 - DNA, 1344 bp, Artificial Sequence
  derived and/or modified sequence
atggagctgagccagatgtctgagctgatgggcctgtctgtgctgctgggcctgctggccctgatggccacagctgctgtggcccggggctggctgcgggccggggaggagaggagcggccggcctgcctgccagaaggccaacggcttccccccagacaagagcagcggcagcaagaagcagaagcagtaccagaggatcaggaaggagaagccccagcagcacaacttcacccaccggctgctggccgccgccctgaagagccacagcggcaacatcagctgcatggacttcagcagcaatggcaagtacctggccacctgtgctgatgacaggaccatccgcatctggagcaccaaggacttcctgcagcgggagcaccgctccatgagggccaacgtggagctggaccacgccaccctggtgcgcttctccccagactgccgggccttcatcgtgtggctggccaatggagacaccctgcgggtcttcaagatgaccaagcgggaggatggcggctacaccttcaccgccaccccagaggacttccccaagaagcacaaggcccctgtgattgacatcggcatcgccaacacaggcaagttcatcatgacagccagcagtgacaccaccgtgctgatctggagcctgaagggccaggtgctgagcaccatcaacaccaaccagatgaacaacacccatgctgctgtgagcccctgtggccgctttgtggccagctgtggcttcaccccagatgtgaaggtgtgggaggtgtgcttcggcaagaagggggagttccaggaggtggtgcgggcctttgagctgaagggccacagcgctgctgtgcacagctttgccttcagcaatgacagcaggaggatggcctctgtgtccaaggatggcacctggaagctgtgggacacagatgtggagtacaagaagaagcaggacccctacctgctgaagacaggccgctttgaggaggccgccggggccgccccctgccgcctggccctgagccccaatgcccaggtgctggccctggccagcggcagcagcatccacctgtacaacacccggcggggggagaaggaggagtgctttgagcgggtgcacggggagtgcatcgccaacctgagctttgacatcaccggccgcttcctggccagctgtggggacagagctgtgcggctcttccacaacaccccaggccaccgggccatggtggaggagatgcagggccacctgaagagggccagcaatgaaagcacccggcagaggctgcagcagcagctgacccaggcccaggagaccctgaagagcctgggcgccctgaagaagtag

SEQ ID NO: 174550 - DNA, 1341 bp, Artificial Sequence
  derived and/or modified sequence
atggagctgagccagatgtctgagctgatgggcctgtctgtgctgctgggcctgctggccctgatggccacagctgctgtggcccggggctggctgcgggccggggaggagaggagcggccggcctgcctgccagaaggccaacggcttccccccagacaagagcagcggcagcaagaagcagaagcagtaccagaggatcaggaaggagaagccccagcagcacaacttcacccaccggctgctggccgccgccctgaagagccacagcggcaacatcagctgcatggacttcagcagcaatggcaagtacctggccacctgtgctgatgacaggaccatccgcatctggagcaccaaggacttcctgcagcgggagcaccgctccatgagggccaacgtggagctggaccacgccaccctggtgcgcttctccccagactgccgggccttcatcgtgtggctggccaatggagacaccctgcgggtcttcaagatgaccaagcgggaggatggcggctacaccttcaccgccaccccagaggacttccccaagaagcacaaggcccctgtgattgacatcggcatcgccaacacaggcaagttcatcatgacagccagcagtgacaccaccgtgctgatctggagcctgaagggccaggtgctgagcaccatcaacaccaaccagatgaacaacacccatgctgctgtgagcccctgtggccgctttgtggccagctgtggcttcaccccagatgtgaaggtgtgggaggtgtgcttcggcaagaagggggagttccaggaggtggtgcgggcctttgagctgaagggccacagcgctgctgtgcacagctttgccttcagcaatgacagcaggaggatggcctctgtgtccaaggatggcacctggaagctgtgggacacagatgtggagtacaagaagaagcaggacccctacctgctgaagacaggccgctttgaggaggccgccggggccgccccctgccgcctggccctgagccccaatgcccaggtgctggccctggccagcggcagcagcatccacctgtacaacacccggcggggggagaaggaggagtgctttgagcgggtgcacggggagtgcatcgccaacctgagctttgacatcaccggccgcttcctggccagctgtggggacagagctgtgcggctcttccacaacaccccaggccaccgggccatggtggaggagatgcagggccacctgaagagggccagcaatgaaagcacccggcagaggctgcagcagcagctgacccaggcccaggtgaccctgggcggccctggagcagaagattag

SEQ ID NO: 174551 - DNA, 1344 bp, Artificial Sequence
  derived and/or modified sequence
atggagctgagccagatgagcgagctgatgggcctgagcgtgctgctgggcctgcttgcacttatggctactgccgcagtcgcacgaggctggctgcgggccggagaggagcgctccggaaggcccgcctgtcagaaagccaacggctttcccccagataagagctcggggtccaaaaagcaaaagcagtaccagagaatccgtaaggaaaagcctcagcagcacaattttactcacaggctgctggctgcagcacttaaatcacattccggtaatatttcctgtatggactttagctcaaatggaaagtacctagccacctgcgctgatgatcgaaccatacgcatatggagcaccaaggactttctgcaacgagagcatagaagcatgagagccaacgttgagctggatcatgcgactctcgtcaggttctccccagactgcagagcttttatagtgtggcttgcgaacggagacaccctgcgcgtgttcaagatgactaagagagaggatggcggctacacctttactgcgactcctgaagactttccaaagaagcacaaggccccagtgatcgacatcggcatcgccaacactggcaaattcatcatgaccgcgtcatccgataccaccgttcttatctggagtctcaaagggcaggtactctcaacaatcaacaccaaccaaatgaacaacactcacgccgccgtctccccatgcggccgtttcgtggcttcctgcgggtttacccccgatgtgaaagtgtgggaagtgtgcttcgggaaaaaaggcgaatttcaggaagtcgtccgcgctttcgaactcaagggtcactctgcagcagtccactcattcgccttttccaacgatagccgaaggatggctagcgtgtctaaagatggtacatggaagctatgggataccgacgttgagtataaaaagaaacaagacccatacctgctgaaaacagggagatttgaagaagccgccggggccgctccctgcaggctcgctctgagcccaaatgcacaggtgcttgccctggccagtggaagttccatccatctgtacaatacccgacgaggcgagaaggaagagtgctttgagcgcgtgcacggagaatgcattgctaatctgtccttcgatatcacaggtagattcctggcctcctgcggagaccgagcagtccggttgttccacaacactcctggtcatagggcgatggttgaggagatgcaaggccacctaaaaagggcctcgaatgaaagtactagacagagactacaacagcagcttacccaggcacaagaaaccctcaagagcttgggcgcccttaaaaagtag

SEQ ID NO: 174552 - DNA, 1341 bp, Artificial Sequence
  derived and/or modified sequence
atggagctgagccagatgagcgagctgatgggcctgagcgtgctgctcggtctcctggcacttatggctactgcagccgtcgccagagggtggcttcgggctggtgaagaacgaagtggtaggccagcctgccagaaggccaatgggtttcctccggataagtcaagcgggtccaagaaacagaagcagtaccagagaattcgaaaggagaaacctcagcagcacaacttcacccaccgcttacttgccgcggcactcaagtctcacagcggcaatatcagttgtatggacttttcctcaaatgggaagtatcttgcaacatgcgccgacgatcggacaattcgaatttggagcacaaaggattttcttcagcgcgaacacaggagcatgcgggccaacgtggaacttgatcatgccaccttggtgcgattttccccagactgtagagccttcatagtgtggttggccaacggggatacactgagagtcttcaagatgaccaaaagggaggacggaggctatacgttcactgcaactccggaagatttccctaagaaacataaagctccagtgattgacatagggattgctaacactggcaaatttattatgacggcgagctctgacacaacagtgctgatctggagcctcaaaggccaggtcctaagcactattaacacaaaccagatgaataacacgcatgctgcagtgtctccttgcggaaggttcgttgcctcctgcgggttcacgccagacgtgaaggtctgggaggtttgcttcggcaagaaaggcgagtttcaggaagtcgtgcgcgcattcgaacttaaagggcattctgcggcagtgcactcattcgccttttccaatgacagcagaagaatggcctcagtgagtaaggatggcacctggaagctatgggatacggacgtggaatacaaaaagaaacaggatccgtacctgctaaagacggggaggttcgaggaggctgctggggcagctccctgccggttggctctctctcctaacgcacaggtgttggccctggcctcaggctcttccatccatctgtataatacccgacggggagagaaagaggagtgcttcgaacgggtgcatggtgagtgtatcgcaaacctatcattcgatatcaccgggagatttcttgctagctgcggggacagggcggtgcgcttgttccacaataccccagggcatagggcaatggttgaggagatgcagggacatctgaagcgggcttcaaacgagtccactcgccaacggctgcagcagcagttgacccaggcccaagtgacactgggcggccctggtgcggaagactag

SEQ ID NO: 174553 - DNA, 1344 bp, Artificial Sequence
  derived and/or modified sequence
atggaacttagccagatgagcgagctcatgggcctgtcagtgctgctgggactgctggctctgatggcgacagctgccgttgcacggggttggttaagagctggcgaggagaggagcggacgccctgcctgtcagaaagctaatggttttccccctgacaagagttcaggtagtaagaagcagaagcagtatcagcgcattcgcaaagagaagcctcagcagcacaattttacccaccgtctcttggcggctgctctgaagtcccacagtggtaatatttcatgtatggatttttctagcaacggtaagtacctggctacatgcgccgatgatagaacgattcgcatctggtccaccaaggatttcctgcaacgggaacatcgttctatgcgtgctaatgtcgaattggatcacgccaccttggtgcggttcagtcctgactgtagagcctttattgtctggttagctaatggagacacgttacgagtcttcaaaatgactaaaagagaggatggaggatacaccttcactgctactccggaggatttccctaaaaaacacaaggccccagtaatcgatatcggcattgctaatactggcaaattcattatgaccgcatcatcagacactactgtgctgatctggagtctgaagggccaggtcctaagcactattaacacaaatcagatgaacaacactcacgctgccgtaagtccctgcggcaggtttgtggctagctgcgggttcactcccgatgtgaaagtctgggaggtgtgctttgggaaaaagggtgagtttcaggaggtggtccgagcctttgaactcaagggtcactcagcagccgttcacagcttcgccttttctaacgatagtagaaggatggcatctgtgtcaaaggatggcacatggaagctttgggacactgatgtagaatataaaaaaaaacaggatccatacctactgaagacaggcagatttgaggaggcggcaggagccgcaccatgtcgcctggcactctcaccgaacgctcaggtgcttgccttggcatccggcagctccattcatttatataacacgcggaggggtgagaaggaggaatgcttcgagcgtgttcatggagaatgcatcgcaaacttgagtttcgacatcacggggcgtttcctagccagctgtggggaccgggctgtgcggcttttccacaatactcccggtcacagagccatggtcgaggagatgcagggtcacctaaaacgggcaagcaatgagagcacacgccagaggcttcagcagcagctaacccaggcccaggagactttgaaatctctgggagctctcaagaaatag

SEQ ID NO: 174554 - DNA, 1341 bp, Artificial Sequence
  derived and/or modified sequence
atggagctgtcacagatgtctgaactgatgggattgtccgtccttctcggcctgcttgccttgatggcaacagcagccgttgcacggggatggctgagagctggagaagagaggagcggaagaccagcctgccagaaggctaatgggttccccccagacaagagttcagggagtaagaagcagaaacagtaccagcggatccggaaggagaagccacagcagcacaattttacacatagactactggcagcagccctaaaatctcattctgggaacatctcgtgcatggatttctcatcaaatggcaagtacttagctacgtgcgccgacgacaggacgatcagaatttggagtactaaagattttctccagagagagcatcgctcgatgagagcgaatgtcgagctggatcatgccactctggtgcgattctctcccgactgccgtgcgttcatcgtctggcttgccaatggtgacacactgcgggtgttcaaaatgacaaagcgagaagacggagggtatactttcactgccacccctgaagacttccccaaaaaacataaagccccagtcattgacataggcatcgccaataccggtaaatttatcatgactgcaagctctgatactacggtcttaatctggtcccttaaggggcaggtcctcagtacaatcaacactaatcagatgaacaatacacatgctgcggtttccccgtgcgggagattcgtggcaagttgcggtttcacacccgatgtgaaggtctgggaggtgtgctttgggaagaagggcgagtttcaggaagtggtgagagcgttcgaactgaagggccacagcgcagcagtgcactcttttgcgttttccaacgatagccgtaggatggccagcgtctccaaggacggtacttggaaactatgggatacagatgtcgagtacaaaaagaaacaagacccttatctgttgaaaacaggcaggttcgaagaggctgcgggagctgccccatgtaggttggctctctccccaaacgcgcaggtgttagccctggcatcaggttccagcattcatctttataacacaaggaggggagagaaggaggagtgcttcgaacgggtccatggtgagtgcatcgctaacctgtcctttgatatcacagggagattcttggcctcttgcggagatagagccgtccgcttgttccacaacactcctggtcaccgggcaatggtagaggagatgcagggacaccttaaaagagcttcaaatgagagcacaaggcagagattacagcaacagttgacgcaggcccaggtgaccctggggggacccggagcggaggactag

SEQ ID NO: 174555 - DNA, 2430 bp, Artificial Sequence
  derived and/or modified sequence
ccaggccccgcccctcgagcgccacaacagccgggccccaccccttgaggtgctttaacggccaggccccgccctgaaggcgttgtaacaaccaggctccgcccccaggcgctctaacggccaggcccagccgcttgaggctccccaacggccaggccgcgcccccgcgtgcgtgcgcggcccggcagagccgtgcgggcgcccgcgtactcactagctgaggtggcagtggttccaccaacatggagctctcgcagatgtcggagctcatggggctgtcggtgttgcttgggctgctggccctgatggcgacggcggcggtagcgcgggggtggctgcgcgcgggggaggagaggagcggccggcccgcctgccaaaaagcaaatggatttccacctgacaaatcttcgggatccaagaagcagaaacaatatcagcggattcggaaggagaagcctcaacaacacaacttcacccaccgcctcctggctgcagctctgaagagccacagcgggaacatatcttgcatggactttagcagcaatggcaaatacctggctacctgtgcagatgatcgcaccatccgcatctggagcaccaaggacttcctgcagcgagagcaccgcagcatgagagccaacgtggagctggaccacgccaccctggtgcgcttcagccctgactgcagagccttcatcgtctggctggccaacggggacaccctccgtgtcttcaagatgaccaagcgggaggatgggggctacaccttcacagccaccccagaggacttccctaaaaagcacaaggcgcctgtcatcgacattggcattgctaacacagggaagtttatcatgactgcctccagtgacaccactgtcctcatctggagcctgaagggtcaagtgctgtctaccatcaacaccaaccagatgaacaacacacacgctgctgtatctccctgtggcagatttgtagcctcgtgtggcttcaccccagatgtgaaggtttgggaagtctgctttggaaagaagggggagttccaggaggtggtgcgagccttcgaactaaagggccactccgcggctgtgcactcgtttgctttctccaacgactcacggaggatggcttctgtctccaaggatggtacatggaaactgtgggacacagatgtggaatacaagaagaagcaggacccctacttgctgaagacaggccgctttgaagaggcggcgggtgccgcgccgtgccgcctggccctctcccccaacgcccaggtcttggccttggccagtggcagtagtattcatctctacaatacccggcggggcgagaaggaggagtgctttgagcgggtccatggcgagtgtatcgccaacttgtcctttgacatcactggccgctttctggcctcctgtggggaccgggcggtgcggctgtttcacaacactcctggccaccgagccatggtggaggagatgcagggccacctgaagcgggcctccaacgagagcacccgccagaggctgcagcagcagctgacccaggcccaagagaccctgaagagcctgggtgccctgaagaagtgactctgggagggcccggcgcagaggattgaggaggagggatctggcctcctcatggcactgctgccatctttcctcccaggtggaagcctttcagaaggagtctcctggttttcttactggtggccctgcttcttcccattgaaactactcttgtctacttaggtctctctcttcttgctggctgtgactcctccctgactagtggccaaggtgcttttcttcctcccaggcccagtgggtggaatctgtccccacctggcactgaggagaatggtagagaggagaggagagagagagagaatgtgatttttggccttgtggcagcacatcctcacacccaaagaagtttgtaaatgttccagaacaacctagagaacacctgagtactaagcagcagttttgcaaggatgggagactgggatagcttcccatcacagaactgtgttccatcaaaaagacactaagggatttccttctgggcctcagttctatttgtaagatggagaataatcctctctgtgaactccttgcaaagatgatatgaggctaagagaatatcaagtccccaggtctggaagaaaagtagaaaagagtagtactattgtccaatgtcatgaaagtggtaaaagtgggaaccagtgtgctttgaaaccaaattagaaacacattccttgggaaggcaaagttttctgggacttgatcatacattttatatggttgggacttctctcttcgggagatgatatcttgtttaaggagacctcttttcagttcatcaagttcatcagatatttgagtgcccactctgtgcccaaataaatatgagctggggattaaatacgaa

SEQ ID NO: 174556 - DNA, 2165 bp, Artificial Sequence
  derived and/or modified sequence
gttccaccaacatggagctctcgcagatgtcggagctcatggggctgtcggtgttgcttgggctgctggccctgatggcgacggcggcggtagcgcgggggtggctgcgcgcgggggaggagaggagcggccggcccgcctgccaaaaagcaaatggatttccacctgacaaatcttcgggatccaagaagcagaaacaatatcagcggattcggaaggagaagcctcaacaacacaacttcacccaccgcctcctggctgcagctctgaagagccacagcgggaacatatcttgcatggactttagcagcaatggcaaatacctggctacctgtgcagatgatcgcaccatccgcatctggagcaccaaggacttcctgcagcgagagcaccgcagcatgagagccaacgtggagctggaccacgccaccctggtgcgcttcagccctgactgcagagccttcatcgtctggctggccaacggggacaccctccgtgtcttcaagatgaccaagcgggaggatgggggctacaccttcacagccaccccagaggacttccctaaaaagcacaaggcgcctgtcatcgacattggcattgctaacacagggaagtttatcatgactgcctccagtgacaccactgtcctcatctggagcctgaagggtcaagtgctgtctaccatcaacaccaaccagatgaacaacacacacgctgctgtatctccctgtggcagatttgtagcctcgtgtggcttcaccccagatgtgaaggtttgggaagtctgctttggaaagaagggggagttccaggaggtggtgcgagccttcgaactaaagggccactccgcggctgtgcactcgtttgctttctccaacgactcacggaggatggcttctgtctccaaggatggtacatggaaactgtgggacacagatgtggaatacaagaagaagcaggacccctacttgctgaagacaggccgctttgaagaggcggcgggtgccgcgccgtgccgcctggccctctcccccaacgcccaggtcttggccttggccagtggcagtagtattcatctctacaatacccggcggggcgagaaggaggagtgctttgagcgggtccatggcgagtgtatcgccaacttgtcctttgacatcactggccgctttctggcctcctgtggggaccgggcggtgcggctgtttcacaacactcctggccaccgagccatggtggaggagatgcagggccacctgaagcgggcctccaacgagagcacccgccagaggctgcagcagcagctgacccaggcccaagtgactctgggagggcccggcgcagaggattgaggaggagggatctggcctcctcatggcactgctgccatctttcctcccaggtggaagcctttcagaaggagtctcctggttttcttactggtggccctgcttcttcccattgaaactactcttgtctacttaggtctctctcttcttgctggctgtgactcctccctgactagtggccaaggtgcttttcttcctcccaggcccagtgggtggaatctgtccccacctggcactgaggagaatggtagagaggagaggagagagagagagaatgtgatttttggccttgtggcagcacatcctcacacccaaagaagtttgtaaatgttccagaacaacctagagaacacctgagtactaagcagcagttttgcaaggatgggagactgggatagcttcccatcacagaactgtgttccatcaaaaagacactaagggatttccttctgggcctcagttctatttgtaagatggagaataatcctctctgtgaactccttgcaaagatgatatgaggctaagagaatatcaagtccccaggtctggaagaaaagtagaaaagagtagtactattgtccaatgtcatgaaagtggtaaaagtgggaaccagtgtgctttgaaaccaaattagaaacacattccttgggaaggcaaagttttctgggacttgatcatacattttatatggttgggacttctctcttcgggagatgatatcttgtttaaggagacctcttttcagttcatcaagttcatcagatatttgagtgcccactctgtgcccaaataaatatgagctggggattaaatacg

SEQ ID NO: 174557 - protein, 626 aa, Artificial Sequence
  derived and/or modified sequence
MEGPRENQDPPPRSLARHLSDADRLRKVIQELVDTEKSYVKDLSCLFELYLEPLQNETFLTQDEMESLFGSLPEMLEFQKVFLETLEDGISASSDFNTLETPSQFRKLLFSLGGSFLYYADHFKLYSGFCANHIKVQKVLERAKTDKAFKAFLDARNPTKQHSSTLESYLIKPVQRVLKYPLLLKELVSLTDQESEEHYHLTEALKAMEKVASHINEMQKIYEDYGTVFDQLVAEQSGTEKEVTELSMGELLMHSTVSWLNPFLSLGKARKDLELTVFVFKRAVILVYKENCKLKKKLPSNSRPAHNSTDLDPFKFRWLIPISALQVRLGNPAGTENNSIWELIHTKSEIEGRPETIFQLCCSDSESKTNIVKVIRSILRENFRRHIKCELPLEKTCKDRLVPLKNRVPVSAKLASSRSLKVLKNSSSNEWTGETGKGTLLDSDEGSLSSGTQSSGCPTAEGRQDSKSTSPGKYPHPGLADFADNLIKESDILSDEDDDHRQTVKQGSPTKDIEIQFQRLRISEDPDVHPEAEQQPGPESGEGQKGGEQPKLVRGHFCPIKRKANSTKRDRGTLLKAQIRHQSLDSQSENATIDLNSVLEREFSVQSLTSVVSEECFYETESHGKS

SEQ ID NO: 174558 - protein, 1701 aa, Artificial Sequence
  derived and/or modified sequence
MGNSDSQYTLQGSKNHSNTITGAKQIPCSLKIRGIHAKEEKSLHGWGHGSNGAGYKSRSLARSCLSHFKSNQPYASRLGGPTCKVSRGVAYSTHRTNAPGKDFQGISAAFSTENGFHSVGHELADNHITSRDCNGHLLNCYGRNESIASTPPGEDRKSPRVLIKTLGKLDGCLRVEFHNGGNPSKVPAEDCSEPVQLLRYSPTLASETSPVPEARRGSSADSLPSHRPSPTDSRLRSSKGSSLSSESSWYDSPWGNAGELSEAEGSFLAPGMPDPSLHASFPPGDAKKPFNQSSSLSSLRELYKDANLGSLSPSGIRLSDEYMGTHASLSNRVSFASDIDVPSRVAHGDPIQYSSFTLPCRKPKAFVEDTAKKDSLKARMRRISDWTGSLSRKKRKLQEPRSKEGSDYFDSRSDGLNTDVQGSSQASAFLWSGGSTQILSQRSESTHAIGSDPLRQNIYENFMRELEMSRTNTENIETSTETAESSSESLSSLEQLDLLFEKEQGVVRKAGWLFFKPLVTVQKERKLELVARRKWKQYWVTLKGCTLLFYETYGKNSMDQSSAPRCALFAEDSIVQSVPEHPKKENVFCLSNSFGDVYLFQATSQTDLENWVTAVHSACASLFAKKHGKEDTLRLLKNQTKNLLQKIDMDSKMKKMAELQLSVVSDPKNRKAIENQIQQWEQNLEKFHMDLFRMRCYLASLQGGELPNPKSLLAAASRPSKLALGRLGILSVSSFHALVCSRDDSALRKRTLSLTQRGRNKKGIFSSLKGLDTLARKGKEKRPSITQVDELLHIYGSTVDGVPRDNAWEIQTYVHFQDNHGVTVGIKPEHRVEDILTLACKMRQLEPSHYGLQLRKLVDDNVEYCIPAPYEYMQQQVYDEIEVFPLNVYDVQLTKTGSVCDFGFAVTAQVDERQHLSRIFISDVLPDGLAYGEGLRKGNEIMTLNGEAVSDLDLKQMEALFSEKSVGLTLIARPPDTKATLCTSWSDSDLFSRDQKSLLPPPNQSQLLEEFLDNFKKNTANDFSNVPDITTGLKRSQTDGTLDQVSHREKMEQTFRSAEQITALCRSFNDSQANGMEGPRENQDPPPRSLARHLSDADRLRKVIQELVDTEKSYVKDLSCLFELYLEPLQNETFLTQDEMESLFGSLPEMLEFQKVFLETLEDGISASSDFNTLETPSQFRKLLFSLGGSFLYYADHFKLYSGFCANHIKVQKVLERAKTDKAFKAFLDARNPTKQHSSTLESYLIKPVQRVLKYPLLLKELVSLTDQESEEHYHLTEALKAMEKVASHINEMQKIYEDYGTVFDQLVAEQSGTEKEVTELSMGELLMHSTVSWLNPFLSLGKARKDLELTVFVFKRAVILVYKENCKLKKKLPSNSRPAHNSTDLDPFKFRWLIPISALQVRLGNPAGTENNSIWELIHTKSEIEGRPETIFQLCCSDSESKTNIVKVIRSILRENFRRHIKCELPLEKTCKDRLVPLKNRVPVSAKLASSRSLKVLKNSSSNEWTGETGKGTLLDSDEGSLSSGTQSSGCPTAEGRQDSKSTSPGKYPHPGLADFADNLIKESDILSDEDDDHRQTVKQGSPTKDIEIQFQRLRISEDPDVHPEAEQQPGPESGEGQKGGEQPKLVRGHFCPIKRKANSTKRDRGTLLKAQIRHQSLDSQSENATIDLNSVLEREFSVQSLTSVVSEECFYETESHGKS

SEQ ID NO: 174559 - protein, 1077 aa, Artificial Sequence
  derived and/or modified sequence
MDSKMKKMAELQLSVVSDPKNRKAIENQIQQWEQNLEKFHMDLFRMRCYLASLQGGELPNPKSLLAAASRPSKLALGRLGILSVSSFHALVCSRDDSALRKRTLSLTQRGRNKKGIFSSLKGLDTLARKGKEKRPSITQIFDSSGSHGFSGTQLPQNSSNSSEVDELLHIYGSTVDGVPRDNAWEIQTYVHFQDNHGVTVGIKPEHRVEDILTLACKMRQLEPSHYGLQLRKLVDDNVEYCIPAPYEYMQQQVYDEIEVFPLNVYDVQLTKTGSVCDFGFAVTAQVDERQHLSRIFISDVLPDGLAYGEGLRKGNEIMTLNGEAVSDLDLKQMEALFSEKSVGLTLIARPPDTKATLCTSWSDSDLFSRDQKSLLPPPNQSQLLEEFLDNFKKNTANDFSNVPDITTGLKRSQTDGTLDQVSHREKMEQTFRSAEQITALCRSFNDSQANGMEGPRENQDPPPRSLARHLSDADRLRKVIQELVDTEKSYVKDLSCLFELYLEPLQNETFLTQDEMESLFGSLPEMLEFQKVFLETLEDGISASSDFNTLETPSQFRKLLFSLGGSFLYYADHFKLYSGFCANHIKVQKVLERAKTDKAFKAFLDARNPTKQHSSTLESYLIKPVQRVLKYPLLLKELVSLTDQESEEHYHLTEALKAMEKVASHINEMQKIYEDYGTVFDQLVAEQSGTEKEVTELSMGELLMHSTVSWLNPFLSLGKARKDLELTVFVFKRAVILVYKENCKLKKKLPSNSRPAHNSTDLDPFKFRWLIPISALQVRLGNPAGTENNSIWELIHTKSEIEGRPETIFQLCCSDSESKTNIVKVIRSILRENFRRHIKCELPLEKTCKDRLVPLKNRVPVSAKLASSRSLKVLKNSSSNEWTGETGKGTLLDSDEGSLSSGTQSSGCPTAEGRQDSKSTSPGKYPHPGLADFADNLIKESDILSDEDDDHRQTVKQGSPTKDIEIQFQRLRISEDPDVHPEAEQQPGPESGEGQKGGEQPKLVRGHFCPIKRKANSTKRDRGTLLKAQIRHQSLDSQSENATIDLNSVLEREFSVQSLTSVVSEECFYETESHGKS

SEQ ID NO: 174560 - protein, 1730 aa, Artificial Sequence
  derived and/or modified sequence
MGNSDSQYTLQGSKNHSNTITGAKQIPCSLKIRGIHAKEEKSLHGWGHGSNGAGYKSRSLARSCLSHFKSNQPYASRLGGPTCKVSRGVAYSTHRTNAPGKDFQGISAAFSTENGFHSVGHELADNHITSRDCNGHLLNCYGRNESIASTPPGEDRKSPRVLIKTLGKLDGCLRVEFHNGGNPSKVPAEDCSEPVQLLRYSPTLASETSPVPEARRGSSADSLPSHRPSPTDSRLRSSKGSSLSSESSWYDSPWGNAGELSEAEGSFLAPGMPDPSLHASFPPGDAKKPFNQSSSLSSLRELYKDANLGSLSPSGIRLSDEYMGTHASLSNRVSFASDIDVPSRVAHGDPIQYSSFTLPCRKPKAFVEDTAKKDSLKARMRRISDWTGSLSRKKRKLQEPRSKEGSDYFDSRSDGLNTDVQGSSQASAFLWSGGSTQILSQRSESTHAIGSDPLRQNIYENFMRELEMSRTNTENIETSTETAESSSESLSSLEQLDLLFEKEQGVVRKAGWLFFKPLVTVQKERKLELVARRKWKQYWVTLKGCTLLFYETYGKNSMDQSSAPRCALFAEDSIVQSVPEHPKKENVFCLSNSFGDVYLFQATSQTDLENWVTAVHSACASLFAKKHGKEDTLRLLKNQTKNLLQKIDMDSKMKKMAELQLSVVSDPKNRKAIENQIQQWEQNLEKFHMDLFRMRCYLASLQGGELPNPKSLLAAASRPSKLALGRLGILSVSSFHALVCSRDDSALRKRTLSLTQRGRNKKGIFSSLKGLDTLARKGKEKRPSITQVDELLHIYGSTVDGVPRDNAWEIQTYVHFQDNHGVTVGIKPEHRVEDILTLACKMRQLEPSHYGLQLRKLVDDNVEYCIPAPYEYMQQQVYDEIEVFPLNVYDVQLTKTGSVCDFGFAVTAQVDERQHLSRIFISDVLPDGLAYGEGLRKGNEIMTLNGEAVSDLDLKQMEALFSEKSVGLTLIARPPDTKATLCTSWSDSDLFSRDQKSLLPPPNQSQLLEEFLDNFKKNTANDFSNVPDITTGLKRSQTDGTLDQVSHREKMEQTFRSAEQITALCRSFNDSQANGMEGPRENQDPPPRSLARHLSDADRLRKVIQELVDTEKSYVKDLSCLFELYLEPLQNETFLTQDEMESLFGSLPEMLEFQKVFLETLEDGISASSDFNTLETPSQFRKLLFSLGGSFLYYADHFKLYSGFCANHIKVQKVLERAKTDKAFKAFLDARNPTKQHSSTLESYLIKPVQRVLKYPLLLKELVSLTDQESEEHYHLTEALKAMEKVASHINEMQKIYEDYGTVFDQLVAEQSGTEKEQPEWSSEVMDVLDPRGKLTKGTLEEPRTLVTELSMGELLMHSTVSWLNPFLSLGKARKDLELTVFVFKRAVILVYKENCKLKKKLPSNSRPAHNSTDLDPFKFRWLIPISALQVRLGNPAGTENNSIWELIHTKSEIEGRPETIFQLCCSDSESKTNIVKVIRSILRENFRRHIKCELPLEKTCKDRLVPLKNRVPVSAKLASSRSLKVLKNSSSNEWTGETGKGTLLDSDEGSLSSGTQSSGCPTAEGRQDSKSTSPGKYPHPGLADFADNLIKESDILSDEDDDHRQTVKQGSPTKDIEIQFQRLRISEDPDVHPEAEQQPGPESGEGQKGGEQPKLVRGHFCPIKRKANSTKRDRGTLLKAQIRHQSLDSQSENATIDLNSVLEREFSVQSLTSVVSEECFYETESHGKS

SEQ ID NO: 174561 - protein, 1013 aa, Artificial Sequence
  derived and/or modified sequence
MDLFRMRCYLASLQGGELPNPKSLLAAASRPSKLALGRLGILSVSSFHALVCSRDDSALRKRTLSLTQRGRNKKGIFSSLKGLDTLARKGKEKRPSITQVDELLHIYGSTVDGVPRDNAWEIQTYVHFQDNHGVTVGIKPEHRVEDILTLACKMRQLEPSHYGLQLRKLVDDNVEYCIPAPYEYMQQQVYDEIEVFPLNVYDVQLTKTGSVCDFGFAVTAQVDERQHLSRIFISDVLPDGLAYGEGLRKGNEIMTLNGEAVSDLDLKQMEALFSEKSVGLTLIARPPDTKATLCTSWSDSDLFSRDQKSLLPPPNQSQLLEEFLDNFKKNTANDFSNVPDITTGLKRSQTDGTLDQVSHREKMEQTFRSAEQITALCRSFNDSQANGMEGPRENQDPPPRSLARHLSDADRLRKVIQELVDTEKSYVKDLSCLFELYLEPLQNETFLTQDEMESLFGSLPEMLEFQKVFLETLEDGISASSDFNTLETPSQFRKLLFSLGGSFLYYADHFKLYSGFCANHIKVQKVLERAKTDKAFKAFLDARNPTKQHSSTLESYLIKPVQRVLKYPLLLKELVSLTDQESEEHYHLTEALKAMEKVASHINEMQKIYEDYGTVFDQLVAEQSGTEKEVTELSMGELLMHSTVSWLNPFLSLGKARKDLELTVFVFKRAVILVYKENCKLKKKLPSNSRPAHNSTDLDPFKFRWLIPISALQVRLGNPAGTENNSIWELIHTKSEIEGRPETIFQLCCSDSESKTNIVKVIRSILRENFRRHIKCELPLEKTCKDRLVPLKNRVPVSAKLASSRSLKVLKNSSSNEWTGETGKGTLLDSDEGSLSSGTQSSGCPTAEGRQDSKSTSPGKYPHPGLADFADNLIKESDILSDEDDDHRQTVKQGSPTKDIEIQFQRLRISEDPDVHPEAEQQPGPESGEGQKGGEQPKLVRGHFCPIKRKANSTKRDRGTLLKAQIRHQSLDSQSENATIDLNSVLEREFSVQSLTSVVSEECFYETESHGKS

SEQ ID NO: 174562 - protein, 1367 aa, Artificial Sequence
  derived and/or modified sequence
MGNSDSQYTLQGSKNHSNTITGAKQIPCSLKIRGIHAKEEKSLHGWGHGSNGAGYKSRSLARSCLSHFKSNQPYASRLGGPTCKVSRGVAYSTHRTNAPGKDFQGISAAFSTENGFHSVGHELADNHITSRDCNGHLLNCYGRNESIASTPPGEDRKSPRVLIKTLGKLDGCLRVEFHNGGNPSKVPAEDCSEPVQLLRYSPTLASETSPVPEARRGSSADSLPSHRPSPTDSRLRSSKGSSLSSESSWYDSPWGNAGELSEAEGSFLAPGMPDPSLHASFPPGDAKKPFNQSSSLSSLRELYKDANLGSLSPSGIRLSDEYMGTHASLSNRVSFASDIDVPSRVAHGDPIQYSSFTLPCRKPKAFVEDTAKKDSLKARMRRISDWTGSLSRKKRKLQEPRSKEGSDYFDSRSDGLNTDVQGSSQASAFLWSGGSTQILSQRSESTHAIGSDPLRQNIYENFMRELEMSRTNTENIETSTETAESSSESLSSLEQLDLLFEKEQGVVRKAGWLFFKPLVTVQKERKLELVARRKWKQYWVTLKGCTLLFYETYGKNSMDQSSAPRCALFAEDSIVQSVPEHPKKENVFCLSNSFGDVYLFQATSQTDLENWVTAVHSACASLFAKKHGKEDTLRLLKNQTKNLLQKIDMDSKMKKMAELQLSVVSDPKNRKAIENQIQQWEQNLEKFHMDLFRMRCYLASLQGGELPNPKSLLAAASRPSKLALGRLGILSVSSFHALVCSRDDSALRKRTLSLTQRGRNKKGIFSSLKGLDTLARKGKEKRPSITQVDELLHIYGSTVDGVPRDNAWEIQTYVHFQDNHGVTVGIKPEHRVEDILTLACKMRQLEPSHYGLQLRKLVDDNVEYCIPAPYEYMQQQVYDEIEVFPLNVYDVQLTKTGSVCDFGFAVTAQVDERQHLSRIFISDVLPDGLAYGEGLRKGNEIMTLNGEAVSDLDLKQMEALFSEKSVGLTLIARPPDTKATLCTSWSDSDLFSRDQKSLLPPPNQSQLLEEFLDNFKKNTANDFSNVPDITTGLKRSQTDGTLDQVSHREKMEQTFRSAEQITALCRSFNDSQANGMEGPRENQDPPPRSLARHLSDADRLRKVIQELVDTEKSYVKDLSCLFELYLEPLQNETFLTQDEMESLFGSLPEMLEFQKVFLETLEDGISASSDFNTLETPSQFRKLLFSLGGSFLYYADHFKLYSGFCANHIKVQKVLERAKTDKAFKAFLDARNPTKQHSSTLESYLIKPVQRVLKYPLLLKELVSLTDQESEEHYHLTEALKAMEKVASHINEMQKIYEDYGTVFDQLVAEQSGTEKEVTELSMGELLMHSTVSWLNPFLSLGKARKDLELTVFVFKRAVILVYKENC

SEQ ID NO: 174563 - protein, 1947 aa, Artificial Sequence
  derived and/or modified sequence
GRPIDPREGPGRPPLDGRDHFGRPPVDIRENLVRPGIDHLGRRDHFGFNPEKPWGHRGDFDEREHRVLPVYGGPKGLHEERGRFRSGNYRFDPRSGPWNRGFGQEVHRDFDDRRRPWERQRDRDDRDFDFCREMNGNRLGRDRIQNTWVPPPHARVFDYFEGATSQRKGDNVPQVNGENTERHAQPPPIPVQNDPELYEKLTSSNEINKEKSDTVADIESEPVVESTETEGTPLTSLTAETRRQVKMGNSDSQYTLQGSKNHSNTITGAKQIPCSLKIRGIHAKEEKSLHGWGHGSNGAGYKSRSLARSCLSHFKSNQPYASRLGGPTCKVSRGVAYSTHRTNAPGKDFQGISAAFSTENGFHSVGHELADNHITSRDCNGHLLNCYGRNESIASTPPGEDRKSPRVLIKTLGKLDGCLRVEFHNGGNPSKVPAEDCSEPVQLLRYSPTLASETSPVPEARRGSSADSLPSHRPSPTDSRLRSSKGSSLSSESSWYDSPWGNAGELSEAEGSFLAPGMPDPSLHASFPPGDAKKPFNQSSSLSSLRELYKDANLGSLSPSGIRLSDEYMGTHASLSNRVSFASDIDVPSRVAHGDPIQYSSFTLPCRKPKAFVEDTAKKDSLKARMRRISDWTGSLSRKKRKLQEPRSKEGSDYFDSRSDGLNTDVQGSSQASAFLWSGGSTQILSQRSESTHAIGSDPLRQNIYENFMRELEMSRTNTENIETSTETAESSSESLSSLEQLDLLFEKEQGVVRKAGWLFFKPLVTVQKERKLELVARRKWKQYWVTLKGCTLLFYETYGKNSMDQSSAPRCALFAEDSIVQSVPEHPKKENVFCLSNSFGDVYLFQATSQTDLENWVTAVHSACASLFAKKHGKEDTLRLLKNQTKNLLQKIDMDSKMKKMAELQLSVVSDPKNRKAIENQIQQWEQNLEKFHMDLFRMRCYLASLQGGELPNPKSLLAAASRPSKLALGRLGILSVSSFHALVCSRDDSALRKRTLSLTQRGRNKKGIFSSLKGLDTLARKGKEKRPSITQVDELLHIYGSTVDGVPRDNAWEIQTYVHFQDNHGVTVGIKPEHRVEDILTLACKMRQLEPSHYGLQLRKLVDDNVEYCIPAPYEYMQQQVYDEIEVFPLNVYDVQLTKTGSVCDFGFAVTAQVDERQHLSRIFISDVLPDGLAYGEGLRKGNEIMTLNGEAVSDLDLKQMEALFSEKSVGLTLIARPPDTKATLCTSWSDSDLFSRDQKSLLPPPNQSQLLEEFLDNFKKNTANDFSNVPDITTGLKRSQTDGTLDQVSHREKMEQTFRSAEQITALCRSFNDSQANGMEGPRENQDPPPRSLARHLSDADRLRKVIQELVDTEKSYVKDLSCLFELYLEPLQNETFLTQDEMESLFGSLPEMLEFQKVFLETLEDGISASSDFNTLETPSQFRKLLFSLGGSFLYYADHFKLYSGFCANHIKVQKVLERAKTDKAFKAFLDARNPTKQHSSTLESYLIKPVQRVLKYPLLLKELVSLTDQESEEHYHLTEALKAMEKVASHINEMQKIYEDYGTVFDQLVAEQSGTEKEVTELSMGELLMHSTVSWLNPFLSLGKARKDLELTVFVFKRAVILVYKENCKLKKKLPSNSRPAHNSTDLDPFKFRWLIPISALQVRLGNPAGTENNSIWELIHTKSEIEGRPETIFQLCCSDSESKTNIVKVIRSILRENFRRHIKCELPLEKTCKDRLVPLKNRVPVSAKLASSRSLKVLKNSSSNEWTGETGKGTLLDSDEGSLSSGTQSSGCPTAEGRQDSKSTSPGKYPHPGLADFADNLIKESDILSDEDDDHRQTVKQGSPTKDIEIQFQRLRISEDPDVHPEAEQQPGPESGEGQKGGEQPKLVRGHFCPIKRKANSTKRDRGTLLKAQIRHQSLDSQSENATIDLNSVLEREFSVQSLTSVVSEECFYETESHGKS

SEQ ID NO: 174564 - protein, 54 aa, Artificial Sequence
  derived and/or modified sequence
MGNSDSQYTLQGSKNHSNTITGAKQIPCSLKIRGIHAKEEKSLHGWGHGSNGAG

SEQ ID NO: 174565 - protein, 195 aa, Artificial Sequence
  derived and/or modified sequence
MGNSDSQYTLQGSKNHSNTITGAKQIPCSLKIRGIHAKEEKSLHGWGHGSNGAGYKSRSLARSCLSHFKSNQPYASRLGGPTCKVSRGVAYSTHRTNAPGKDFQGISAAFSTENGFHSVGHELADNHITSRDCNGHLLNCYGRNESIASTPPGEDRKSPRVLIKTLGKLDGCLRVEFHNGGNPSKVPAEDCSEPV

SEQ ID NO: 174566 - protein, 85 aa, Artificial Sequence
  derived and/or modified sequence
MGNSDSQYTLQGSKNHSNTITGAKQIPCSLKIRGIHAKEEKSLHGWGHGSNGAGYKSRSLARSCLSHFKSNQPYASRLGGPTCKV

SEQ ID NO: 174567 - protein, 53 aa, Artificial Sequence
  derived and/or modified sequence
MGNSDSQYTLQGSKNHSNTITGAKQIPCSLKIRGIHAKEEKSLHGWGHGSNGA

SEQ ID NO: 174568 - DNA, 3234 bp, Artificial Sequence
  derived and/or modified sequence
atggacagcaagatgaagaagatggccgagctgcagctgagcgtggtgagcgaccccaagaacagaaaggccatcgagaaccagatccagcagtgggagcagaacctggagaagttccacatggacctgttcagaatgagatgctacctggccagcctgcagggcggcgagctgcccaaccccaagagcctgctggccgccgccagcagacccagcaagctggccctgggcagactgggcatcctgagcgtgagcagcttccacgccctggtgtgcagcagagacgacagcgccctgagaaagagaaccctgagcctgacccagagaggcagaaacaagaagggcatcttcagcagcctgaagggcctggacaccctggccagaaagggcaaggagaagagacccagcatcacccagatcttcgacagcagcggcagccacggcttcagcggcacccagctgccccagaacagcagcaacagcagcgaggtggacgagctgctgcacatctacggcagcaccgtggacggcgtgcccagagacaacgcctgggagatccagacctacgtgcacttccaggacaaccacggcgtgaccgtgggcatcaagcccgagcacagagtggaggacatcctgaccctggcctgcaagatgagacagctggagcccagccactacggcctgcagctgagaaagctggtggacgacaacgtggagtactgcatccccgccccctacgagtacatgcagcagcaggtgtacgacgagatcgaggtgttccccctgaacgtgtacgacgtgcagctgaccaagaccggcagcgtgtgcgacttcggcttcgccgtgaccgcccaggtggacgagagacagcacctgagcagaatcttcatcagcgacgtgctgcccgacggcctggcctacggcgagggcctgagaaagggcaacgagatcatgaccctgaacggcgaggccgtgagcgacctggacctgaagcagatggaggccctgttcagcgagaagagcgtgggcctgaccctgatcgccagaccccccgacaccaaggccaccctgtgcaccagctggagcgacagcgacctgttcagcagagaccagaagagcctgctgcccccccccaaccagagccagctgctggaggagttcctggacaacttcaagaagaacaccgccaacgacttcagcaacgtgcccgacatcaccaccggcctgaagagaagccagaccgacggcaccctggaccaggtgagccacagagagaagatggagcagaccttcagaagcgccgagcagatcaccgccctgtgcagaagcttcaacgacagccaggccaacggcatggagggccccagagagaaccaggaccccccccccagaagcctggccagacacctgagcgacgccgacagactgagaaaggtgatccaggagctggtggacaccgagaagagctacgtgaaggacctgagctgcctgttcgagctgtacctggagcccctgcagaacgagaccttcctgacccaggacgagatggagagcctgttcggcagcctgcccgagatgctggagttccagaaggtgttcctggagaccctggaggacggcatcagcgccagcagcgacttcaacaccctggagacccccagccagttcagaaagctgctgttcagcctgggcggcagcttcctgtactacgccgaccacttcaagctgtacagcggcttctgcgccaaccacatcaaggtgcagaaggtgctggagagagccaagaccgacaaggccttcaaggccttcctggacgccagaaaccccaccaagcagcacagcagcaccctggagagctacctgatcaagcccgtgcagagagtgctgaagtaccccctgctgctgaaggagctggtgagcctgaccgaccaggagagcgaggagcactaccacctgaccgaggccctgaaggccatggagaaggtggccagccacatcaacgagatgcagaagatctacgaggactacggcaccgtgttcgaccagctggtggccgagcagagcggcaccgagaaggaggtgaccgagctgagcatgggcgagctgctgatgcacagcaccgtgagctggctgaaccccttcctgagcctgggcaaggccagaaaggacctggagctgaccgtgttcgtgttcaagagagccgtgatcctggtgtacaaggagaactgcaagctgaagaagaagctgcccagcaacagcagacccgcccacaacagcaccgacctggaccccttcaagttcagatggctgatccccatcagcgccctgcaggtgagactgggcaaccccgccggcaccgagaacaacagcatctgggagctgatccacaccaagagcgagatcgagggcagacccgagaccatcttccagctgtgctgcagcgacagcgagagcaagaccaacatcgtgaaggtgatcagaagcatcctgagagagaacttcagaagacacatcaagtgcgagctgcccctggagaagacctgcaaggacagactggtgcccctgaagaacagagtgcccgtgagcgccaagctggccagcagcagaagcctgaaggtgctgaagaacagcagcagcaacgagtggaccggcgagaccggcaagggcaccctgctggacagcgacgagggcagcctgagcagcggcacccagagcagcggctgccccaccgccgagggcagacaggacagcaagagcaccagccccggcaagtacccccaccccggcctggccgacttcgccgacaacctgatcaaggagagcgacatcctgagcgacgaggacgacgaccacagacagaccgtgaagcagggcagccccaccaaggacatcgagatccagttccagagactgagaatcagcgaggaccccgacgtgcaccccgaggccgagcagcagcccggccccgagagcggcgagggccagaagggcggcgagcagcccaagctggtgagaggccacttctgccccatcaagagaaaggccaacagcaccaagagagacagaggcaccctgctgaaggcccagatcagacaccagagcctggacagccagagcgagaacgccaccatcgacctgaacagcgtgctggagagagagttcagcgtgcagagcctgaccagcgtggtgagcgaggagtgcttctacgagaccgagagccacggcaagagctag

SEQ ID NO: 174569 - DNA, 5193 bp, Artificial Sequence
  derived and/or modified sequence
atgggcaacagcgacagccagtacaccctgcagggcagcaagaaccacagcaacaccatcaccggcgccaagcagatcccctgcagcctgaagatcagaggcatccacgccaaggaggagaagagcctgcacggctggggccacggcagcaacggcgccggctacaagagcagaagcctggccagaagctgcctgagccacttcaagagcaaccagccctacgccagcagactgggcggccccacctgcaaggtgagcagaggcgtggcctacagcacccacagaaccaacgcccccggcaaggacttccagggcatcagcgccgccttcagcaccgagaacggcttccacagcgtgggccacgagctggccgacaaccacatcaccagcagagactgcaacggccacctgctgaactgctacggcagaaacgagagcatcgccagcaccccccccggcgaggacagaaagagccccagagtgctgatcaagaccctgggcaagctggacggctgcctgagagtggagttccacaacggcggcaaccccagcaaggtgcccgccgaggactgcagcgagcccgtgcagctgctgagatacagccccaccctggccagcgagaccagccccgtgcccgaggccagaagaggcagcagcgccgacagcctgcccagccacagacccagccccaccgacagcagactgagaagcagcaagggcagcagcctgagcagcgagagcagctggtacgacagcccctggggcaacgccggcgagctgagcgaggccgagggcagcttcctggcccccggcatgcccgaccccagcctgcacgccagcttcccccccggcgacgccaagaagcccttcaaccagagcagcagcctgagcagcctgagagagctgtacaaggacgccaacctgggcagcctgagccccagcggcatcagactgagcgacgagtacatgggcacccacgccagcctgagcaacagagtgagcttcgccagcgacatcgacgtgcccagcagagtggcccacggcgaccccatccagtacagcagcttcaccctgccctgcagaaagcccaaggccttcgtggaggacaccgccaagaaggacagcctgaaggccagaatgagaagaatcagcgactggaccggcagcctgagcagaaagaagagaaagctgcaggagcccagaagcaaggagggcagcgactacttcgacagcagaagcgacggcctgaacaccgacgtgcagggcagcagccaggccagcgccttcctgtggagcggcggcagcacccagatcctgagccagagaagcgagagcacccacgccatcggcagcgaccccctgagacagaacatctacgagaacttcatgagagagctggagatgagcagaaccaacaccgagaacatcgagaccagcaccgagaccgccgagagcagcagcgagagcctgagcagcctggagcagctggacctgctgttcgagaaggagcagggcgtggtgagaaaggccggctggctgttcttcaagcccctggtgaccgtgcagaaggagagaaagctggagctggtggccagaagaaagtggaagcagtactgggtgaccctgaagggctgcaccctgctgttctacgagacctacggcaagaacagcatggaccagagcagcgcccccagatgcgccctgttcgccgaggacagcatcgtgcagagcgtgcccgagcaccccaagaaggagaacgtgttctgcctgagcaacagcttcggcgacgtgtacctgttccaggccaccagccagaccgacctggagaactgggtgaccgccgtgcacagcgcctgcgccagcctgttcgccaagaagcacggcaaggaggacaccctgagactgctgaagaaccagaccaagaacctgctgcagaagatcgacatggacagcaagatgaagaagatggccgagctgcagctgagcgtggtgagcgaccccaagaacagaaaggccatcgagaaccagatccagcagtgggagcagaacctggagaagttccacatggacctgttcagaatgagatgctacctggccagcctgcagggcggcgagctgcccaaccccaagagcctgctggccgccgccagcagacccagcaagctggccctgggcagactgggcatcctgagcgtgagcagcttccacgccctggtgtgcagcagagacgacagcgccctgagaaagagaaccctgagcctgacccagagaggcagaaacaagaagggcatcttcagcagcctgaagggcctggacaccctggccagaaagggcaaggagaagagacccagcatcacccaggtggacgagctgctgcacatctacggcagcaccgtggacggcgtgcccagagacaacgcctgggagatccagacctacgtgcacttccaggacaaccacggcgtgaccgtgggcatcaagcccgagcacagagtggaggacatcctgaccctggcctgcaagatgagacagctggagcccagccactacggcctgcagctgagaaagctggtggacgacaacgtggagtactgcatccccgccccctacgagtacatgcagcagcaggtgtacgacgagatcgaggtgttccccctgaacgtgtacgacgtgcagctgaccaagaccggcagcgtgtgcgacttcggcttcgccgtgaccgcccaggtggacgagagacagcacctgagcagaatcttcatcagcgacgtgctgcccgacggcctggcctacggcgagggcctgagaaagggcaacgagatcatgaccctgaacggcgaggccgtgagcgacctggacctgaagcagatggaggccctgttcagcgagaagagcgtgggcctgaccctgatcgccagaccccccgacaccaaggccaccctgtgcaccagctggagcgacagcgacctgttcagcagagaccagaagagcctgctgcccccccccaaccagagccagctgctggaggagttcctggacaacttcaagaagaacaccgccaacgacttcagcaacgtgcccgacatcaccaccggcctgaagagaagccagaccgacggcaccctggaccaggtgagccacagagagaagatggagcagaccttcagaagcgccgagcagatcaccgccctgtgcagaagcttcaacgacagccaggccaacggcatggagggccccagagagaaccaggaccccccccccagaagcctggccagacacctgagcgacgccgacagactgagaaaggtgatccaggagctggtggacaccgagaagagctacgtgaaggacctgagctgcctgttcgagctgtacctggagcccctgcagaacgagaccttcctgacccaggacgagatggagagcctgttcggcagcctgcccgagatgctggagttccagaaggtgttcctggagaccctggaggacggcatcagcgccagcagcgacttcaacaccctggagacccccagccagttcagaaagctgctgttcagcctgggcggcagcttcctgtactacgccgaccacttcaagctgtacagcggcttctgcgccaaccacatcaaggtgcagaaggtgctggagagagccaagaccgacaaggccttcaaggccttcctggacgccagaaaccccaccaagcagcacagcagcaccctggagagctacctgatcaagcccgtgcagagagtgctgaagtaccccctgctgctgaaggagctggtgagcctgaccgaccaggagagcgaggagcactaccacctgaccgaggccctgaaggccatggagaaggtggccagccacatcaacgagatgcagaagatctacgaggactacggcaccgtgttcgaccagctggtggccgagcagagcggcaccgagaaggagcagcccgagtggagcagcgaggtgatggacgtgctggaccccagaggcaagctgaccaagggcaccctggaggagcccagaaccctggtgaccgagctgagcatgggcgagctgctgatgcacagcaccgtgagctggctgaaccccttcctgagcctgggcaaggccagaaaggacctggagctgaccgtgttcgtgttcaagagagccgtgatcctggtgtacaaggagaactgcaagctgaagaagaagctgcccagcaacagcagacccgcccacaacagcaccgacctggaccccttcaagttcagatggctgatccccatcagcgccctgcaggtgagactgggcaaccccgccggcaccgagaacaacagcatctgggagctgatccacaccaagagcgagatcgagggcagacccgagaccatcttccagctgtgctgcagcgacagcgagagcaagaccaacatcgtgaaggtgatcagaagcatcctgagagagaacttcagaagacacatcaagtgcgagctgcccctggagaagacctgcaaggacagactggtgcccctgaagaacagagtgcccgtgagcgccaagctggccagcagcagaagcctgaaggtgctgaagaacagcagcagcaacgagtggaccggcgagaccggcaagggcaccctgctggacagcgacgagggcagcctgagcagcggcacccagagcagcggctgccccaccgccgagggcagacaggacagcaagagcaccagccccggcaagtacccccaccccggcctggccgacttcgccgacaacctgatcaaggagagcgacatcctgagcgacgaggacgacgaccacagacagaccgtgaagcagggcagccccaccaaggacatcgagatccagttccagagactgagaatcagcgaggaccccgacgtgcaccccgaggccgagcagcagcccggccccgagagcggcgagggccagaagggcggcgagcagcccaagctggtgagaggccacttctgccccatcaagagaaaggccaacagcaccaagagagacagaggcaccctgctgaaggcccagatcagacaccagagcctggacagccagagcgagaacgccaccatcgacctgaacagcgtgctggagagagagttcagcgtgcagagcctgaccagcgtggtgagcgaggagtgcttctacgagaccgagagccacggcaagagctag

SEQ ID NO: 174570 - DNA, 3042 bp, Artificial Sequence
  derived and/or modified sequence
atggacctgttcagaatgagatgctacctggccagcctgcagggcggcgagctgcccaaccccaagagcctgctggccgccgccagcagacccagcaagctggccctgggcagactgggcatcctgagcgtgagcagcttccacgccctggtgtgcagcagagacgacagcgccctgagaaagagaaccctgagcctgacccagagaggcagaaacaagaagggcatcttcagcagcctgaagggcctggacaccctggccagaaagggcaaggagaagagacccagcatcacccaggtggacgagctgctgcacatctacggcagcaccgtggacggcgtgcccagagacaacgcctgggagatccagacctacgtgcacttccaggacaaccacggcgtgaccgtgggcatcaagcccgagcacagagtggaggacatcctgaccctggcctgcaagatgagacagctggagcccagccactacggcctgcagctgagaaagctggtggacgacaacgtggagtactgcatccccgccccctacgagtacatgcagcagcaggtgtacgacgagatcgaggtgttccccctgaacgtgtacgacgtgcagctgaccaagaccggcagcgtgtgcgacttcggcttcgccgtgaccgcccaggtggacgagagacagcacctgagcagaatcttcatcagcgacgtgctgcccgacggcctggcctacggcgagggcctgagaaagggcaacgagatcatgaccctgaacggcgaggccgtgagcgacctggacctgaagcagatggaggccctgttcagcgagaagagcgtgggcctgaccctgatcgccagaccccccgacaccaaggccaccctgtgcaccagctggagcgacagcgacctgttcagcagagaccagaagagcctgctgcccccccccaaccagagccagctgctggaggagttcctggacaacttcaagaagaacaccgccaacgacttcagcaacgtgcccgacatcaccaccggcctgaagagaagccagaccgacggcaccctggaccaggtgagccacagagagaagatggagcagaccttcagaagcgccgagcagatcaccgccctgtgcagaagcttcaacgacagccaggccaacggcatggagggccccagagagaaccaggaccccccccccagaagcctggccagacacctgagcgacgccgacagactgagaaaggtgatccaggagctggtggacaccgagaagagctacgtgaaggacctgagctgcctgttcgagctgtacctggagcccctgcagaacgagaccttcctgacccaggacgagatggagagcctgttcggcagcctgcccgagatgctggagttccagaaggtgttcctggagaccctggaggacggcatcagcgccagcagcgacttcaacaccctggagacccccagccagttcagaaagctgctgttcagcctgggcggcagcttcctgtactacgccgaccacttcaagctgtacagcggcttctgcgccaaccacatcaaggtgcagaaggtgctggagagagccaagaccgacaaggccttcaaggccttcctggacgccagaaaccccaccaagcagcacagcagcaccctggagagctacctgatcaagcccgtgcagagagtgctgaagtaccccctgctgctgaaggagctggtgagcctgaccgaccaggagagcgaggagcactaccacctgaccgaggccctgaaggccatggagaaggtggccagccacatcaacgagatgcagaagatctacgaggactacggcaccgtgttcgaccagctggtggccgagcagagcggcaccgagaaggaggtgaccgagctgagcatgggcgagctgctgatgcacagcaccgtgagctggctgaaccccttcctgagcctgggcaaggccagaaaggacctggagctgaccgtgttcgtgttcaagagagccgtgatcctggtgtacaaggagaactgcaagctgaagaagaagctgcccagcaacagcagacccgcccacaacagcaccgacctggaccccttcaagttcagatggctgatccccatcagcgccctgcaggtgagactgggcaaccccgccggcaccgagaacaacagcatctgggagctgatccacaccaagagcgagatcgagggcagacccgagaccatcttccagctgtgctgcagcgacagcgagagcaagaccaacatcgtgaaggtgatcagaagcatcctgagagagaacttcagaagacacatcaagtgcgagctgcccctggagaagacctgcaaggacagactggtgcccctgaagaacagagtgcccgtgagcgccaagctggccagcagcagaagcctgaaggtgctgaagaacagcagcagcaacgagtggaccggcgagaccggcaagggcaccctgctggacagcgacgagggcagcctgagcagcggcacccagagcagcggctgccccaccgccgagggcagacaggacagcaagagcaccagccccggcaagtacccccaccccggcctggccgacttcgccgacaacctgatcaaggagagcgacatcctgagcgacgaggacgacgaccacagacagaccgtgaagcagggcagccccaccaaggacatcgagatccagttccagagactgagaatcagcgaggaccccgacgtgcaccccgaggccgagcagcagcccggccccgagagcggcgagggccagaagggcggcgagcagcccaagctggtgagaggccacttctgccccatcaagagaaaggccaacagcaccaagagagacagaggcaccctgctgaaggcccagatcagacaccagagcctggacagccagagcgagaacgccaccatcgacctgaacagcgtgctggagagagagttcagcgtgcagagcctgaccagcgtggtgagcgaggagtgcttctacgagaccgagagccacggcaagagctag

SEQ ID NO: 174571 - DNA, 4104 bp, Artificial Sequence
  derived and/or modified sequence
atgggcaacagcgacagccagtacaccctgcagggcagcaagaaccacagcaacaccatcaccggcgccaagcagatcccctgcagcctgaagatcagaggcatccacgccaaggaggagaagagcctgcacggctggggccacggcagcaacggcgccggctacaagagcagaagcctggccagaagctgcctgagccacttcaagagcaaccagccctacgccagcagactgggcggccccacctgcaaggtgagcagaggcgtggcctacagcacccacagaaccaacgcccccggcaaggacttccagggcatcagcgccgccttcagcaccgagaacggcttccacagcgtgggccacgagctggccgacaaccacatcaccagcagagactgcaacggccacctgctgaactgctacggcagaaacgagagcatcgccagcaccccccccggcgaggacagaaagagccccagagtgctgatcaagaccctgggcaagctggacggctgcctgagagtggagttccacaacggcggcaaccccagcaaggtgcccgccgaggactgcagcgagcccgtgcagctgctgagatacagccccaccctggccagcgagaccagccccgtgcccgaggccagaagaggcagcagcgccgacagcctgcccagccacagacccagccccaccgacagcagactgagaagcagcaagggcagcagcctgagcagcgagagcagctggtacgacagcccctggggcaacgccggcgagctgagcgaggccgagggcagcttcctggcccccggcatgcccgaccccagcctgcacgccagcttcccccccggcgacgccaagaagcccttcaaccagagcagcagcctgagcagcctgagagagctgtacaaggacgccaacctgggcagcctgagccccagcggcatcagactgagcgacgagtacatgggcacccacgccagcctgagcaacagagtgagcttcgccagcgacatcgacgtgcccagcagagtggcccacggcgaccccatccagtacagcagcttcaccctgccctgcagaaagcccaaggccttcgtggaggacaccgccaagaaggacagcctgaaggccagaatgagaagaatcagcgactggaccggcagcctgagcagaaagaagagaaagctgcaggagcccagaagcaaggagggcagcgactacttcgacagcagaagcgacggcctgaacaccgacgtgcagggcagcagccaggccagcgccttcctgtggagcggcggcagcacccagatcctgagccagagaagcgagagcacccacgccatcggcagcgaccccctgagacagaacatctacgagaacttcatgagagagctggagatgagcagaaccaacaccgagaacatcgagaccagcaccgagaccgccgagagcagcagcgagagcctgagcagcctggagcagctggacctgctgttcgagaaggagcagggcgtggtgagaaaggccggctggctgttcttcaagcccctggtgaccgtgcagaaggagagaaagctggagctggtggccagaagaaagtggaagcagtactgggtgaccctgaagggctgcaccctgctgttctacgagacctacggcaagaacagcatggaccagagcagcgcccccagatgcgccctgttcgccgaggacagcatcgtgcagagcgtgcccgagcaccccaagaaggagaacgtgttctgcctgagcaacagcttcggcgacgtgtacctgttccaggccaccagccagaccgacctggagaactgggtgaccgccgtgcacagcgcctgcgccagcctgttcgccaagaagcacggcaaggaggacaccctgagactgctgaagaaccagaccaagaacctgctgcagaagatcgacatggacagcaagatgaagaagatggccgagctgcagctgagcgtggtgagcgaccccaagaacagaaaggccatcgagaaccagatccagcagtgggagcagaacctggagaagttccacatggacctgttcagaatgagatgctacctggccagcctgcagggcggcgagctgcccaaccccaagagcctgctggccgccgccagcagacccagcaagctggccctgggcagactgggcatcctgagcgtgagcagcttccacgccctggtgtgcagcagagacgacagcgccctgagaaagagaaccctgagcctgacccagagaggcagaaacaagaagggcatcttcagcagcctgaagggcctggacaccctggccagaaagggcaaggagaagagacccagcatcacccaggtggacgagctgctgcacatctacggcagcaccgtggacggcgtgcccagagacaacgcctgggagatccagacctacgtgcacttccaggacaaccacggcgtgaccgtgggcatcaagcccgagcacagagtggaggacatcctgaccctggcctgcaagatgagacagctggagcccagccactacggcctgcagctgagaaagctggtggacgacaacgtggagtactgcatccccgccccctacgagtacatgcagcagcaggtgtacgacgagatcgaggtgttccccctgaacgtgtacgacgtgcagctgaccaagaccggcagcgtgtgcgacttcggcttcgccgtgaccgcccaggtggacgagagacagcacctgagcagaatcttcatcagcgacgtgctgcccgacggcctggcctacggcgagggcctgagaaagggcaacgagatcatgaccctgaacggcgaggccgtgagcgacctggacctgaagcagatggaggccctgttcagcgagaagagcgtgggcctgaccctgatcgccagaccccccgacaccaaggccaccctgtgcaccagctggagcgacagcgacctgttcagcagagaccagaagagcctgctgcccccccccaaccagagccagctgctggaggagttcctggacaacttcaagaagaacaccgccaacgacttcagcaacgtgcccgacatcaccaccggcctgaagagaagccagaccgacggcaccctggaccaggtgagccacagagagaagatggagcagaccttcagaagcgccgagcagatcaccgccctgtgcagaagcttcaacgacagccaggccaacggcatggagggccccagagagaaccaggaccccccccccagaagcctggccagacacctgagcgacgccgacagactgagaaaggtgatccaggagctggtggacaccgagaagagctacgtgaaggacctgagctgcctgttcgagctgtacctggagcccctgcagaacgagaccttcctgacccaggacgagatggagagcctgttcggcagcctgcccgagatgctggagttccagaaggtgttcctggagaccctggaggacggcatcagcgccagcagcgacttcaacaccctggagacccccagccagttcagaaagctgctgttcagcctgggcggcagcttcctgtactacgccgaccacttcaagctgtacagcggcttctgcgccaaccacatcaaggtgcagaaggtgctggagagagccaagaccgacaaggccttcaaggccttcctggacgccagaaaccccaccaagcagcacagcagcaccctggagagctacctgatcaagcccgtgcagagagtgctgaagtaccccctgctgctgaaggagctggtgagcctgaccgaccaggagagcgaggagcactaccacctgaccgaggccctgaaggccatggagaaggtggccagccacatcaacgagatgcagaagatctacgaggactacggcaccgtgttcgaccagctggtggccgagcagagcggcaccgagaaggaggtgaccgagctgagcatgggcgagctgctgatgcacagcaccgtgagctggctgaaccccttcctgagcctgggcaaggccagaaaggacctggagctgaccgtgttcgtgttcaagagagccgtgatcctggtgtacaaggagaactgctag

SEQ ID NO: 174572 - DNA, 5844 bp, Artificial Sequence
  derived and/or modified sequence
ggcagacccatcgaccccagagagggccccggcagaccccccctggacggcagagaccacttcggcagaccccccgtggacatcagagagaacctggtgagacccggcatcgaccacctgggcagaagagaccacttcggcttcaaccccgagaagccctggggccacagaggcgacttcgacgagagagagcacagagtgctgcccgtgtacggcggccccaagggcctgcacgaggagagaggcagattcagaagcggcaactacagattcgaccccagaagcggcccctggaacagaggcttcggccaggaggtgcacagagacttcgacgacagaagaagaccctgggagagacagagagacagagacgacagagacttcgacttctgcagagagatgaacggcaacagactgggcagagacagaatccagaacacctgggtgccccccccccacgccagagtgttcgactacttcgagggcgccaccagccagagaaagggcgacaacgtgccccaggtgaacggcgagaacaccgagagacacgcccagcccccccccatccccgtgcagaacgaccccgagctgtacgagaagctgaccagcagcaacgagatcaacaaggagaagagcgacaccgtggccgacatcgagagcgagcccgtggtggagagcaccgagaccgagggcacccccctgaccagcctgaccgccgagaccagaagacaggtgaagatgggcaacagcgacagccagtacaccctgcagggcagcaagaaccacagcaacaccatcaccggcgccaagcagatcccctgcagcctgaagatcagaggcatccacgccaaggaggagaagagcctgcacggctggggccacggcagcaacggcgccggctacaagagcagaagcctggccagaagctgcctgagccacttcaagagcaaccagccctacgccagcagactgggcggccccacctgcaaggtgagcagaggcgtggcctacagcacccacagaaccaacgcccccggcaaggacttccagggcatcagcgccgccttcagcaccgagaacggcttccacagcgtgggccacgagctggccgacaaccacatcaccagcagagactgcaacggccacctgctgaactgctacggcagaaacgagagcatcgccagcaccccccccggcgaggacagaaagagccccagagtgctgatcaagaccctgggcaagctggacggctgcctgagagtggagttccacaacggcggcaaccccagcaaggtgcccgccgaggactgcagcgagcccgtgcagctgctgagatacagccccaccctggccagcgagaccagccccgtgcccgaggccagaagaggcagcagcgccgacagcctgcccagccacagacccagccccaccgacagcagactgagaagcagcaagggcagcagcctgagcagcgagagcagctggtacgacagcccctggggcaacgccggcgagctgagcgaggccgagggcagcttcctggcccccggcatgcccgaccccagcctgcacgccagcttcccccccggcgacgccaagaagcccttcaaccagagcagcagcctgagcagcctgagagagctgtacaaggacgccaacctgggcagcctgagccccagcggcatcagactgagcgacgagtacatgggcacccacgccagcctgagcaacagagtgagcttcgccagcgacatcgacgtgcccagcagagtggcccacggcgaccccatccagtacagcagcttcaccctgccctgcagaaagcccaaggccttcgtggaggacaccgccaagaaggacagcctgaaggccagaatgagaagaatcagcgactggaccggcagcctgagcagaaagaagagaaagctgcaggagcccagaagcaaggagggcagcgactacttcgacagcagaagcgacggcctgaacaccgacgtgcagggcagcagccaggccagcgccttcctgtggagcggcggcagcacccagatcctgagccagagaagcgagagcacccacgccatcggcagcgaccccctgagacagaacatctacgagaacttcatgagagagctggagatgagcagaaccaacaccgagaacatcgagaccagcaccgagaccgccgagagcagcagcgagagcctgagcagcctggagcagctggacctgctgttcgagaaggagcagggcgtggtgagaaaggccggctggctgttcttcaagcccctggtgaccgtgcagaaggagagaaagctggagctggtggccagaagaaagtggaagcagtactgggtgaccctgaagggctgcaccctgctgttctacgagacctacggcaagaacagcatggaccagagcagcgcccccagatgcgccctgttcgccgaggacagcatcgtgcagagcgtgcccgagcaccccaagaaggagaacgtgttctgcctgagcaacagcttcggcgacgtgtacctgttccaggccaccagccagaccgacctggagaactgggtgaccgccgtgcacagcgcctgcgccagcctgttcgccaagaagcacggcaaggaggacaccctgagactgctgaagaaccagaccaagaacctgctgcagaagatcgacatggacagcaagatgaagaagatggccgagctgcagctgagcgtggtgagcgaccccaagaacagaaaggccatcgagaaccagatccagcagtgggagcagaacctggagaagttccacatggacctgttcagaatgagatgctacctggccagcctgcagggcggcgagctgcccaaccccaagagcctgctggccgccgccagcagacccagcaagctggccctgggcagactgggcatcctgagcgtgagcagcttccacgccctggtgtgcagcagagacgacagcgccctgagaaagagaaccctgagcctgacccagagaggcagaaacaagaagggcatcttcagcagcctgaagggcctggacaccctggccagaaagggcaaggagaagagacccagcatcacccaggtggacgagctgctgcacatctacggcagcaccgtggacggcgtgcccagagacaacgcctgggagatccagacctacgtgcacttccaggacaaccacggcgtgaccgtgggcatcaagcccgagcacagagtggaggacatcctgaccctggcctgcaagatgagacagctggagcccagccactacggcctgcagctgagaaagctggtggacgacaacgtggagtactgcatccccgccccctacgagtacatgcagcagcaggtgtacgacgagatcgaggtgttccccctgaacgtgtacgacgtgcagctgaccaagaccggcagcgtgtgcgacttcggcttcgccgtgaccgcccaggtggacgagagacagcacctgagcagaatcttcatcagcgacgtgctgcccgacggcctggcctacggcgagggcctgagaaagggcaacgagatcatgaccctgaacggcgaggccgtgagcgacctggacctgaagcagatggaggccctgttcagcgagaagagcgtgggcctgaccctgatcgccagaccccccgacaccaaggccaccctgtgcaccagctggagcgacagcgacctgttcagcagagaccagaagagcctgctgcccccccccaaccagagccagctgctggaggagttcctggacaacttcaagaagaacaccgccaacgacttcagcaacgtgcccgacatcaccaccggcctgaagagaagccagaccgacggcaccctggaccaggtgagccacagagagaagatggagcagaccttcagaagcgccgagcagatcaccgccctgtgcagaagcttcaacgacagccaggccaacggcatggagggccccagagagaaccaggaccccccccccagaagcctggccagacacctgagcgacgccgacagactgagaaaggtgatccaggagctggtggacaccgagaagagctacgtgaaggacctgagctgcctgttcgagctgtacctggagcccctgcagaacgagaccttcctgacccaggacgagatggagagcctgttcggcagcctgcccgagatgctggagttccagaaggtgttcctggagaccctggaggacggcatcagcgccagcagcgacttcaacaccctggagacccccagccagttcagaaagctgctgttcagcctgggcggcagcttcctgtactacgccgaccacttcaagctgtacagcggcttctgcgccaaccacatcaaggtgcagaaggtgctggagagagccaagaccgacaaggccttcaaggccttcctggacgccagaaaccccaccaagcagcacagcagcaccctggagagctacctgatcaagcccgtgcagagagtgctgaagtaccccctgctgctgaaggagctggtgagcctgaccgaccaggagagcgaggagcactaccacctgaccgaggccctgaaggccatggagaaggtggccagccacatcaacgagatgcagaagatctacgaggactacggcaccgtgttcgaccagctggtggccgagcagagcggcaccgagaaggaggtgaccgagctgagcatgggcgagctgctgatgcacagcaccgtgagctggctgaaccccttcctgagcctgggcaaggccagaaaggacctggagctgaccgtgttcgtgttcaagagagccgtgatcctggtgtacaaggagaactgcaagctgaagaagaagctgcccagcaacagcagacccgcccacaacagcaccgacctggaccccttcaagttcagatggctgatccccatcagcgccctgcaggtgagactgggcaaccccgccggcaccgagaacaacagcatctgggagctgatccacaccaagagcgagatcgagggcagacccgagaccatcttccagctgtgctgcagcgacagcgagagcaagaccaacatcgtgaaggtgatcagaagcatcctgagagagaacttcagaagacacatcaagtgcgagctgcccctggagaagacctgcaaggacagactggtgcccctgaagaacagagtgcccgtgagcgccaagctggccagcagcagaagcctgaaggtgctgaagaacagcagcagcaacgagtggaccggcgagaccggcaagggcaccctgctggacagcgacgagggcagcctgagcagcggcacccagagcagcggctgccccaccgccgagggcagacaggacagcaagagcaccagccccggcaagtacccccaccccggcctggccgacttcgccgacaacctgatcaaggagagcgacatcctgagcgacgaggacgacgaccacagacagaccgtgaagcagggcagccccaccaaggacatcgagatccagttccagagactgagaatcagcgaggaccccgacgtgcaccccgaggccgagcagcagcccggccccgagagcggcgagggccagaagggcggcgagcagcccaagctggtgagaggccacttctgccccatcaagagaaaggccaacagcaccaagagagacagaggcaccctgctgaaggcccagatcagacaccagagcctggacagccagagcgagaacgccaccatcgacctgaacagcgtgctggagagagagttcagcgtgcagagcctgaccagcgtggtgagcgaggagtgcttctacgagaccgagagccacggcaagagctag

SEQ ID NO: 174573 - DNA, 165 bp, Artificial Sequence
  derived and/or modified sequence
atgggcaacagcgacagccagtacaccctgcagggcagcaagaaccacagcaacaccatcaccggcgccaagcagatcccctgcagcctgaagatcagaggcatccacgccaaggaggagaagagcctgcacggctggggccacggcagcaacggcgccggctag

SEQ ID NO: 174574 - DNA, 588 bp, Artificial Sequence
  derived and/or modified sequence
atgggcaacagcgacagccagtacaccctgcagggcagcaagaaccacagcaacaccatcaccggcgccaagcagatcccctgcagcctgaagatcagaggcatccacgccaaggaggagaagagcctgcacggctggggccacggcagcaacggcgccggctacaagagcagaagcctggccagaagctgcctgagccacttcaagagcaaccagccctacgccagcagactgggcggccccacctgcaaggtgagcagaggcgtggcctacagcacccacagaaccaacgcccccggcaaggacttccagggcatcagcgccgccttcagcaccgagaacggcttccacagcgtgggccacgagctggccgacaaccacatcaccagcagagactgcaacggccacctgctgaactgctacggcagaaacgagagcatcgccagcaccccccccggcgaggacagaaagagccccagagtgctgatcaagaccctgggcaagctggacggctgcctgagagtggagttccacaacggcggcaaccccagcaaggtgcccgccgaggactgcagcgagcccgtgtag

SEQ ID NO: 174575 - DNA, 258 bp, Artificial Sequence
  derived and/or modified sequence
atgggcaacagcgacagccagtacaccctgcagggcagcaagaaccacagcaacaccatcaccggcgccaagcagatcccctgcagcctgaagatcagaggcatccacgccaaggaggagaagagcctgcacggctggggccacggcagcaacggcgccggctacaagagcagaagcctggccagaagctgcctgagccacttcaagagcaaccagccctacgccagcagactgggcggccccacctgcaaggtgtag

SEQ ID NO: 174576 - DNA, 162 bp, Artificial Sequence
  derived and/or modified sequence
atgggcaacagcgacagccagtacaccctgcagggcagcaagaaccacagcaacaccatcaccggcgccaagcagatcccctgcagcctgaagatcagaggcatccacgccaaggaggagaagagcctgcacggctggggccacggcagcaacggcgcctag

SEQ ID NO: 174577 - DNA, 1881 bp, Artificial Sequence
  derived and/or modified sequence
atggaaggaccaagagagaatcaagatcccccccccagaagtctggcccgccatctcagtgacgccgatcggctcaggaaggttatccaggaactggtcgacacggaaaaatcctatgtcaaggacctatcatgtctgtttgagttgtatttggaaccactccagaatgagacattcctcacacaagacgagatggaatccctgtttggatcgcttcccgagatgctcgaattccagaaagtgttcctggaaaccctggaggatgggatcagtgcttccagtgatttcaatacactcgaaactccgtcacagttccgcaagttactcttttcactgggcgggtcattcctatattacgctgatcacttcaagctgtactctggcttttgtgcaaatcatatcaaagtccaaaaagttctcgaaagggctaaaaccgataaggcattcaaggccttcctggacgccaggaatcctaccaaacagcactctagtaccctcgagtcttacctgataaagcctgtccagcgagttctgaaatacccactgctgcttaaggagctcgtctcactgaccgatcaagagtccgaggaacattatcacctgaccgaagcattgaaggccatggagaaagttgccagccatatcaatgaaatgcagaaaatatacgaagactatggaacagtattcgaccagctcgtggccgagcagagcgggactgagaaggaagtcacagagctgtcaatgggcgaactccttatgcattctacagtatcctggcttaatccattcctgagcctaggcaaggcacgcaaggacctcgaactgacagttttcgtgtttaaaagagccgtgatcctcgtgtacaaggagaattgcaagctcaagaagaaattgccgtcgaatagccgccctgctcacaattctacagacctagatcccttcaagttcagatggctcatccctatatcagccctccaggttcggctgggaaaccctgccgggacggagaataacagcatttgggagctgatccacacaaaatctgagattgagggtaggccggaaacaattttccagctctgttgctctgacagcgaaagcaaaactaatatcgtcaaagtgatcaggtcaattctgcgcgagaactttaggcggcacattaaatgcgagttgcctcttgagaaaacctgtaaggaccgtctggtcccgttgaagaatagagtccccgtgagcgctaagctggcctcctctcgaagcctcaaggtacttaagaattcctctagcaacgagtggactggcgaaacaggaaagggtacattactagactcagatgaaggctcactgtcatccggaacccagtcgagcggttgtcccacagccgaaggcaggcaagactccaaatctacctctccaggcaagtacccccatcctggcctggctgattttgcggacaacctcatcaaggagagcgacattctctccgatgaagatgacgaccatcgccagaccgtcaaacaaggctcacccacaaaggacattgagatccaattccagagactgagaatttccgaagatcccgacgtacacccagaagctgagcaacagccaggccctgaaagtggggagggccagaagggaggcgaacagcccaaactggtgcggggccacttctgtcctataaaaaggaaagccaattccactaaaagggatcgagggactctgctgaaggcgcaaattaggcaccagagccttgacagtcagtcagaaaacgcaacgattgatttaaacagtgtcttggaaagggaattcagcgtccaatcgctgacttccgtggtaagcgaagagtgcttttacgagactgaatctcacggaaaaagttag

SEQ ID NO: 174578 - DNA, 5106 bp, Artificial Sequence
  derived and/or modified sequence
atgggtaattcagacagtcagtataccctgcaaggaagcaagaatcattctaataccataacaggtgccaagcagattccttgttcactgaagatccgaggcattcatgcaaaagaggagaaaagtcttcacggctggggacacggcagtaacggtgcggggtacaagtcccgttcgctggcacggtcatgtctttcccatttcaagagcaatcaaccctatgcatcaagactcggcggcccaacatgtaaagtatcccggggggtggcctatagcacacaccgtaccaacgccccaggaaaggatttccagggtatctccgcagccttttccaccgagaacggtttccactccgtgggacacgagcttgccgataaccacatcacgtcaagggattgtaacggccaccttctcaactgctacggccgtaacgagtctatagcatcaacacctcccggcgaggacagaaagtctcccagggttctcataaaaaccctggggaaacttgatggatgtttgcgggttgagttccacaacggcggaaacccgagtaaggtccccgccgaggattgttcagagccagtccagctcctgagatattccccaacactggcatccgaaacctctcctgtgccagaggcccgccgcggctcttcagccgactctcttccctcccaccgtccctcacccaccgatagcagactgcgctcttcgaaggggtccagcttaagctcggaaagttcttggtacgacagcccttggggtaatgcaggggagctatctgaagcagaaggatcttttcttgccccaggcatgcctgacccatcactacatgccagtttcccgccaggcgacgctaagaagcctttcaaccaaagctcatctctctcaagcttgagggaactgtataaggacgctaacctcggctcactgagtccatccggcattcggctgtccgatgagtatatgggcacccacgccagtttgtcgaatcgggtgagcttcgcttcagatatcgatgtcccttctagagtggcgcacggagacccaatccagtactcctcctttaccctcccctgccgaaagcccaaagcatttgtggaagatacagccaaaaaggattcactgaaagcgcgcatgagacgcattagcgattggacaggttccctgtcacgtaaaaaaaggaagctgcaggagccacgttctaaggagggttcagattacttcgactcccggtcagatggacttaataccgatgtccaaggctcatcacaggcatcagcctttctgtggagcgggggttctactcaaatcctgtcacagcggagcgagtccacgcatgctatcggttccgacccgctgcgacagaatatctacgaaaacttcatgcgagaactggaaatgtcaagaaccaacactgaaaatatagaaaccagtaccgagacagcagagtcttcttcagagagtctgtcaagcctcgaacaactcgacctgctgtttgaaaaggagcagggagtggtgagaaaggccggctggcttttcttcaagcctctggtcacagtccagaaggagaggaaactggaactcgtcgcacggagaaaatggaagcagtattgggtcacattgaaaggatgcacactacttttttacgagacctacggaaaaaactctatggatcagagtagcgccccaagatgtgcactctttgctgaggatagtatcgttcagtcggtgccagagcaccctaagaaggagaacgtgttctgtctgagcaactcatttggagacgtatatctgtttcaggctaccagccagaccgatctggaaaactgggtcacagctgttcactcagcgtgcgccagcctgtttgctaaaaaacacgggaaagaagataccctgagactgctgaagaatcagacaaagaatctgctccagaagatagatatggactccaagatgaagaagatggctgagctgcagctgagcgttgtgtcagaccccaagaataggaaagccatcgagaatcagattcagcagtgggagcagaacctagaaaagtttcacatggatctgttccggatgcggtgttacctggcctcccttcagggcggcgaactgccaaatcccaagtcactgctcgccgccgccagtcggccctccaaattggccctcggccgattgggtattctctcagtgagctctttccatgccctggtatgtagtcgcgacgattccgctcttaggaagaggacgctgtctcttacacagcgaggacggaacaaaaaaggtattttcagcagtctgaaagggcttgacaccttggccaggaagggcaaggaaaagcgtccttcgatcactcaggtggacgagctcctgcacatctacggctccacagtggatggcgtgcctcgcgataacgcttgggaaatacagacatatgtgcactttcaggataatcacggggtaactgtgggaatcaagccggagcatcgggtcgaggacatcctgacactggcatgcaaaatgcgccagctagagccctctcactatggactccagctgagaaagctggtggacgataacgttgaatactgcatcccagcaccatatgaatacatgcagcaacaggtttacgatgagatcgaggtctttcctctgaacgtctatgatgtccagctcactaaaacaggatcagtgtgtgatttcggatttgctgtgaccgcacaggttgacgagcggcagcatctgtcgcggatcttcatcagtgatgtgcttcccgacggcctcgcctacggagaaggactccggaaaggaaatgaaattatgaccctcaatggtgaagctgttagcgatcttgatctaaaacagatggaggctctgttcagcgaaaagagcgtcggcttgacccttattgcccggcctccagacactaaggccacactttgtaccagttggagtgacagcgacctcttttctcgcgaccagaagtccctgctccctcctccgaaccagagtcaactgctggaggagttcttggacaacttcaagaagaacaccgccaatgatttttcgaatgtgccagacattactactggacttaaaaggagccaaaccgatggtacactcgatcaagtctcacacagagagaagatggaacagacattcaggtccgcagagcagattaccgccctgtgtcgctcattcaatgacagtcaagccaatggaatggaggggccaagagaaaaccaagaccctcctcccagaagccttgcgagacatctcagcgacgccgacagacttcgaaaggtcatccaggagttagtagatacggagaaaagctatgtaaaagacctatcctgtctgttcgaactgtatctcgagccactccagaacgagaccttccttactcaggacgagatggagagcctcttcggttccctgcccgaaatgttagaatttcagaaagtattccttgagaccttggaagatgggatttcagcttcatcagatttcaatactctggagacaccgagccaatttaggaaactcttgtttagcctggggggctccttcttatactacgcagaccacttcaaactgtatagcggattttgcgccaatcacattaaggtgcaaaaggttctagaacgcgccaagaccgacaaggcattcaaagccttcctagacgcccggaatcccactaagcagcattcgagtaccctggaaagctacttgatcaagcccgtgcagcgggttctcaagtacccattgctgctgaaagagctagtttctttaactgatcaggaatcagaagaacactaccacttgacagaagccctgaaggccatggaaaaggtcgcctctcacataaacgagatgcaaaagatttacgaagactacggtactgtcttcgaccagctcgtcgccgagcaaagtggcacagaaaaagaagttaccgagctcagtatgggagaactcctgatgcatagcaccgtgagttggctgaatccttttctgtcactgggcaaagcccggaaagacctagaactcactgtgttcgtctttaaacgcgccgttatcttggtgtataaggaaaattgcaagctgaagaaaaaactaccctcaaatagccgccccgcccataattccacagacctggacccattcaagttcaggtggctgatacccatctcggcacttcaagttaggttgggcaaccccgcagggacggagaacaattccatttgggaacttatccacacaaaatccgagatagaggggagacctgagaccattttccaactgtgttgtagcgactctgagagtaaaactaacatcgttaaagtgatcaggtctatcttaagggaaaactttcggagacacataaaatgcgagttacccctcgaaaaaacttgtaaagatagactggttcccctcaaaaaccgggttccagtgtctgccaagttagcgtcctcacgcagtttaaaagtgctgaagaacagtagcagtaacgaatggacaggggagacgggcaaaggcactctgctggacagcgacgaaggatccctcagctcgggcacccagagctccggttgtcctacggccgagggtagacaagactcaaaaagcacttcacccggaaagtacccccatcccggccttgctgatttcgccgataacctaatcaaggagtccgatatcttaagcgatgaggatgatgatcacagacagaccgtcaagcaggggagccccacaaaggacattgagatccagttccaaagactgcggatttccgaggacccggatgtccatccggaagccgaacagcaaccaggacccgagtccggagaaggccagaagggcggggagcagcctaaactggttagaggccatttttgcccaattaaacggaaggccaatagcacgaagcgcgatagaggaacactgctgaaggcccagatacgccaccagagtttagacagccagtcagagaacgctaccattgacttgaattccgtgctggagcgagagtttagcgttcagtctctgacttccgtggtaagtgaagaatgtttctatgagaccgaatctcatgggaagtcttag

SEQ ID NO: 174579 - DNA, 3234 bp, Artificial Sequence
  derived and/or modified sequence
atggactcaaaaatgaaaaaaatggcggaactgcagctgtccgttgttagtgatccgaagaaccggaaggcgattgagaaccagatacagcagtgggagcaaaacctagaaaaatttcacatggacttattcagaatgcgctgctacttggcttcacttcaaggcggtgagctgccaaaccctaagtctttgctcgctgccgcttccagaccgtctaagctggccctgggcagacttgggatcctgagtgtctcaagcttccacgccttggtgtgctcccgcgacgactccgcgcttcggaaaaggaccttgagcctcactcagaggggcaggaacaaaaaagggattttcagctctctgaaaggcctggacacactggcacgtaagggcaaggaaaaacggcccagcatcactcaaatctttgatagcagcggctcccacggattcagcggaactcagttaccgcagaattcctccaattctagtgaagtggatgagttacttcatatctatggatcaacagttgacggcgtgccccgcgacaatgcgtgggagatacagacttatgtgcactttcaggataatcatggggtgacagtcggtatcaagcctgaacatcgtgtggaggacatattgaccctggcctgtaaaatgagacaactcgagccgagccactatgggttgcagttgagaaaactcgtggatgataatgtggagtattgtataccagccccatatgagtacatgcaacaacaagtctacgatgaaattgaagttttcccattgaacgtgtacgacgttcagctgaccaagaccggcagcgtctgcgactttggattcgccgtgacagcccaggtcgatgagcgacagcatctctcccggattttcatttcagatgtgctgcctgacgggctcgcttatggcgaaggtctcagaaaaggcaatgagataatgaccctgaacggagaggctgtgtcagatcttgacttgaagcagatggaggctctattttcggagaagtctgtgggcctaacactgattgctaggccgcccgacactaaagccacgctctgcacaagttggtccgactccgaccttttcagtcgcgaccagaagtctttgctccctccacctaatcaaagccagcttctggaggaatttctcgacaacttcaagaagaatacagccaatgatttttccaatgtgcctgatatcacgacagggttaaagagaagccagacagacgggaccctggaccaagtgagtcaccgggagaagatggaacaaacttttagatccgctgagcaaattacggcattgtgccggtcttttaacgattcgcaagcgaatggtatggagggcccgagagagaaccaagacccacctcctaggtccctggccagacacctttctgatgccgaccgcctgagaaaagttatccaggagctggtggatacagagaaaagctatgtgaaggacctgagctgtctcttcgagttgtacctggagcccctgcagaatgagacattcttgacacaagacgagatggaaagtcttttcggctcccttcctgagatgctcgaatttcagaaggtgtttctagaaacacttgaggacggaatctctgcaagctctgactttaacacattggagacaccatcacagttccgtaaactgctttttagtctcggcggtagctttctgtattacgctgaccatttcaagctttattccgggttctgcgctaaccacattaaggtgcaaaaagtactggagagggcaaagaccgacaaggcctttaaggcgttcctggacgcccgcaaccccacgaaacaacactctagcaccctggaatcatatttaattaaaccggtgcagcgtgttttgaaataccccttgctgttaaaggagctggtgagtctgacagaccaggagtctgaggaacactaccatcttacagaggccttgaaagcaatggagaaggtggcaagtcatataaacgaaatgcaaaaaatctacgaggattatgggacagttttcgaccagctggtggccgagcagtccggtaccgaaaaagaggtgaccgagctgtcaatgggtgagctactgatgcactcaaccgtgtcatggctgaaccccttcctttccctcgggaaggcgcgaaaggacctagagctgactgtcttcgtctttaagagagccgtaattctcgtatacaaggagaattgcaagctcaagaaaaagctgccctccaattcccgaccagctcataatagcaccgatctcgacccatttaagtttcgctggttaattcctatctctgcattgcaagtccgtcttggcaatcctgccggtactgagaataatagcatttgggagcttatccacacaaagtccgagattgaaggccgccctgagactatttttcaactgtgctgcagcgatagtgagagcaagaccaacatcgtgaaagtgatccggtctatcctgagagagaattttcgtcggcacattaagtgcgaactcccactggagaaaacctgcaaggataggctggtacctctgaaaaaccgcgtgccagtgtccgccaagctagctagttctaggtcactgaaagtcctcaaaaacagcagctccaatgagtggaccggggagaccggcaagggcaccttacttgattccgacgaaggtagcctcagcagtggcacccagagctccggatgcccaactgctgaaggcaggcaagactctaagtccacatctccaggtaagtaccctcatccaggccttgccgacttcgccgataacctaattaaggaatctgacatcttgtctgacgaagatgatgatcacaggcagaccgtcaaacagggctcccctaccaaagacattgagatccaatttcagagactgcgaatatccgaggatcccgatgtgcaccccgaagccgagcagcagccaggccctgagagtggcgaagggcagaagggtggcgaacagcctaagctggtgcgaggccacttttgccccatcaagcgcaaggctaacagtaccaagcgggaccgagggacactcctcaaagcccaaatccgccaccagagcctggacagccagtctgaaaacgcaacaattgacctgaactctgtgttggagagagaatttagtgttcagtctctgacctctgtagtttctgaggaatgcttttacgagaccgagtctcatggcaagagctag

SEQ ID NO: 174580 - DNA, 5988 bp, Artificial Sequence
  derived and/or modified sequence
ggctctgtgtatgaatgacaaggataccttcagccagctcattctggatgaatgaatgattacactaagtgtcctccacattcctctgtgggctcacttcatggactcactttgcgtgcttgttaaatgtgctgtgttgctcccaagaccatgtaaagcctactgaccactaacctccctcacagcagaaactagacgtcaggttaaaatgggcaactccgacagtcagtacacccttcaaggatctaaaaatcatagcaatactattactggtgctaagcaaattccttgctccctgaaaatacgtggcattcatgcaaaagaggaaaagtcattgcatggatggggtcacggaagcaacggagcaggttacaagtccaggtccctggcccgaagctgcctttctcactttaagagtaaccagccttacgcatcgagactcggtggccccacatgcaaggtctccagaggtgttgcctactccacgcacaggacaaatgccccagggaaggatttccagggcatcagtgctgctttctcaactgagaatggcttccactctgttggccacgagctggcagataaccacatcacctccagagactgcaacggacaccttctcaactgctacgggaggaatgagagcattgcctccaccccaccgggcgaagaccgcaagagcccccgagtgctcatcaaaacgctggggaagctggatgggtgtttaagggtcgagttccacaatggtggcaaccccagcaaagtgcctgcagaggactgcagtgagccggtgcagctgctgaggtactcacctaccttagcatcggaaacctcccctgtgcctgaagccaggagggggtccagcgccgattccctgcccagccatcgcccctctcccacggactctcgcctgcggtccagcaaaggcagctccctgagttctgagtcatcctggtacgactccccttggggcaatgctggagagctgagcgaggctgagggctccttcctggcccccggcatgcctgaccccagtctccatgccagcttcccacctggcgatgccaaaaagcctttcaaccaaagctcttccctctcctccctccgggaactgtacaaagatgccaacctggggagcctctccccctcaggtatccgcctttctgatgaatacatgggcacgcatgccagcctgagcaaccgtgtctcttttgcttccgacattgatgtgccctccagagtggcacacggggaccccatccagtacagttccttcactctcccctgtcggaagcccaaagcctttgttgaggatactgcgaagaaggactccctcaaagccaggatgcgacggatcagtgactggacgggaagcctctcaaggaagaaaaggaaactccaggagccgaggtccaaggagggcagtgactactttgacagtcgctctgatggactgaatacagatgtgcagggatcctcccaggcatctgcttttctgtggtcagggggctctactcagatcctgtctcagagaagtgaatccacacatgcgattggcagcgatcccctccggcagaacatttatgagaatttcatgcgagagttggaaatgagcaggaccaacactgagaacatagaaacatctacagaaaccgccgagtccagcagcgagtcactcagctctctggaacagctggatctgctctttgagaaggaacagggggtggtccggaaggccgggtggctcttcttcaagcccctggtcactgtgcagaaggaaaggaagcttgagctggtggcacgaaggaaatggaaacagtactgggtaacgctgaaaggatgcacgctgctgttttatgagacctatgggaagaattccatggatcagagcagtgcccctcggtgtgctctgtttgcagaagacagcatagtgcagtctgttccagagcatcccaagaaagaaaatgtgttctgcctcagcaactcctttggagatgtctaccttttccaggccaccagccagacagatctagaaaactgggtcactgctgtacactctgcttgtgcatccctttttgcaaagaagcatgggaaagaggacacgctgcggctgctgaagaaccagaccaaaaacctgcttcagaagatagacatggacagcaagatgaagaagatggcagagctgcagctgtccgtggtgagcgacccaaagaacaggaaagccatagagaaccagatccagcaatgggagcagaatcttgagaaatttcacatggatctgttcaggatgcgctgctatctggccagcctacaaggtggggagttaccgaacccaaagagtctccttgcagccgccagccgcccctccaagctggccctcggcaggctgggcatcttgtctgtttcctctttccatgctctggtatgttctagagatgactctgctctccggaaaaggacactgtcactgacccagcgagggagaaacaagaagggaatattttcttcgttaaaagggctggacacactggccagaaaaggcaaggagaagagaccttctataactcagatatttgattcaagtggcagccatggattttctggaactcagctacctcaaaactccagtaactccagtgaggtcgatgaacttctgcatatatatggttcaacagtagacggtgttccccgagacaatgcatgggaaatccagacttatgtccactttcaggacaatcacggagttactgtagggatcaagccagagcacagagtagaagatattttgactttggcatgcaagatgaggcagttggaacccagccattatggcctacagcttcgaaaattagtagatgacaatgttgagtattgcatccctgcaccatatgaatatatgcaacaacaggtttatgatgaaatagaagtctttccactaaatgtttatgacgtgcagctcacgaagactgggagtgtgtgtgactttgggtttgcagttacagcgcaggtggatgagcgtcagcatctcagccggatatttataagcgacgttcttcccgatggcctggcgtatggggaagggctgagaaagggcaatgagatcatgaccttaaatggggaagctgtgtctgatcttgaccttaagcagatggaggccctgttttctgagaagagcgtcggactcactctgattgcccggcctccggacacaaaagcaaccctgtgtacatcctggtcagacagtgacctgttctccagggaccagaagagtctgctgccccctcctaaccagtcccaactgctggaggaattcctggataactttaaaaagaatacagccaatgatttcagcaacgtccctgatatcacaacaggtctgaaaaggagtcagacagatggcactctggatcaggtttcccacagggagaaaatggagcagacattcaggagtgctgagcagatcactgcactgtgcaggagttttaacgacagtcaggccaacggcatggaaggaccgcgggagaatcaggatcctcctccgaggtctctggcccgccacctgtctgatgcagaccgcctccgcaaagtcatccaggagcttgtggacacagagaagtcctacgtgaaggatttgagctgcctctttgaattatacttggagccacttcagaatgagacctttcttacccaagatgagatggagtcactttttggaagtttgccagagatgcttgagtttcagaaggtgtttctggagaccctggaggatgggatttcagcatcatctgactttaacaccctagaaaccccctcacagtttagaaaattactgttttcccttggaggctctttcctttattacgcggaccactttaaactgtacagtggattctgtgctaaccatatcaaagtacagaaggttctggagcgagctaaaactgacaaagccttcaaggcttttctggacgcccggaaccccaccaagcagcattcctccacgctggagtcctacctcatcaagccggttcagagagtgctcaagtacccgctgctgctcaaggagctggtgtccctgacggaccaggagagcgaggagcactaccacctgacggaagcactaaaggcaatggagaaagtagcgagccacatcaatgagatgcagaagatctatgaggattatgggaccgtgtttgaccagctagtagctgagcagagcggaacagagaaggaggtaacagaactttcgatgggagagcttctgatgcactctacggtttcctggttgaatccatttctgtctctaggaaaagctagaaaggaccttgagctcacagtatttgtttttaagagagccgtcatactggtttataaagaaaactgcaaactgaaaaagaaattgccctcgaattcccggcctgcacacaactctactgacttggacccatttaaattccgctggttgatccccatctccgcgcttcaagtcagactggggaatccagcagggacagaaaataattccatatgggaactgatccatacgaagtcagaaatagaaggacggccagaaaccatctttcagttgtgttgcagtgacagtgaaagcaaaaccaacattgttaaggtgattcgttctattctgagggagaacttcaggcgtcacataaagtgtgaattaccactggagaaaacgtgtaaggatcgcctggtacctcttaagaaccgagttcctgtttcggccaaattagcttcatccaggtctttaaaagtcctgaagaattcctccagcaacgagtggaccggtgagactggcaagggaaccttgctggactctgacgagggcagcttgagcagcggcacccagagcagcggctgccccacggctgagggcaggcaggactccaagagcacttctcccgggaaatacccacaccccggcttggcagattttgccgacaatctcatcaaagagagtgacatcctgagcgatgaagatgatgaccaccgtcagactgtgaagcagggcagccctactaaagacatcgaaattcagttccagagactgaggatttccgaggacccagacgttcaccccgaggctgagcagcagcctggcccggagtcgggtgagggtcagaaaggaggagagcagcccaaactggtccgggggcacttctgccccattaaacgaaaagccaacagcaccaagagggacagaggaactttgctcaaggcgcagatccgtcaccagtcccttgacagtcagtctgaaaatgccaccatcgacctaaattctgttctagagcgagaattcagtgtccagagtttaacatctgttgtcagtgaggagtgtttttatgaaacagagagccacggaaaatcatagtatgattcaatccagatatgggttaaattcctcattttacttttaaactggtggtaaagtggaaattgcaaaaaaaaaaaaaaaaaaaaactgttcattcctgggttttgtgcagtatacattttcccacaaaatggttgtaaagatttaagttattttaatttattgtggatcagaaacctagatgaaactggtcagaatctgtaaattacttagtttatatccactttgagcaggtatcaaatgatttaggatccttaaaattacattctaataattaagttatgtggaaaaagtaaggctggggaagtcgtgattaatagttttcaaagggccattttttaaaatcctctgggcattttctttcagctgtttgttagtttttgctttatttaaagcatatttaagttattttaatgtggtttaggggcaaaatgtgcagatacttcatttttgtaagatagattgtaatagatgctgtttatactaaacatgtcataactatctatacagtatatattaaaagaaagcttgtactgtatcttatttgatgatatttattttctctgccaagctgtatagtaaaaggaaaataagtcaca

SEQ ID NO: 174581 - DNA, 5193 bp, Artificial Sequence
  derived and/or modified sequence
atgggcaactctgactctcagtatactctgcagggatccaagaatcacagtaatactatcaccggggcaaagcagattccctgctctctgaaaataagggggattcatgcaaaagaagaaaaatcactccacggttggggacatggatctaatggcgcgggctacaaaagtcgttccctggctcgatcatgcctgtctcacttcaagtcgaaccagccctatgctagtcgactggggggacccacctgtaaagtgtctagaggagtagcttattccacacatagaacaaatgcaccagggaaagactttcagggcatctcagcggcgttttcaacagagaacggtttccactcggtcgggcacgagctcgctgataaccacatcacttcacgagactgcaatggccacctactcaactgttatggtagaaatgagtccatagcaagtaccccccccggtgaagacagaaagtccccccgagtcctgattaaaacgctgggtaagctggacgggtgcttaagggtggagtttcacaatggcgggaatccctccaaggtgcccgccgaggattgcagcgaacccgtccagctcctgaggtactcccctacactagcttctgagacgtctcccgtgccggaggctaggaggggctccagcgcggattcgctgcccagtcataggcctagtcccacggactcgagactcagatccagtaagggcagttctctgtcaagtgagagtagttggtatgacagtccctggggtaacgccggcgagctctcagaggccgaaggcagctttctcgcacctggcatgcctgacccaagcctccacgcctcattccctccgggtgacgcaaaaaagccgttcaatcagagttcttctttgagttccctgcgcgaactttacaaggatgccaacctcggctctctctcgcctagcggcattcgattatccgacgagtatatgggcacacacgcctcactctccaatcgcgttagcttcgcttcagacattgatgtgccttcaagagtcgcccatggcgatcctatccaatattctagtttcactctcccttgcaggaagccaaaggcctttgtagaagacacagccaagaaggactctttaaaagcaagaatgaggcggattagcgactggacaggcagtctgtccaggaagaagaggaaactccaggaacccagaagcaaagaaggcagtgattacttcgacagccgctctgacggcctgaatacagatgtgcaaggcagctcacaagcttctgccttcctgtggtctggtggaagtacgcagattctgtctcagagatcagaaagtacccatgccatcggatcagatccactgcggcagaacatatatgagaactttatgcgggaactcgaaatgtcccgtacaaacactgaaaatattgagacaagtacagagactgccgagtcctctagcgagagtctatccagcctggaacagctggacttactgtttgagaaagaacagggcgttgtccgcaaggccggatggttgttctttaagccactcgttaccgtgcagaaagagcgcaaattagaactggttgcgcggcgaaagtggaagcagtactgggtgaccttaaagggatgtactctgcttttttacgagacctacggtaaaaactctatggaccagtctagtgcaccacgatgcgccctttttgccgaagactccattgtgcagagtgtgcccgagcaccccaagaaagagaacgtgttttgtcttagtaactctttcggtgatgtgtacctctttcaagcaacgtctcagactgacttggaaaattgggttacggccgttcatagcgcctgtgcaagtttattcgcgaaaaaacatggaaaagaggatactctgcggttgctcaaaaatcaaactaagaacctgttgcagaagatagacatggatagtaagatgaaaaaaatggctgaactgcagctcagtgtggtgtcagatccaaagaatagaaaggcaatcgaaaaccaaatacagcagtgggaacaaaatctcgaaaagttccatatggaccttttccgcatgcgctgctatctcgcctcactgcagggcggcgaactcccaaaccccaaaagcctgctggcagcagcctcacggccgtcaaagttagcacttgggagactggggatcctctcagtcagcagtttccacgctctggtgtgttcgcgcgatgattcggcccttcggaaaaggacgttatcactcactcagagaggtcggaacaagaaaggaatcttctcatccctgaagggtctcgacactctggctcggaaggggaaagagaaacgaccatcaattacacaggtggacgaactgctgcacatatacggtagcacagtcgatggcgtcccccgagacaacgcttgggagattcaaacttatgtccatttccaggacaaccacggggtcactgtggggatcaagcccgagcatcgggtagaggacattctgaccctggcctgcaagatgagacagctggagccatctcactatggccttcagctccggaagctcgtcgacgacaacgttgagtactgcatccctgctccatatgagtacatgcagcaacaggtgtacgatgaaattgaggtgttcccactaaacgtgtacgatgtgcagctgactaagaccggatctgtgtgtgactttggattcgctgttaccgcacaggtggatgaaagacagcatctgtccaggatctttatctcagacgtgctgccagatggcttagcatatggcgaaggcttacgaaagggcaacgaaatcatgacccttaacggggaagctgtaagcgacctcgacttaaaacagatggaagctcttttttcagagaagagtgtgggactcaccttaattgcgcggccaccagacactaaggccaccctctgcaccagctggagtgattccgacctgttctcccgcgatcagaagtctttgctcccaccaccgaatcagtcacagctactggaagaattccttgacaacttcaagaagaataccgcgaacgattttagcaatgtgcccgacatcacaacaggtctcaagagaagccaaacggatggtacactagatcaggtgagccatagagagaaaatggagcagacatttaggagcgccgagcaaatcaccgcactgtgcagaagcttcaacgactcacaggccaacggcatggagggcccaagagagaatcaggatccccctccccggtcccttgctagacatctcagtgacgctgatagactgcgtaaagtaatccaagaattagtggacacagagaaaagctacgtgaaggacttgtcgtgtctgttcgagctataccttgaacctcttcaaaatgaaacttttctgacgcaggatgagatggaaagcctattcggatcactgccagaaatgctggaattccagaaagtcttcttagagacgctggaggacggcatctcagctagctctgacttcaacacactcgagacaccatcccagttccgaaagctccttttctctctcgggggctcttttctttattatgcagaccacttcaagctgtactccggattttgcgccaaccacatcaaagttcagaaggtgttggagagggcaaagaccgacaaggcgtttaaggcgtttctcgatgcacgtaatcctacgaagcagcatagcagtactctcgagagttatctgatcaagccagtgcaacgggtcctcaaatacccccttctcctgaaggaattagtctcactgacagaccaggagagcgaggaacactaccatctgactgaagccttgaaggccatggagaaggtggcatcccacattaacgaaatgcagaagatttacgaggactatggaaccgtgttcgatcagctggtagccgagcagtctggtaccgaaaaggagcaaccagagtggtcttctgaagtcatggatgtgttagacccccgtggtaaactgaccaaaggaactctggaggaaccgagaacactggtgacagagctctcaatgggcgagctgctgatgcatagtaccgtaagctggctcaaccctttcctctcgttaggaaaggccagaaaagacctggagcttacagttttcgtgtttaaacgggccgtcatcctggtgtacaaagagaactgcaagttgaagaagaaactgccctccaattcccggccagcccacaacagcacagatctggacccattcaaatttaggtggttgattccgatctccgcacttcaggtgagactgggtaacccggcgggaactgaaaacaattcaatctgggagctcatccataccaaatctgaaatcgagggccgtccagagaccatcttccaactgtgctgcagcgacagcgaaagtaagacaaatattgtgaaagtgattagatcaatccttagggaaaatttcaggcgacacataaaatgtgaactgcccctggagaaaacttgcaaagacagactggttcccctgaaaaatagagtccccgttagcgctaagcttgccagcagtcgctccctgaaagtgttaaagaatagcagctctaacgagtggaccggagagaccgggaaggggacgctcctggattccgacgaaggatctctctcctctggaacccagagctccggctgtcccacggctgaggggagacaggacagtaagagcacatcacctggtaaatacccccacccaggattagccgattttgcggataatcttattaaagagtccgacatcctgtctgacgaagacgatgaccacagacagacggtcaagcaggggtccccaactaaagacatcgagattcaattccagcgcttacgcatttcggaggaccctgatgtccaccctgaagctgaacaacagcccggcccagagtccggggaggggcagaagggaggggaacaacctaagttggttcggggtcacttctgtccaatcaagcgcaaggcaaattcaactaagagagatagaggcactctgctgaaagctcagatccgacaccaatcactcgactctcaatcagaaaacgcgactatagacctaaatagcgtgctggaacgggaattttccgtacagagcctcacgtctgtggtcagcgaagagtgtttctatgagaccgaaagtcacggcaaaagctag

SEQ ID NO: 174582 - DNA, 3042 bp, Artificial Sequence
  derived and/or modified sequence
atggacctctttaggatgcggtgctaccttgcctccttacaggggggggagctcccaaacccgaaatcattgctggccgccgcctcccgccccagtaagctggcactgggcaggctgggcatacttagtgtgtctagttttcatgctcttgtttgctctcgggatgattcagcattacgtaagcgaacactgtccttgacacagcgaggtaggaataaaaagggcatcttttcttccttgaagggacttgatacgctggccaggaagggaaaagaaaagagaccaagtatcacccaggtggacgagctgctccacatttatggatcaacagttgacggggtgccgcgagataacgcatgggaaatccagacttacgttcacttccaggacaatcacggcgtgactgttggaatcaagcctgagcaccgcgtcgaggatatactaacactggcttgtaaaatgcgccagctcgagccttcacactacggcctccaattgcgtaagctggttgatgacaacgttgaatactgcatccccgccccgtacgagtatatgcagcagcaagtttatgatgagatcgaggtgtttcccttaaacgtgtacgacgtccagttaaccaagacaggatcagtgtgcgatttcggattcgccgtaactgcccaagtcgatgagcggcagcacctcagtagaatctttatctccgatgttttgccagatggtctggcttacggcgaaggtctgagaaaaggcaatgaaatcatgacacttaacggcgaggcagtatccgatctggacctgaagcagatggaggcactattctcagagaaaagcgtggggttaacgctgattgcccgaccccccgatactaaagcaacactctgcacatcctggtctgacagtgatctcttctccagagaccagaagagcctgctgcctccacctaatcagtcccagttgctggaagaatttttagataatttcaaaaagaatactgccaacgactttagtaacgtgccagacattaccacaggccttaagcggtctcagaccgacgggacgctggaccaggtatctcaccgcgagaagatggaacagacctttcgcagcgcagagcaaatcacagctctttgtagatctttcaatgattcgcaagccaacggcatggaaggcccccgcgagaaccaggaccctccaccaaggtctctagccagacacctgtcagatgccgaccggttacgcaaggttatacaagaactggtggacactgagaagagctatgttaaggatctgtcatgtctgtttgagttgtatcttgaaccgttgcagaatgagaccttcctcacacaggatgaaatggagagtcttttcggtagcctccctgaaatgctggagttccagaaagtctttctcgaaaccctcgaggacggaattagtgcttcgtccgatttcaacacactggaaactccgtcacagtttaggaaattgttgttttcacttggaggctcctttctttactatgcagaccattttaaattatacagtggcttctgcgccaatcatatcaaggtgcagaaagtgctggagcgagcaaagaccgacaaagccttcaaagcatttctcgatgccaggaacccgactaaacagcacagcagcacccttgagagctacctgatcaagccagtccagcgggtcctgaagtaccctctgttgctgaaagagctagttagtctgaccgaccaggagtctgaagagcactaccacctgaccgaagcgctgaaagcaatggagaaggtcgcctctcatattaacgagatgcaaaaaatttatgaggactatggaaccgtgtttgaccagctggtggcagagcagagtgggacagaaaaggaagtaactgaactgtctatgggagaactgctcatgcattccactgtaagttggcttaacccattccttagtctggggaaagcccgcaaggacctggagcttaccgtatttgtgtttaagagagccgtaattcttgtctacaaggaaaattgcaaacttaaaaagaaactcccatcaaactcccgacctgcccacaattctaccgacctggacccttttaagtttcgctggttgattcctatatccgctcttcaagtaagactggggaaccctgccggcacagagaataacagcatctgggaacttatccatacgaaaagcgagatcgaagggcggccagagaccatctttcaactgtgctgttcagattctgaaagcaaaacaaacatagtgaaagtgatcagatcaattttgagagaaaacttccgtcgccatataaagtgtgaacttcctcttgagaagacctgtaaggaccggctggtgcccttaaaaaacagagtcccagtttccgctaaactcgcaagctcccgctctctcaaagtactgaaaaactcgtcgtccaatgaatggactggagaaaccggcaaggggacccttctggacagtgacgagggcagcctcagctctggcacacaaagttccgggtgtccgaccgccgaaggccggcaggacagtaagtccacatctcctgggaagtacccacaccccgggctcgccgatttcgcggataacctgatcaaagagtccgatatcctttctgatgaggacgacgaccaccggcagacagttaaacagggctcacccaccaaagacatagagatccagttccagagactgcgcattagcgaagacccagatgtgcatcccgaagctgaacagcagccaggacctgaatccggcgagggccagaagggcggtgagcaaccgaaactggtgagggggcatttttgccccatcaagcgaaaggcaaattcaaccaagagggacaggggcacactgctcaaggcacagattaggcatcagagtcttgattcccagagcgaaaatgctacgattgatctcaacagcgttctcgagagagaattctcagtgcaaagccttacatctgtggtgtcagaggaatgcttttacgaaacagagtcacacggaaaatcttag

SEQ ID NO: 174583 - DNA, 5106 bp, Artificial Sequence
  derived and/or modified sequence
atggggaacagcgacagccagtacaccctgcagggctccaagaaccattcgaacaccataacaggcgctaaacaaataccatgctccctgaagatccgcggtattcacgccaaagaggaaaaatcccttcacggctggggccacggatccaacggggcaggctacaaatcccgaagcctcgctcgctcctgtctgtcccacttcaagagtaaccagccctatgcttctaggttaggtgggccgacttgcaaagtcagcagaggggtggcttatagtacacataggacgaacgccccgggaaaggacttccaaggcatcagcgcagccttttctaccgaaaacggcttccacagtgtgggtcatgagctagcggataaccacattacctcccgggactgtaatggtcacctacttaattgttacgggcggaatgagagtatcgcttccacgcctccaggtgaagatagaaagagcccgcgggtgctgatcaagaccctcggcaagttggatgggtgtctacgggtggagtttcacaatggtgggaacccctcaaaggttccagccgaggactgctcggaacccgtccagctactgagatattcccctacactcgcttcagagacgtcccctgtgcctgaggctaggcgtggctcctctgcagactccctaccgagtcaccgaccttctccaaccgactcccgccttaggagcagtaagggttcttcgttaagttctgagtccagttggtacgattcaccttggggcaatgccggcgagctgagcgaggccgaagggtcttttttggccccaggcatgccagaccccagcctccatgccagcttcccgcctggtgatgcaaaaaagcccttcaaccagtctagctctctaagttcactgcgtgagctatacaaagacgctaatctggggagtctgagcccctcaggcatccgattgagcgacgagtacatggggacacatgcctctttaagtaaccgggtctcttttgcatcagatatcgacgttccctctagggttgcccacggggaccctatacagtatagtagctttacgctgccatgccggaagcctaaggcattcgtggaagatactgctaagaaggattctctcaaggctaggatgaggcggatcagcgactggaccgggtcactatcacgcaaaaagcgtaagctgcaagaaccccggtccaaagaggggtcagactatttcgactcccgcagcgatgggctgaacaccgacgtccaagggagcagccaggctagtgctttcctgtggtctggaggctctactcagatccttagtcagaggtcggagtctactcacgccattggaagtgatcccttgagacagaacatatacgagaattttatgagggagctggagatgtctaggacaaacacagagaatattgaaacatccaccgaaacggctgagagctcttcagaatctctgagtagtctcgagcagttagaccttctgtttgagaaggaacagggagtcgttagaaaggctgggtggctattctttaagccgcttgtgaccgtgcagaaagaacgaaagctagaactggttgcgcggcggaaatggaagcagtattgggtgacattgaagggctgtacattgctcttttacgagacgtacggcaagaattctatggaccagtccagcgctccacggtgcgcactctttgccgaagattccattgtacaatctgtcccagagcaccctaagaaagagaatgtgttttgtctcagtaattcatttggcgacgtgtatctcttccaggcaaccagtcaaacagacctcgaaaattgggtaaccgctgtccatagcgcctgtgcatccctgtttgcgaagaagcacgggaaagaagatactctacgattactcaagaaccagaccaaaaacctcctgcaaaaaatagacatggactcaaagatgaagaaaatggcggaactgcagctgtccgtggtcagtgacccaaagaatcgtaaggccatagaaaatcagatacaacagtgggagcagaacctcgagaagttccatatggatttatttcggatgcggtgttatttagcctcattgcagggaggggaacttcctaaccccaagtcccttctcgccgcagcctccaggccttccaagttggcacttgggcggttgggcattctcagcgtcagttcatttcacgcgttggtgtgcagcagggatgatagcgcactccgtaagcgcactctgtccttaactcagagggggcgaaataagaaaggcatcttcagcagtctcaaaggattggacacccttgctcgcaaaggtaaagaaaaaaggccaagcataacacaggtagacgagctgttacatatatacggaagtaccgtggatggtgtacctcgcgacaatgcttgggagatacaaacctacgtgcatttccaggataaccatggcgtgaccgtcgggattaaacctgagcaccgggtagaggatatactgactctggcttgtaagatgcgccagctcgagccatcacactacggtctgcagttaaggaaactagtggacgataatgtagaatactgcataccggcaccttatgagtatatgcagcagcaggtgtatgacgagatcgaagtgttcccactcaacgtctatgacgttcagttgaccaagacagggtccgtttgtgattttggtttcgctgtcacagctcaggttgacgaacgtcagcacctgtcgcgcatattcatttccgacgtcctacctgacggtcttgcatacggggaggggctccggaaaggcaatgaaatcatgacactaaacggcgaagcggtgtcagaccttgacctaaaacagatggaggctcttttttcagaaaaaagcgttggcctgacgttgatcgctagaccacctgacacgaaggccactctgtgtacaagctggtcagacagcgacctgtttagtagggatcagaagtctctcttacctccaccaaaccagagccagctccttgaagagttcctagataactttaagaaaaataccgccaacgatttctctaacgttcctgatataactaccggactgaagagatcacagaccgacggcactttagatcaagtgagccaccgagagaagatggaacaaaccttccggtcagcggaacaaatcaccgctctgtgccgctccttcaacgactcacaagcaaacgggatggagggcccacgcgaaaatcaggatccaccccctcggtcactggcccgacatctgtctgatgctgaccggctgcgtaaagtcatccaagaactcgtggatactgaaaaatcttacgtgaaagacctgtcatgcctcttcgaactgtacctcgagcctctgcagaacgagacattcctgacccaggatgagatggagagtctttttggatctctgcctgaaatgcttgagtttcaaaaagtgtttctggagaccctggaagatggcattagcgcctccagcgattttaacacgctggaaactccaagtcagttcagaaaattgctgttcagcttaggtggtagcttcttatactacgctgaccacttcaaactttattccggcttttgcgccaatcatattaaagtgcaaaaagtgctcgagagggccaagacggataaagcttttaaagcattcctggacgctcggaatccgaccaaacagcactctagcacgctggagagctatctaattaagccggtgcagcgcgtattgaaatatcctctgctgctcaaagaactagtgtcccttactgatcaggagtccgaagaacattatcacctgaccgaggccctgaaagctatggagaaggttgcatctcatataaatgaaatgcagaagatttatgaggactatggaacagtgttcgaccagttagtggcagagcagtctggcaccgagaaggaagtgacagaactctcaatgggagagctcctgatgcactcgaccgtcagctggcttaatccattcctgtctcttggcaaggcgcgaaaagacctcgagttaactgtgttcgtgttcaagcgtgccgtcattctggtgtacaaggagaattgtaagctcaaaaaaaagctcccttccaattcaagacccgcccataattctacagacctcgatccatttaaattccgatggttgattccgatctctgccttacaggtcaggctcggaaatcccgccggaactgaaaacaactccatatgggaactgatccacacgaagagcgaaatcgaaggccgcccggagaccattttccaactgtgctgttctgattcggaaagcaaaacaaacatagttaaagtgattagatcgattttgcgggagaacttcaggcgacatattaaatgcgagctgcccctcgaaaagacctgcaaagatcggctggtaccactgaagaaccgcgtgccggtatccgcaaagctcgccagcagtcggtctcttaaagttttgaagaacagttcttctaatgagtggacaggcgagacaggcaagggaacgttgttggattcagatgaggggagcctcagctcagggacccagtctagtggttgtcccaccgctgaaggccggcaggatagcaagagtacatccccgggcaagtatcctcacccaggattggctgactttgccgataaccttatcaaggagagtgatatactgtctgacgaagacgatgaccatcgacagaccgtaaagcaggggtctccaaccaaggacattgaaatccagtttcagaggcttaggattagcgaagaccctgatgtccaccccgaggccgagcagcagccaggccccgaatccggcgaaggtcagaagggtggcgagcagccaaaactcgttaggggacacttctgtcctatcaagcgcaaggccaacagtactaaaagagacaggggaactttactgaaggcacagattagacaccagtctctcgacagtcaaagcgaaaacgctacaatcgacttgaattccgtgctggagagagagttttctgtccaatcccttacatccgtagtgtcagaggagtgtttttatgaaacagagagccacggaaaatcgtag

SEQ ID NO: 174584 - DNA, 4104 bp, Artificial Sequence
  derived and/or modified sequence
atgggaaacagtgactcacagtacacacttcaaggatctaaaaatcactctaacacaataacgggcgccaagcagattccatgctctctgaaaattagaggcatccatgcgaaggaggaaaaatctttgcacggctggggtcacggcagcaacggcgcagggtacaagagccgttccctcgcacgcagctgcctgtcccacttcaaatcaaaccagccttatgcttcccgcctgggaggccctacttgcaaggtatctagaggcgtcgcttactccacacatcggacaaacgccccaggcaaggactttcagggaatttccgctgctttcagcaccgaaaacggttttcattcagttgggcacgaactcgccgacaatcacatcacctctagggactgcaatggacacctcctgaactgctacggtagaaacgagtccattgcttccaccccccctggggaggatcggaaatctccgcgcgtgttaatcaagaccttaggtaagctcgatgggtgtctcagggtagagtttcacaacggcgggaacccttctaaggtgcctgccgaggattgttcggagccagtccaactgctccggtactcccctacactggcctcggaaacttcccctgtcccagaagcccggaggggcagtagcgcggactccctgccaagccaccggcctagtccaaccgattcccgcctgcgctccagcaagggatcttcactgtccagtgagagcagttggtacgactcaccttgggggaacgcaggtgagttaagcgaagccgaagggagctttctggcccctggtatgcctgatccgagcttgcacgccagttttcctccaggggatgccaagaagccgtttaatcagagctctagcctatcctcccttagggagttgtacaaagacgctaacctgggctccctgtccccatccggaattaggctgtcagatgagtacatgggcacccatgcctcactctcgaaccgcgtgagctttgcatccgacatcgacgtgcctagcagggtcgcccacggcgatccaatacagtactccagctttactttgccttgccgaaagcccaaggcatttgtggaagacactgctaaaaaggattctctgaaggcaagaatgcggcgaatctcggactggactggtagcctttcccgcaagaaacggaagctccaggaaccacgatccaaggaaggatccgactactttgatagccgctctgatgggctgaacacagatgtgcagggctcctctcaggcgtcagccttcctgtggtctggggggagtacacagatccttagtcagagatccgagagtactcacgcgattgggtcagacccactccggcaaaacatctacgagaatttcatgagagagctggagatgtcgcggaccaatactgagaatattgaaacatccacagaaacagcagagtctagttctgagagtctgtctagcctcgaacagttagatctcctcttcgagaaagaacagggtgtcgtcaggaaagcaggatggctatttttcaagcccctagtaactgtacagaaggaacggaagctggaactggtcgcacgacgcaaatggaaacaatactgggttacactgaagggctgcaccctactgttttacgagacgtatggcaagaattcaatggaccagtcgtccgctccccgttgcgctctcttcgcagaggactcaatcgtgcagtctgttccggagcaccctaagaaagagaacgttttctgcttatcgaatagctttggcgatgtttatctctttcaagctacatctcagaccgatttagagaactgggtcacggccgtgcattctgcctgcgcaagcttgttcgccaaaaagcatggcaaagaggacacactacggctcttgaagaaccagacaaaaaatctcttgcagaagatcgacatggacagcaagatgaaaaaaatggcagaactgcaactgtctgttgtctctgacccaaagaaccggaaagctatcgagaatcagatccagcagtgggagcagaatctggaaaagttccacatggacctatttcgaatgcgttgttatctggcctccttacagggcggcgagcttcccaatcccaagagtctactggccgcagcgtcgagaccaagcaaattggcactggggcggttgggaatactatctgtctcatcgttccatgcgctggtatgctctcgcgacgattccgcattaagaaaacgcactctgtccctcactcagcgtggccgaaataagaagggaatttttagtagcctgaaaggcctagacacactggcccggaaggggaaggaaaagcggccgtctatcacacaggttgacgagctgctgcatatttacgggtccaccgtggatggagtccctcgcgacaatgcgtgggaaatccaaacatacgtgcacttccaggacaaccatggtgtgactgtggggatcaagcctgaacaccgtgtggaagacatcttgaccctggcatgtaagatgcgacagctggagccttctcactacgggctccagcttaggaaactggttgatgataacgtggaatattgcatcccagccccttacgaatatatgcaacagcaggtgtacgacgagatcgaggtatttccactaaatgtgtacgatgtccagttgaccaaaactggatccgtttgtgactttggtttcgccgtgaccgcacaggtggacgagcgccaacatttgtccaggatcttcatctccgacgtgctccctgacggtctagcatatggtgaaggattgaggaaggggaacgagattatgacattgaacggcgaggcagtatccgatctagatctcaagcaaatggaggccctctttagcgaaaaatcggtggggctcacgttaatagccaggccgcctgacacaaaggcaactctttgtacaagctggagcgactcagacctgttttcgcgagaccagaagtcgcttctaccaccccccaatcaatctcaattactcgaggaatttctggataactttaagaagaatacagccaacgacttctctaatgtcccagacataactacaggtctcaaacgctctcagaccgatggtacacttgatcaagtgtctcacagagaaaaaatggaacagacctttcgttccgctgaacagatcaccgctctgtgtcgttctttcaacgactctcaggctaatggaatggaaggccccagggaaaaccaggatccaccccccagaagccttgctaggcacctgagcgacgctgataggctgcgaaaggttattcaggaactggtcgacacggagaaatcttacgtgaaagatctctcttgccttttcgagctctacctagagccccttcagaacgaaacatttcttacccaagacgagatggaatcactttttgggtctctgccagaaatgcttgaattccaaaaagttttcctcgagactcttgaagatggcatatccgctagctcagatttcaataccctcgagaccccttctcagttcagaaaactcctgttctctctaggaggctcgttcctgtattacgcagatcattttaagctgtattcagggttttgcgccaaccatatcaaggtacagaaggtgttggagcgggccaaaaccgataaggctttcaaggctttcctagacgctaggaatcctacgaagcagcacagctctaccctggagtcttatttgattaagccggttcaaagggtattgaagtaccccctccttttaaaggaactggtctccctgacggatcaggagtccgaggagcattatcatctgaccgaggcgttaaaggctatggagaaagtcgcctcacacatcaacgaaatgcagaagatatatgaggattatggcacagtgtttgaccagctggtcgctgaacagagcgggaccgagaaagaagtcaccgaactctccatgggtgaactactgatgcactcaacagtttcatggctcaacccttttctctccctgggaaaagcacggaaggatctggagttgaccgtgttcgtattcaagcgcgccgtaatcttggtgtacaaagagaactgctag

SEQ ID NO: 174585 - DNA, 5844 bp, Artificial Sequence
  derived and/or modified sequence
ggcaggcccatcgaccccagggaaggtccgggtaggccacccctggatggtagagatcattttggcagaccccctgtggacatacgcgagaatttagtaaggcctggtatcgaccacctgggtagaagagatcacttcggatttaatccagaaaagccatgggggcaccgcggggactttgatgagcgcgagcatcgcgtcctgccagtttatggcggccctaagggactgcacgaagagcggggcaggtttagatcgggcaattaccgctttgaccccagaagcgggccttggaatcggggattcgggcaggaggttcaccgcgactttgatgaccggagacgaccgtgggagcgccagcgggatagagatgaccgcgactttgacttttgtagagagatgaatggtaaccggctaggccgggacaggatccaaaatacctgggtgccccccccccacgcgagagtgttcgactatttcgagggcgcaacctctcagcgcaaaggcgataacgtgccacaggtcaatggggagaatacagagcggcacgctcagccacccccaataccggtgcagaacgacccagaactatacgaaaaactgacttcgtcgaacgagattaacaaggaaaagtccgatacggtcgctgatattgaatccgaaccggtggtggaatcaaccgagactgaaggtacaccactaacctccttgacggctgagaccagacgccaggtgaagatgggcaactcagattcgcagtacacactgcagggttccaagaaccacagcaatacaataacaggggccaagcagattccctgctcactcaagatacgcggtattcatgcaaaggaagaaaagtctctccatggctggggccacgggagcaacggagctggatataaatccagaagcctagcaagatcatgtctctcgcattttaaaagcaaccagccatacgcgtcacggctaggagggccaacctgtaaagtttctcggggagttgcctatagcacccaccgaactaatgccccaggcaaggacttccaggggatcagtgcagcgttcagtacagaaaacggatttcacagcgttggccatgaacttgcagataaccacatcaccagtagggattgtaatgggcacttgctcaattgttacggccgtaatgagtctatagcatctacccctccaggcgaggatcgcaagtctccacgggtgctcataaaaaccctgggtaaactggacggatgccttcgcgtcgaatttcacaacggcgggaacccctctaaggtccctgctgaggactgctccgagcctgtgcaactgttgcggtatagccccacgctggcctcagaaacgtccccagtgccggaggccaggcgggggtcatccgccgattctctcccatcacatcgtccatctcctacagatagcaggctgcggtctagcaaggggagctctctttccagcgagtcttcctggtatgactcaccctggggcaatgctggagagctttccgaggcagaagggagcttcctggccccgggcatgcctgatccgtccctccacgccagctttccccccggtgacgcaaaaaagcctttcaaccagagctctagcctgtcctccttgcgagaactgtacaaggatgctaacttaggcagcctttccccaagcggaattaggctatccgacgagtatatggggactcatgcttctttgtcgaatagggtctctttcgcttcggatatcgacgtccctagccgggtggcccacggggacccgattcagtattcatcattcactttgccatgccgcaagcctaaggccttcgtggaagatacagctaaaaaagattctcttaaggcccgcatgcgacgcatatctgattggacagggtccctctctcggaaaaaaaggaagctgcaggagccccgatcaaaggagggatcagattattttgactcaaggagtgatggactcaacacggatgttcaaggctcttcccaggcctcggccttcctctggagcgggggaagcactcaaatactctctcaacgcagcgaatctacacacgccatcgggtccgacccactgcgccagaatatatacgagaacttcatgcgtgaattagaaatgagccgcaccaataccgagaacattgagacatctactgagactgccgagtcctcctccgagtcactgagcagcttagaacagttagacctcttattcgagaaagaacagggcgtcgtgcggaaagccggctggctcttttttaaaccactcgtgacggtgcagaaagaaagaaagctagagttggttgcccgtcgaaagtggaagcaatactgggttacacttaagggctgtactctgctgttttatgaaacctatggcaagaatagtatggaccagagctcagccccaaggtgcgcactgtttgccgaagactccattgtccagtcggtgcctgagcatccgaagaaagagaatgtgttttgccttagtaacagctttggtgatgtgtacctgttccaagctacttctcaaactgacttagaaaactgggtgaccgcggtccattctgcctgcgccagtttattcgctaagaaacatggcaaagaggatacactaagacttctgaagaaccaaacaaagaacctcctgcagaaaattgatatggattctaagatgaaaaagatggcagaactgcagctgtctgtcgtgagtgaccctaagaataggaaagccatcgagaatcaaatccaacagtgggagcagaacctggagaagttccacatggacctctttagaatgcgctgttatttggctagcctccaggggggggaactgccaaatcccaagagcctattggcggctgcctcgcgcccctccaaattggcacttgggcggctaggcatactcagcgtcagttcctttcacgcgctagtatgctcgagggacgattctgccctgcgaaagcgaactttgtcgctcacgcagcgaggtcggaataaaaagggaatcttttcttccttgaaagggttagatacactcgcccggaagggtaaggaaaaaaggccgtccataactcaggtcgatgagctccttcacatttatggatctacagtggacggggtacctagagacaacgcttgggagatccaaacctacgtgcatttccaggacaatcatggcgttaccgtcggaatcaagccggagcacagggtcgaagacatccttacactggcctgcaaaatgcggcagctggaaccgtctcattacggactgcagctccgtaagcttgtcgacgataacgtggagtattgcattcccgccccctatgagtacatgcagcagcaggtctatgatgagatcgaagtgttccccctgaatgtgtacgacgtccagcttaccaaaacgggcagtgtgtgtgactttgggttcgcggtcacagcccaagtcgatgagaggcagcacctgtcgcgaatcttcatctcggacgtgctgcccgacggccttgcttatggcgaaggcctccgaaaaggcaacgagatcatgaccctgaatggcgaagcagtgtcagacctcgatttgaagcagatggaggcactgtttagcgagaagtctgtggggttgacacttatcgcgagacccccggacaccaaggcaactctgtgtactagttggtctgactcggatctgttttctcgggaccagaaatcccttctccctcctcccaaccagagccagctgctggaggagttcctggataattttaagaagaatacggctaacgacttctcgaacgttcctgatattaccacgggcttgaaacgcagtcagacagatgggaccctcgaccaggtcagccatagagaaaaaatggaacagaccttccgcagcgctgagcagattactgccctctgtcggtcgtttaatgactcacaggccaacggaatggaagggccccgtgagaatcaggaccctccgccacgctcattggcacgtcatttgtccgatgctgatagactgagaaaagtgatccaggaactggtcgataccgagaaatcctatgttaaggacctgtcatgcctgttcgagctgtacctcgagccactccagaacgaaacatttctgacacaggatgagatggagtcactgtttggcagtctccccgagatgctcgagttccagaaggtattcctcgagactctggaggacggaatctccgcctccagtgattttaatacactggagacgcccagtcagttccgtaagctcctattttccctggggggatccttcctgtactacgcagatcacttcaagctgtatagcggcttttgtgccaaccatatcaaagtgcagaaggtattggagcgggccaaaacagataaggcattcaaagcattcttggatgcaagaaatccgaccaagcaacacagctccactctggaatcctacctcattaaaccagttcagagagtgctgaagtatccactgctcttgaaggaactggtgagcctcaccgatcaggagtctgaggaacactatcatttgaccgaggccctgaaggctatggagaaggtggctagtcacatcaatgaaatgcagaagatctacgaagactacggaacggtgtttgaccaactcgtggccgagcagagcggtactgagaaggaggtgaccgagctatcaatgggcgaactgcttatgcacagcaccgtgagctggttaaaccccttcttatccttgggaaaggctcgaaaagatctggaactgactgtgttcgtgttcaaaagagctgtgattcttgtgtataaagagaattgcaagctgaaaaagaaacttccttctaattcacgccctgcacacaattctaccgacttggatccttttaaatttcgttggttaattcctatcagcgccctacaggtaaggctcggaaatcccgctggtacggaaaataattctatctgggagctgattcacacaaaaagcgaaattgagggccggccagagactattttccaattgtgctgcagcgatagcgagtcaaaaacgaatatcgtgaaggttattcggtcaatcctcagggagaactttagaagacatattaaatgtgagcttcctcttgagaaaacctgcaaggatcgcctcgtgccactaaagaaccgggtgcctgttagtgccaagctggccagctccagatccttgaaggtgctcaaaaattcgtcatccaacgagtggacgggcgagaccggaaagggcacccttttagacagcgacgagggatctctatcttcgggcacccagagctcaggttgtccgacggctgagggtaggcaggacagcaagagtacctcgcccggaaaatatcctcaccccgggctggctgacttcgcagataatctaattaaagagtcagacattctcagcgatgaggacgacgatcatcggcagacagtcaaacaggggagcccgacgaaggatatcgaaatacagttccagagactgaggatatctgaggatcccgatgtgcatccggaagccgagcaacagcccggacccgagagtggggaggggcagaagggcggagagcagccaaagcttgttaggggtcacttttgcccaattaagagaaaagccaatagcacgaaaagggacagaggaactctgcttaaggcgcagatccgacatcagtcactggacagccagtcagaaaacgccaccatcgacctcaactccgttctggaacgggaattttcggtccagtcactcacttctgtcgtttctgaagagtgtttttacgagaccgagtcccacgggaaatcctag

SEQ ID NO: 174586 - DNA, 165 bp, Artificial Sequence
  derived and/or modified sequence
atgggaaactcagacagccagtatactctgcaaggctccaaaaatcattctaataccattaccggggcgaaacagatcccctgttcacttaaaattaggggtattcacgcaaaagaggaaaaaagcctgcacgggtgggggcatggatccaatggcgctgggtag

SEQ ID NO: 174587 - DNA, 588 bp, Artificial Sequence
  derived and/or modified sequence
atggggaactccgactcacagtataccctgcaaggcagcaagaaccactccaatacgatcaccggggctaagcagattccatgtagcttaaagattcgggggatccacgctaaggaagaaaagagcttacacgggtggggacacggctctaacggagcgggttataagagtcggagtctggccaggagttgcctgtcccacttcaagagcaaccagccctatgcctctagactcggtgggcccacttgcaaagtaagcagaggcgttgcttactctacccatagaacgaatgctcctgggaaagacttccaggggatctccgcagccttttccacagaaaatggttttcattcagtggggcacgaactagccgacaatcatataacatccagagattgcaatggacatctcctaaattgttacggtaggaatgagtcaatagcaagtaccccccccggtgaggataggaagtcaccccgcgtactgatcaagaccttaggcaagctggatgggtgccttagagttgaatttcacaatggcgggaaccctagcaaggtgccagctgaagattgcagcgaacctgtctag

SEQ ID NO: 174588 - DNA, 258 bp, Artificial Sequence
  derived and/or modified sequence
atggggaacagcgactcgcagtacactctgcaggggtccaagaatcactctaatacgatcaccggagcgaagcagatcccctgtagcttgaaaatcagaggcattcacgcaaaggaagaaaaatccttgcacggctggggtcatggatccaatggtgctggatacaaatcacggagcctcgctcgttcttgtctctctcactttaagtcaaatcaaccttacgctagcagattgggcggccccacatgtaaagtgtag

SEQ ID NO: 174589 - DNA, 162 bp, Artificial Sequence
  derived and/or modified sequence
atggggaattctgactcacagtacaccctgcagggcagcaagaaccacagcaatacaatcacaggcgccaaacagattccctgttcgctgaaaattaggggcatccacgccaaggaggagaaatccttacacggttggggacatgggagcaacggcgcttag

SEQ ID NO: 174590 - DNA, 1881 bp, Artificial Sequence
  derived and/or modified sequence
atggagggcccccgggagaaccaggaccccccacccaggagcctggcccggcacctgagtgatgctgaccggctgaggaaggtgatccaggagctggtggacacagagaagagctatgtgaaggacctgagctgcctgtttgagctgtacctggagcccctgcagaatgagaccttcctgacccaggatgagatggagagcctgtttggcagcctgcctgagatgctggagttccagaaggtgttcctggagaccctggaggatggcatcagcgccagcagtgacttcaacaccctggagacccccagccagttcaggaagctgctcttcagcctgggcggcagcttcctgtactatgctgaccacttcaagctgtacagcggcttctgtgccaaccacatcaaggtgcagaaggtgctggagcgggccaagacagacaaggccttcaaggccttcctggatgccaggaaccccaccaagcagcacagcagcaccctggagagctacctgatcaagcctgtgcagagggtgctgaagtaccccctgctgctgaaggagctggtgtccctgacagaccaggagagcgaggagcactaccacctgacagaggccctgaaggccatggagaaggtggccagccacatcaatgagatgcagaagatctatgaagattatggaacagtgtttgaccagctggtggccgagcagagcggcacagagaaggaggtgacagagctgtccatgggagagctgctgatgcacagcacagtgtcctggctgaaccccttcctgagcctgggcaaggccaggaaggacctggagctgactgtgtttgtgttcaagagagctgtgatcctggtgtacaaggagaactgcaagctgaagaagaagctgcccagcaacagcaggcctgcccacaacagcacagacctggaccccttcaagttccgctggctgatccccatcagcgccctgcaggtgcggctgggcaacccagctggaacagagaacaacagcatctgggagctgatccacaccaagtcagaaattgagggccggcctgagaccatcttccagctgtgctgcagcgacagcgagagcaagaccaacatcgtgaaggtgatccgcagcatcctgcgggagaacttccgccgccacatcaagtgtgagctgcccctggagaagacctgcaaggaccggctggtgcccctgaagaacagagtgcctgtgtctgccaagctggccagcagccgcagcctgaaggtgctgaagaacagcagcagcaatgagtggacaggagaaacaggcaagggcaccctgctggacagtgatgagggcagcctgagcagcggcacccagagcagcggctgccccacagctgagggccggcaggacagcaagagcaccagccctgggaagtacccccaccctggcctggccgactttgctgacaacctgatcaaggagagtgacatcctgagtgatgaagatgatgaccaccggcagacagtgaagcagggcagccccaccaaggacatcgagatccagttccagaggctgcgcatcagcgaggaccctgatgtgcaccctgaggccgagcagcagcccggccctgagagcggggagggccagaagggcggggagcagcccaagctggtgcggggccacttctgccccatcaagaggaaggccaacagcaccaagagggaccggggcaccctgctgaaggcccagatccgccaccagagcctggacagccagagtgaaaatgccaccatcgacctgaacagcgtgctggagcgggagttctctgtgcagagcctgacctctgtggtgtctgaggagtgcttctatgaaacagagagccacggcaagagctag

SEQ ID NO: 174591 - DNA, 5106 bp, Artificial Sequence
  derived and/or modified sequence
atgggcaacagcgacagccagtacaccctgcagggcagcaagaaccacagcaacaccatcactggagccaagcagatcccctgcagcctgaagatccggggcatccacgccaaggaggagaagagcctgcacggctggggccacggcagcaatggagctggctacaagagccgcagcctggcccggagctgcctgagccacttcaagagcaaccagccctatgccagccggctgggcggccccacctgcaaggtgtcccggggcgtggcctacagcacccacaggaccaatgcccctgggaaggacttccagggcatctctgctgccttcagcacagaaaatggcttccacagcgtgggccacgagctggccgacaaccacatcaccagccgggactgcaatggccacctgctgaactgctatggaagaaatgaaagcatcgccagcaccccacctggagaggacaggaagagcccccgggtgctgatcaagaccctgggcaagctggatggctgcctgcgggtggagttccacaatggaggcaaccccagcaaggtgcctgctgaggactgcagcgagcctgtgcagctgctgcgctacagccccaccctggccagcgagaccagccctgtgcctgaggcccggcggggcagcagcgctgacagcctgcccagccaccggcccagccccacagacagccggctgcggagcagcaagggcagcagcctgagcagcgagagctcctggtatgacagcccctggggcaatgctggggagctgtctgaggccgagggcagcttcctggcccctggcatgccagaccccagcctgcacgccagcttccccccaggagatgccaagaagcccttcaaccagagcagcagcctgagcagcctgcgggagctgtacaaggatgccaacctgggcagcctgagccccagcggcatccggctgagtgatgagtacatgggcacccacgccagcctgagcaacagagtgtcctttgccagtgacattgatgtgcccagccgggtggcccatggagaccccatccagtacagcagcttcaccctgccctgcaggaagcccaaggcctttgtggaggacacagccaagaaggacagcctgaaggccaggatgaggcgcatcagtgactggacaggcagcctgagcaggaagaagaggaagctgcaggagcccaggagcaaggagggcagtgactactttgacagcagaagtgatggcctgaacacagatgtgcagggcagcagccaggccagcgccttcctgtggagcggcggcagcacccagatcctgagccagaggtctgagagcacccacgccatcggcagtgaccccctgcggcagaacatctatgagaacttcatgagggagctggagatgagcaggaccaacacagagaacatcgagaccagcacagaaacagctgagagcagcagcgagagcctgagcagcctggagcagctggacctgctgtttgagaaggagcagggcgtggtgaggaaggccggctggctgttcttcaagcccctggtgacagtgcagaaggagaggaagctggagctggtggcccggaggaagtggaagcagtactgggtgaccctgaagggctgcaccctgctcttctatgagacctacggcaagaacagcatggaccagagcagcgccccccgctgtgccctgtttgctgaagattccatcgtgcagagcgtgcctgagcaccccaagaaggaaaatgtgttctgcctgagcaacagctttggagatgtgtacctgttccaggccaccagccagacagacctggagaactgggtgacagctgtgcacagcgcctgtgccagcctgtttgccaagaagcacggcaaggaggacaccctgcggctgctgaagaaccagaccaagaacctgctgcagaagattgacatggacagcaagatgaagaagatggccgagctgcagctgtctgtggtgtctgaccccaagaacaggaaggccatcgagaaccagatccagcagtgggagcagaacctggagaagttccacatggacctcttcaggatgcgctgctacctggccagcctgcagggcggggagctgcccaaccccaagagcctgctggccgccgccagccggcccagcaagctggccctgggccgcctgggcatcctgtctgtgagcagcttccacgccctggtgtgcagcagagatgattctgccctgaggaagaggaccctgagcctgacccagagaggaagaaacaagaagggcatcttcagcagcctgaagggcctggacaccctggccaggaagggcaaggagaagaggcccagcatcacccaggtggatgagctgctgcacatctacggcagcacagtggatggagtgccccgggacaatgcctgggagatccagacctacgtgcacttccaggacaaccacggcgtgacagtgggcatcaagccagagcaccgggtggaggacatcctgaccctggcctgcaagatgaggcagctggagcccagccactacggcctgcagctgaggaagctggtggatgacaacgtggagtactgcatcccagccccctatgagtacatgcagcagcaggtgtatgatgaaattgaggtgttccccctgaatgtgtatgatgtgcagctgaccaagacaggctctgtgtgtgactttggatttgctgtgacagcccaggtggatgagcggcagcacctgagccgcatcttcatcagtgatgtgctgcctgatggcctggcctatggagagggcctgaggaaaggaaatgagatcatgaccctgaatggagaggccgtgtctgacctggacctgaagcagatggaggccctcttcagcgagaagtctgtgggcctgaccctgattgcccggcccccagacaccaaggccaccctgtgcacctcctggagcgacagcgacctcttcagccgggaccagaagagcctgctgcccccacccaaccagagccagctgctggaggagttcctggacaacttcaagaagaacacagccaatgacttcagcaatgtgcctgacatcaccaccggcctgaagaggagccagacagatggcaccctggaccaggtgagccaccgggagaagatggagcagaccttccgctctgctgagcagatcacagccctgtgccgctccttcaatgacagccaggccaacggcatggagggcccccgggagaaccaggaccccccacccaggagcctggcccggcacctgagtgatgctgaccggctgaggaaggtgatccaggagctggtggacacagagaagagctatgtgaaggacctgagctgcctgtttgagctgtacctggagcccctgcagaatgagaccttcctgacccaggatgagatggagagcctgtttggcagcctgcctgagatgctggagttccagaaggtgttcctggagaccctggaggatggcatcagcgccagcagtgacttcaacaccctggagacccccagccagttcaggaagctgctcttcagcctgggcggcagcttcctgtactatgctgaccacttcaagctgtacagcggcttctgtgccaaccacatcaaggtgcagaaggtgctggagcgggccaagacagacaaggccttcaaggccttcctggatgccaggaaccccaccaagcagcacagcagcaccctggagagctacctgatcaagcctgtgcagagggtgctgaagtaccccctgctgctgaaggagctggtgtccctgacagaccaggagagcgaggagcactaccacctgacagaggccctgaaggccatggagaaggtggccagccacatcaatgagatgcagaagatctatgaggactatggcaccgtgtttgaccagctggtggccgagcagagcggcacagagaaggaggtgacagagctgtccatgggagagctgctgatgcacagcacagtgtcctggctgaaccccttcctgagcctgggcaaggccaggaaggacctggagctgactgtgtttgtgttcaagagagctgtgatcctggtgtacaaggagaactgcaagctgaagaagaagctgcccagcaacagcaggcctgcccacaacagcacagacctggaccccttcaagttccgctggctgatccccatcagcgccctgcaggtgcggctgggcaacccagctggaacagagaacaacagcatctgggagctgatccacaccaagtcagaaattgagggccggcctgagaccatcttccagctgtgctgcagcgacagcgagagcaagaccaacatcgtgaaggtgatccgcagcatcctgcgggagaacttcagaagacacatcaagtgtgagctgcccctggagaagacctgcaaggaccggctggtgcccctgaagaacagagtgcctgtgtctgccaagctggccagcagccgcagcctgaaggtgctgaagaacagcagcagcaatgagtggacaggagagaccgggaagggcaccctgctggacagtgatgagggcagcctgagcagcggcacccagagcagcggctgccccacagctgagggccggcaggacagcaagagcaccagccctgggaagtacccccaccctggcctggccgactttgctgacaacctgatcaaggagagtgacatcctgagtgatgaagatgatgaccaccggcagacagtgaagcagggcagccccaccaaggacatcgagatccagttccagaggctgcgcatcagtgaagatcctgatgtgcaccctgaggccgagcagcagcccggccctgagagcggggagggccagaagggcggggagcagcccaagctggtgcggggccacttctgccccatcaagaggaaggccaacagcaccaagagggaccggggcaccctgctgaaggcccagatccgccaccagagcctggacagccagagtgaaaatgccaccatcgacctgaacagcgtgctggagcgggagttctctgtgcagagcctgacctctgtggtgtctgaggagtgcttctatgaaacagagagccacggcaagagctag

SEQ ID NO: 174592 - DNA, 3234 bp, Artificial Sequence
  derived and/or modified sequence
atggacagcaagatgaagaagatggccgagctgcagctgtctgtggtgtctgaccccaagaacaggaaggccatcgagaaccagatccagcagtgggagcagaacctggagaagttccacatggacctcttcaggatgcgctgctacctggccagcctgcagggcggggagctgcccaaccccaagagcctgctggccgccgccagccggcccagcaagctggccctgggccgcctgggcatcctgtctgtgagcagcttccacgccctggtgtgcagcagagatgattctgccctgaggaagaggaccctgagcctgacccagagaggaagaaacaagaagggcatcttcagcagcctgaagggcctggacaccctggccaggaagggcaaggagaagaggcccagcatcacccagatctttgacagcagcggcagccacggcttcagcggcacccagctgccccagaacagcagcaacagcagcgaggtggatgagctgctgcacatctacggcagcacagtggatggagtgccccgggacaatgcctgggagatccagacctacgtgcacttccaggacaaccacggcgtgacagtgggcatcaagccagagcaccgggtggaggacatcctgaccctggcctgcaagatgaggcagctggagcccagccactacggcctgcagctgaggaagctggtggatgacaacgtggagtactgcatcccagccccctatgagtacatgcagcagcaggtgtatgatgaaattgaggtgttccccctgaatgtgtatgatgtgcagctgaccaagacaggctctgtgtgtgactttggatttgctgtgacagcccaggtggatgagcggcagcacctgagccgcatcttcatcagtgatgtgctgcctgatggcctggcctatggagagggcctgaggaaaggaaatgagatcatgaccctgaatggagaggccgtgtctgacctggacctgaagcagatggaggccctcttcagcgagaagtctgtgggcctgaccctgattgcccggcccccagacaccaaggccaccctgtgcacctcctggagcgacagcgacctcttcagccgggaccagaagagcctgctgcccccacccaaccagagccagctgctggaggagttcctggacaacttcaagaagaacacagccaatgacttcagcaatgtgcctgacatcaccaccggcctgaagaggagccagacagatggcaccctggaccaggtgagccaccgggagaagatggagcagaccttccgctctgctgagcagatcacagccctgtgccgctccttcaatgacagccaggccaacggcatggagggcccccgggagaaccaggaccccccacccaggagcctggcccggcacctgagtgatgctgaccggctgaggaaggtgatccaggagctggtggacacagagaagagctatgtgaaggacctgagctgcctgtttgagctgtacctggagcccctgcagaatgagaccttcctgacccaggatgagatggagagcctgtttggcagcctgcctgagatgctggagttccagaaggtgttcctggagaccctggaggatggcatcagcgccagcagtgacttcaacaccctggagacccccagccagttcaggaagctgctcttcagcctgggcggcagcttcctgtactatgctgaccacttcaagctgtacagcggcttctgtgccaaccacatcaaggtgcagaaggtgctggagcgggccaagacagacaaggccttcaaggccttcctggatgccaggaaccccaccaagcagcacagcagcaccctggagagctacctgatcaagcctgtgcagagggtgctgaagtaccccctgctgctgaaggagctggtgtccctgacagaccaggagagcgaggagcactaccacctgacagaggccctgaaggccatggagaaggtggccagccacatcaatgagatgcagaagatctatgaggactatggcaccgtgtttgaccagctggtggccgagcagagcggcacagagaaggaggtgacagagctgtccatgggagagctgctgatgcacagcacagtgtcctggctgaaccccttcctgagcctgggcaaggccaggaaggacctggagctgactgtgtttgtgttcaagagagctgtgatcctggtgtacaaggagaactgcaagctgaagaagaagctgcccagcaacagcaggcctgcccacaacagcacagacctggaccccttcaagttccgctggctgatccccatcagcgccctgcaggtgcggctgggcaacccagctggaacagagaacaacagcatctgggagctgatccacaccaagtcagaaattgagggccggcctgagaccatcttccagctgtgctgcagcgacagcgagagcaagaccaacatcgtgaaggtgatccgcagcatcctgcgggagaacttcagaagacacatcaagtgtgagctgcccctggagaagacctgcaaggaccggctggtgcccctgaagaacagagtgcctgtgtctgccaagctggccagcagccgcagcctgaaggtgctgaagaacagcagcagcaatgagtggacaggagagaccgggaagggcaccctgctggacagtgatgagggcagcctgagcagcggcacccagagcagcggctgccccacagctgagggccggcaggacagcaagagcaccagccctgggaagtacccccaccctggcctggccgactttgctgacaacctgatcaaggagagtgacatcctgagtgatgaagatgatgaccaccggcagacagtgaagcagggcagccccaccaaggacatcgagatccagttccagaggctgcgcatcagtgaagatcctgatgtgcaccctgaggccgagcagcagcccggccctgagagcggggagggccagaagggcggggagcagcccaagctggtgcggggccacttctgccccatcaagaggaaggccaacagcaccaagagggaccggggcaccctgctgaaggcccagatccgccaccagagcctggacagccagagtgaaaatgccaccatcgacctgaacagcgtgctggagcgggagttctctgtgcagagcctgacctctgtggtgtctgaggagtgcttctatgaaacagagagccacggcaagagctag

SEQ ID NO: 174593 - DNA, 5193 bp, Artificial Sequence
  derived and/or modified sequence
atgggcaacagcgacagccagtacaccctgcagggcagcaagaaccacagcaacaccatcactggagccaagcagatcccctgcagcctgaagatccggggcatccacgccaaggaggagaagagcctgcacggctggggccacggcagcaatggagctggctacaagagccgcagcctggcccggagctgcctgagccacttcaagagcaaccagccctatgccagccggctgggcggccccacctgcaaggtgtcccggggcgtggcctacagcacccacaggaccaatgcccctgggaaggacttccagggcatctctgctgccttcagcacagaaaatggcttccacagcgtgggccacgagctggccgacaaccacatcaccagccgggactgcaatggccacctgctgaactgctatggaagaaatgaaagcatcgccagcaccccacctggagaggacaggaagagcccccgggtgctgatcaagaccctgggcaagctggatggctgcctgcgggtggagttccacaatggaggcaaccccagcaaggtgcctgctgaggactgcagcgagcctgtgcagctgctgcgctacagccccaccctggccagcgagaccagccctgtgcctgaggcccggcggggcagcagcgctgacagcctgcccagccaccggcccagccccacagacagccggctgcggagcagcaagggcagcagcctgagcagcgagagctcctggtatgacagcccctggggcaatgctggggagctgtctgaggccgagggcagcttcctggcccctggcatgccagaccccagcctgcacgccagcttccccccaggagatgccaagaagcccttcaaccagagcagcagcctgagcagcctgcgggagctgtacaaggatgccaacctgggcagcctgagccccagcggcatccggctgagtgatgagtacatgggcacccacgccagcctgagcaacagagtgtcctttgccagtgacattgatgtgcccagccgggtggcccatggagaccccatccagtacagcagcttcaccctgccctgcaggaagcccaaggcctttgtggaggacacagccaagaaggacagcctgaaggccaggatgaggcgcatcagtgactggacaggcagcctgagcaggaagaagaggaagctgcaggagcccaggagcaaggagggcagtgactactttgacagcagaagtgatggcctgaacacagatgtgcagggcagcagccaggccagcgccttcctgtggagcggcggcagcacccagatcctgagccagaggtctgagagcacccacgccatcggcagtgaccccctgcggcagaacatctatgagaacttcatgagggagctggagatgagcaggaccaacacagagaacatcgagaccagcacagaaacagctgagagcagcagcgagagcctgagcagcctggagcagctggacctgctgtttgagaaggagcagggcgtggtgaggaaggccggctggctgttcttcaagcccctggtgacagtgcagaaggagaggaagctggagctggtggcccggaggaagtggaagcagtactgggtgaccctgaagggctgcaccctgctcttctatgagacctacggcaagaacagcatggaccagagcagcgccccccgctgtgccctgtttgctgaagattccatcgtgcagagcgtgcctgagcaccccaagaaggaaaatgtgttctgcctgagcaacagctttggagatgtgtacctgttccaggccaccagccagacagacctggagaactgggtgacagctgtgcacagcgcctgtgccagcctgtttgccaagaagcacggcaaggaggacaccctgcggctgctgaagaaccagaccaagaacctgctgcagaagattgacatggacagcaagatgaagaagatggccgagctgcagctgtctgtggtgtctgaccccaagaacaggaaggccatcgagaaccagatccagcagtgggagcagaacctggagaagttccacatggacctcttcaggatgcgctgctacctggccagcctgcagggcggggagctgcccaaccccaagagcctgctggccgccgccagccggcccagcaagctggccctgggccgcctgggcatcctgtctgtgagcagcttccacgccctggtgtgcagcagagatgattctgccctgaggaagaggaccctgagcctgacccagagaggaagaaacaagaagggcatcttcagcagcctgaagggcctggacaccctggccaggaagggcaaggagaagaggcccagcatcacccaggtggatgagctgctgcacatctacggcagcacagtggatggagtgccccgggacaatgcctgggagatccagacctacgtgcacttccaggacaaccacggcgtgacagtgggcatcaagccagagcaccgggtggaggacatcctgaccctggcctgcaagatgaggcagctggagcccagccactacggcctgcagctgaggaagctggtggatgacaacgtggagtactgcatcccagccccctatgagtacatgcagcagcaggtgtatgatgaaattgaggtgttccccctgaatgtgtatgatgtgcagctgaccaagacaggctctgtgtgtgactttggatttgctgtgacagcccaggtggatgagcggcagcacctgagccgcatcttcatcagtgatgtgctgcctgatggcctggcctatggagagggcctgaggaaaggaaatgagatcatgaccctgaatggagaggccgtgtctgacctggacctgaagcagatggaggccctcttcagcgagaagtctgtgggcctgaccctgattgcccggcccccagacaccaaggccaccctgtgcacctcctggagcgacagcgacctcttcagccgggaccagaagagcctgctgcccccacccaaccagagccagctgctggaggagttcctggacaacttcaagaagaacacagccaatgacttcagcaatgtgcctgacatcaccaccggcctgaagaggagccagacagatggcaccctggaccaggtgagccaccgggagaagatggagcagaccttccgctctgctgagcagatcacagccctgtgccgctccttcaatgacagccaggccaacggcatggagggcccccgggagaaccaggaccccccacccaggagcctggcccggcacctgagtgatgctgaccggctgaggaaggtgatccaggagctggtggacacagagaagagctatgtgaaggacctgagctgcctgtttgagctgtacctggagcccctgcagaatgagaccttcctgacccaggatgagatggagagcctgtttggcagcctgcctgagatgctggagttccagaaggtgttcctggagaccctggaggatggcatcagcgccagcagtgacttcaacaccctggagacccccagccagttcaggaagctgctcttcagcctgggcggcagcttcctgtactatgctgaccacttcaagctgtacagcggcttctgtgccaaccacatcaaggtgcagaaggtgctggagcgggccaagacagacaaggccttcaaggccttcctggatgccaggaaccccaccaagcagcacagcagcaccctggagagctacctgatcaagcctgtgcagagggtgctgaagtaccccctgctgctgaaggagctggtgtccctgacagaccaggagagcgaggagcactaccacctgacagaggccctgaaggccatggagaaggtggccagccacatcaatgagatgcagaagatctatgaggactatggcaccgtgtttgaccagctggtggccgagcagagcggcacagagaaggagcagcctgagtggagcagcgaggtgatggatgtgctggacccccggggcaagctgaccaagggcaccctggaggagcccaggaccctggtgacagagctgtccatgggagagctgctgatgcacagcacagtgtcctggctgaaccccttcctgagcctgggcaaggccaggaaggacctggagctgactgtgtttgtgttcaagagagctgtgatcctggtgtacaaggagaactgcaagctgaagaagaagctgcccagcaacagcaggcctgcccacaacagcacagacctggaccccttcaagttccgctggctgatccccatcagcgccctgcaggtgcggctgggcaacccagctggaacagagaacaacagcatctgggagctgatccacaccaagtcagaaattgagggccggcctgagaccatcttccagctgtgctgcagcgacagcgagagcaagaccaacatcgtgaaggtgatccgcagcatcctgcgggagaacttccgccgccacatcaagtgtgagctgcccctggagaagacctgcaaggaccggctggtgcccctgaagaacagagtgcctgtgtctgccaagctggccagcagccgcagcctgaaggtgctgaagaacagcagcagcaatgagtggacaggagaaacaggcaagggcaccctgctggacagtgatgagggcagcctgagcagcggcacccagagcagcggctgccccacagctgagggccggcaggacagcaagagcaccagccctgggaagtacccccaccctggcctggccgactttgctgacaacctgatcaaggagagtgacatcctgagtgatgaagatgatgaccaccggcagacagtgaagcagggcagccccaccaaggacatcgagatccagttccagaggctgcgcatcagcgaggaccctgatgtgcaccctgaggccgagcagcagcccggccctgagagcggggagggccagaagggcggggagcagcccaagctggtgcggggccacttctgccccatcaagaggaaggccaacagcaccaagagggaccggggcaccctgctgaaggcccagatccgccaccagagcctggacagccagagtgaaaatgccaccatcgacctgaacagcgtgctggagcgggagttctctgtgcagagcctgacctctgtggtgtctgaggagtgcttctatgaaacagagagccacggcaagagctag

SEQ ID NO: 174594 - DNA, 3042 bp, Artificial Sequence
  derived and/or modified sequence
atggacctcttcaggatgcgctgctacctggccagcctgcagggcggggagctgcccaaccccaagagcctgctggccgccgccagccggcccagcaagctggccctgggccgcctgggcatcctgtctgtgagcagcttccacgccctggtgtgcagcagagatgattctgccctgaggaagaggaccctgagcctgacccagagaggaagaaacaagaagggcatcttcagcagcctgaagggcctggacaccctggccaggaagggcaaggagaagaggcccagcatcacccaggtggatgagctgctgcacatctacggcagcacagtggatggagtgccccgggacaatgcctgggagatccagacctacgtgcacttccaggacaaccacggcgtgacagtgggcatcaagccagagcaccgggtggaggacatcctgaccctggcctgcaagatgaggcagctggagcccagccactacggcctgcagctgaggaagctggtggatgacaacgtggagtactgcatcccagccccctatgagtacatgcagcagcaggtgtatgatgaaattgaggtgttccccctgaatgtgtatgatgtgcagctgaccaagacaggctctgtgtgtgactttggatttgctgtgacagcccaggtggatgagcggcagcacctgagccgcatcttcatcagtgatgtgctgcctgatggcctggcctatggagagggcctgaggaaaggaaatgagatcatgaccctgaatggagaggccgtgtctgacctggacctgaagcagatggaggccctcttcagcgagaagtctgtgggcctgaccctgattgcccggcccccagacaccaaggccaccctgtgcacctcctggagcgacagcgacctcttcagccgggaccagaagagcctgctgcccccacccaaccagagccagctgctggaggagttcctggacaacttcaagaagaacacagccaatgacttcagcaatgtgcctgacatcaccaccggcctgaagaggagccagacagatggcaccctggaccaggtgagccaccgggagaagatggagcagaccttccgctctgctgagcagatcacagccctgtgccgctccttcaatgacagccaggccaacggcatggagggcccccgggagaaccaggaccccccacccaggagcctggcccggcacctgagtgatgctgaccggctgaggaaggtgatccaggagctggtggacacagagaagagctatgtgaaggacctgagctgcctgtttgagctgtacctggagcccctgcagaatgagaccttcctgacccaggatgagatggagagcctgtttggcagcctgcctgagatgctggagttccagaaggtgttcctggagaccctggaggatggcatcagcgccagcagtgacttcaacaccctggagacccccagccagttcaggaagctgctcttcagcctgggcggcagcttcctgtactatgctgaccacttcaagctgtacagcggcttctgtgccaaccacatcaaggtgcagaaggtgctggagcgggccaagacagacaaggccttcaaggccttcctggatgccaggaaccccaccaagcagcacagcagcaccctggagagctacctgatcaagcctgtgcagagggtgctgaagtaccccctgctgctgaaggagctggtgtccctgacagaccaggagagcgaggagcactaccacctgacagaggccctgaaggccatggagaaggtggccagccacatcaatgagatgcagaagatctatgaggactatggcaccgtgtttgaccagctggtggccgagcagagcggcacagagaaggaggtgacagagctgtccatgggagagctgctgatgcacagcacagtgtcctggctgaaccccttcctgagcctgggcaaggccaggaaggacctggagctgactgtgtttgtgttcaagagagctgtgatcctggtgtacaaggagaactgcaagctgaagaagaagctgcccagcaacagcaggcctgcccacaacagcacagacctggaccccttcaagttccgctggctgatccccatcagcgccctgcaggtgcggctgggcaacccagctggaacagagaacaacagcatctgggagctgatccacaccaagtcagaaattgagggccggcctgagaccatcttccagctgtgctgcagcgacagcgagagcaagaccaacatcgtgaaggtgatccgcagcatcctgcgggagaacttcagaagacacatcaagtgtgagctgcccctggagaagacctgcaaggaccggctggtgcccctgaagaacagagtgcctgtgtctgccaagctggccagcagccgcagcctgaaggtgctgaagaacagcagcagcaatgagtggacaggagagaccgggaagggcaccctgctggacagtgatgagggcagcctgagcagcggcacccagagcagcggctgccccacagctgagggccggcaggacagcaagagcaccagccctgggaagtacccccaccctggcctggccgactttgctgacaacctgatcaaggagagtgacatcctgagtgatgaagatgatgaccaccggcagacagtgaagcagggcagccccaccaaggacatcgagatccagttccagaggctgcgcatcagtgaagatcctgatgtgcaccctgaggccgagcagcagcccggccctgagagcggggagggccagaagggcggggagcagcccaagctggtgcggggccacttctgccccatcaagaggaaggccaacagcaccaagagggaccggggcaccctgctgaaggcccagatccgccaccagagcctggacagccagagtgaaaatgccaccatcgacctgaacagcgtgctggagcgggagttctctgtgcagagcctgacctctgtggtgtctgaggagtgcttctatgaaacagagagccacggcaagagctag

SEQ ID NO: 174595 - DNA, 4104 bp, Artificial Sequence
  derived and/or modified sequence
atgggcaacagcgacagccagtacaccctgcagggcagcaagaaccacagcaacaccatcactggagccaagcagatcccctgcagcctgaagatccggggcatccacgccaaggaggagaagagcctgcacggctggggccacggcagcaatggagctggctacaagagccgcagcctggcccggagctgcctgagccacttcaagagcaaccagccctatgccagccggctgggcggccccacctgcaaggtgtcccggggcgtggcctacagcacccacaggaccaatgcccctgggaaggacttccagggcatctctgctgccttcagcacagaaaatggcttccacagcgtgggccacgagctggccgacaaccacatcaccagccgggactgcaatggccacctgctgaactgctatggaagaaatgaaagcatcgccagcaccccacctggagaggacaggaagagcccccgggtgctgatcaagaccctgggcaagctggatggctgcctgcgggtggagttccacaatggaggcaaccccagcaaggtgcctgctgaggactgcagcgagcctgtgcagctgctgcgctacagccccaccctggccagcgagaccagccctgtgcctgaggcccggcggggcagcagcgctgacagcctgcccagccaccggcccagccccacagacagccggctgcggagcagcaagggcagcagcctgagcagcgagagctcctggtatgacagcccctggggcaatgctggggagctgtctgaggccgagggcagcttcctggcccctggcatgccagaccccagcctgcacgccagcttccccccaggagatgccaagaagcccttcaaccagagcagcagcctgagcagcctgcgggagctgtacaaggatgccaacctgggcagcctgagccccagcggcatccggctgagtgatgagtacatgggcacccacgccagcctgagcaacagagtgtcctttgccagtgacattgatgtgcccagccgggtggcccatggagaccccatccagtacagcagcttcaccctgccctgcaggaagcccaaggcctttgtggaggacacagccaagaaggacagcctgaaggccaggatgaggcgcatcagtgactggacaggcagcctgagcaggaagaagaggaagctgcaggagcccaggagcaaggagggcagtgactactttgacagcagaagtgatggcctgaacacagatgtgcagggcagcagccaggccagcgccttcctgtggagcggcggcagcacccagatcctgagccagaggtctgagagcacccacgccatcggcagtgaccccctgcggcagaacatctatgagaacttcatgagggagctggagatgagcaggaccaacacagagaacatcgagaccagcacagaaacagctgagagcagcagcgagagcctgagcagcctggagcagctggacctgctgtttgagaaggagcagggcgtggtgaggaaggccggctggctgttcttcaagcccctggtgacagtgcagaaggagaggaagctggagctggtggcccggaggaagtggaagcagtactgggtgaccctgaagggctgcaccctgctcttctatgagacctacggcaagaacagcatggaccagagcagcgccccccgctgtgccctgtttgctgaagattccatcgtgcagagcgtgcctgagcaccccaagaaggaaaatgtgttctgcctgagcaacagctttggagatgtgtacctgttccaggccaccagccagacagacctggagaactgggtgacagctgtgcacagcgcctgtgccagcctgtttgccaagaagcacggcaaggaggacaccctgcggctgctgaagaaccagaccaagaacctgctgcagaagattgacatggacagcaagatgaagaagatggccgagctgcagctgtctgtggtgtctgaccccaagaacaggaaggccatcgagaaccagatccagcagtgggagcagaacctggagaagttccacatggacctcttcaggatgcgctgctacctggccagcctgcagggcggggagctgcccaaccccaagagcctgctggccgccgccagccggcccagcaagctggccctgggccgcctgggcatcctgtctgtgagcagcttccacgccctggtgtgcagcagagatgattctgccctgaggaagaggaccctgagcctgacccagagaggaagaaacaagaagggcatcttcagcagcctgaagggcctggacaccctggccaggaagggcaaggagaagaggcccagcatcacccaggtggatgagctgctgcacatctacggcagcacagtggatggagtgccccgggacaatgcctgggagatccagacctacgtgcacttccaggacaaccacggcgtgacagtgggcatcaagccagagcaccgggtggaggacatcctgaccctggcctgcaagatgaggcagctggagcccagccactacggcctgcagctgaggaagctggtggatgacaacgtggagtactgcatcccagccccctatgagtacatgcagcagcaggtgtatgatgaaattgaggtgttccccctgaatgtgtatgatgtgcagctgaccaagacaggctctgtgtgtgactttggatttgctgtgacagcccaggtggatgagcggcagcacctgagccgcatcttcatcagtgatgtgctgcctgatggcctggcctatggagagggcctgaggaaaggaaatgagatcatgaccctgaatggagaggccgtgtctgacctggacctgaagcagatggaggccctcttcagcgagaagtctgtgggcctgaccctgattgcccggcccccagacaccaaggccaccctgtgcacctcctggagcgacagcgacctcttcagccgggaccagaagagcctgctgcccccacccaaccagagccagctgctggaggagttcctggacaacttcaagaagaacacagccaatgacttcagcaatgtgcctgacatcaccaccggcctgaagaggagccagacagatggcaccctggaccaggtgagccaccgggagaagatggagcagaccttccgctctgctgagcagatcacagccctgtgccgctccttcaatgacagccaggccaacggcatggagggcccccgggagaaccaggaccccccacccaggagcctggcccggcacctgagtgatgctgaccggctgaggaaggtgatccaggagctggtggacacagagaagagctatgtgaaggacctgagctgcctgtttgagctgtacctggagcccctgcagaatgagaccttcctgacccaggatgagatggagagcctgtttggcagcctgcctgagatgctggagttccagaaggtgttcctggagaccctggaggatggcatcagcgccagcagtgacttcaacaccctggagacccccagccagttcaggaagctgctcttcagcctgggcggcagcttcctgtactatgctgaccacttcaagctgtacagcggcttctgtgccaaccacatcaaggtgcagaaggtgctggagcgggccaagacagacaaggccttcaaggccttcctggatgccaggaaccccaccaagcagcacagcagcaccctggagagctacctgatcaagcctgtgcagagggtgctgaagtaccccctgctgctgaaggagctggtgtccctgacagaccaggagagcgaggagcactaccacctgacagaggccctgaaggccatggagaaggtggccagccacatcaatgagatgcagaagatctatgaggactatggcaccgtgtttgaccagctggtggccgagcagagcggcacagagaaggaggtgacagagctgtccatgggagagctgctgatgcacagcacagtgtcctggctgaaccccttcctgagcctgggcaaggccaggaaggacctggagctgactgtgtttgtgttcaagagagctgtgatcctggtgtacaaggagaactgctag

SEQ ID NO: 174596 - DNA, 5844 bp, Artificial Sequence
  derived and/or modified sequence
ggccggcccatcgacccccgggagggccctggccggccccccctggatggccgggaccacttcggccggccccctgtggacatccgggagaacctggtgcggcccggcatcgaccacctgggccggcgggaccacttcggcttcaaccctgagaagccctggggccacagaggagactttgatgagcgggagcaccgggtgctgcctgtgtatggaggccccaagggcctgcacgaggagcggggccgcttccgcagcggcaactacagatttgaccccaggagcggcccctggaacagaggcttcggccaggaggtgcaccgggactttgatgacagaagaagaccctgggagcggcagagggacagagatgaccgggactttgacttctgccgggagatgaatggaaaccggctgggccgggaccgcatccagaacacctgggtgcccccacctcatgcccgggtgtttgactactttgagggcgccaccagccagaggaagggggacaacgtgccccaggtgaatggagagaacacagaaagacatgcccagcccccacccatccctgtgcagaatgaccctgagctgtatgagaagctgaccagcagcaatgagatcaacaaggagaagagtgacacagtggccgacatcgagagcgagcctgtggtggagagcacagaaacagagggcacccccctgaccagcctgacagctgagacccggcggcaggtgaagatgggcaacagcgacagccagtacaccctgcagggcagcaagaaccacagcaacaccatcactggagccaagcagatcccctgcagcctgaagatccggggcatccacgccaaggaggagaagagcctgcacggctggggccacggcagcaatggagctggctacaagagccgcagcctggcccggagctgcctgagccacttcaagagcaaccagccctatgccagccggctgggcggccccacctgcaaggtgtcccggggcgtggcctacagcacccacaggaccaatgcccctgggaaggacttccagggcatctctgctgccttcagcacagaaaatggcttccacagcgtgggccacgagctggccgacaaccacatcaccagccgggactgcaatggccacctgctgaactgctatggaagaaatgaaagcatcgccagcaccccacctggagaggacaggaagagcccccgggtgctgatcaagaccctgggcaagctggatggctgcctgcgggtggagttccacaatggaggcaaccccagcaaggtgcctgctgaggactgcagcgagcctgtgcagctgctgcgctacagccccaccctggccagcgagaccagccctgtgcctgaggcccggcggggcagcagcgctgacagcctgcccagccaccggcccagccccacagacagccggctgcggagcagcaagggcagcagcctgagcagcgagagctcctggtatgacagcccctggggcaatgctggggagctgtctgaggccgagggcagcttcctggcccctggcatgccagaccccagcctgcacgccagcttccccccaggagatgccaagaagcccttcaaccagagcagcagcctgagcagcctgcgggagctgtacaaggatgccaacctgggcagcctgagccccagcggcatccggctgagtgatgagtacatgggcacccacgccagcctgagcaacagagtgtcctttgccagtgacattgatgtgcccagccgggtggcccatggagaccccatccagtacagcagcttcaccctgccctgcaggaagcccaaggcctttgtggaggacacagccaagaaggacagcctgaaggccaggatgaggcgcatcagtgactggacaggcagcctgagcaggaagaagaggaagctgcaggagcccaggagcaaggagggcagtgactactttgacagcagaagtgatggcctgaacacagatgtgcagggcagcagccaggccagcgccttcctgtggagcggcggcagcacccagatcctgagccagaggtctgagagcacccacgccatcggcagtgaccccctgcggcagaacatctatgagaacttcatgagggagctggagatgagcaggaccaacacagagaacatcgagaccagcacagaaacagctgagagcagcagcgagagcctgagcagcctggagcagctggacctgctgtttgagaaggagcagggcgtggtgaggaaggccggctggctgttcttcaagcccctggtgacagtgcagaaggagaggaagctggagctggtggcccggaggaagtggaagcagtactgggtgaccctgaagggctgcaccctgctcttctatgagacctacggcaagaacagcatggaccagagcagcgccccccgctgtgccctgtttgctgaagattccatcgtgcagagcgtgcctgagcaccccaagaaggaaaatgtgttctgcctgagcaacagctttggagatgtgtacctgttccaggccaccagccagacagacctggagaactgggtgacagctgtgcacagcgcctgtgccagcctgtttgccaagaagcacggcaaggaggacaccctgcggctgctgaagaaccagaccaagaacctgctgcagaagattgacatggacagcaagatgaagaagatggccgagctgcagctgtctgtggtgtctgaccccaagaacaggaaggccatcgagaaccagatccagcagtgggagcagaacctggagaagttccacatggacctcttcaggatgcgctgctacctggccagcctgcagggcggggagctgcccaaccccaagagcctgctggccgccgccagccggcccagcaagctggccctgggccgcctgggcatcctgtctgtgagcagcttccacgccctggtgtgcagcagagatgattctgccctgaggaagaggaccctgagcctgacccagagaggaagaaacaagaagggcatcttcagcagcctgaagggcctggacaccctggccaggaagggcaaggagaagaggcccagcatcacccaggtggatgagctgctgcacatctacggcagcacagtggatggagtgccccgggacaatgcctgggagatccagacctacgtgcacttccaggacaaccacggcgtgacagtgggcatcaagccagagcaccgggtggaggacatcctgaccctggcctgcaagatgaggcagctggagcccagccactacggcctgcagctgaggaagctggtggatgacaacgtggagtactgcatcccagccccctatgagtacatgcagcagcaggtgtatgatgaaattgaggtgttccccctgaatgtgtatgatgtgcagctgaccaagacaggctctgtgtgtgactttggatttgctgtgacagcccaggtggatgagcggcagcacctgagccgcatcttcatcagtgatgtgctgcctgatggcctggcctatggagagggcctgaggaaaggaaatgagatcatgaccctgaatggagaggccgtgtctgacctggacctgaagcagatggaggccctcttcagcgagaagtctgtgggcctgaccctgattgcccggcccccagacaccaaggccaccctgtgcacctcctggagcgacagcgacctcttcagccgggaccagaagagcctgctgcccccacccaaccagagccagctgctggaggagttcctggacaacttcaagaagaacacagccaatgacttcagcaatgtgcctgacatcaccaccggcctgaagaggagccagacagatggcaccctggaccaggtgagccaccgggagaagatggagcagaccttccgctctgctgagcagatcacagccctgtgccgctccttcaatgacagccaggccaacggcatggagggcccccgggagaaccaggaccccccacccaggagcctggcccggcacctgagtgatgctgaccggctgaggaaggtgatccaggagctggtggacacagagaagagctatgtgaaggacctgagctgcctgtttgagctgtacctggagcccctgcagaatgagaccttcctgacccaggatgagatggagagcctgtttggcagcctgcctgagatgctggagttccagaaggtgttcctggagaccctggaggatggcatcagcgccagcagtgacttcaacaccctggagacccccagccagttcaggaagctgctcttcagcctgggcggcagcttcctgtactatgctgaccacttcaagctgtacagcggcttctgtgccaaccacatcaaggtgcagaaggtgctggagcgggccaagacagacaaggccttcaaggccttcctggatgccaggaaccccaccaagcagcacagcagcaccctggagagctacctgatcaagcctgtgcagagggtgctgaagtaccccctgctgctgaaggagctggtgtccctgacagaccaggagagcgaggagcactaccacctgacagaggccctgaaggccatggagaaggtggccagccacatcaatgagatgcagaagatctatgaggactatggcaccgtgtttgaccagctggtggccgagcagagcggcacagagaaggaggtgacagagctgtccatgggagagctgctgatgcacagcacagtgtcctggctgaaccccttcctgagcctgggcaaggccaggaaggacctggagctgactgtgtttgtgttcaagagagctgtgatcctggtgtacaaggagaactgcaagctgaagaagaagctgcccagcaacagcaggcctgcccacaacagcacagacctggaccccttcaagttccgctggctgatccccatcagcgccctgcaggtgcggctgggcaacccagctggaacagagaacaacagcatctgggagctgatccacaccaagtcagaaattgagggccggcctgagaccatcttccagctgtgctgcagcgacagcgagagcaagaccaacatcgtgaaggtgatccgcagcatcctgcgggagaacttcagaagacacatcaagtgtgagctgcccctggagaagacctgcaaggaccggctggtgcccctgaagaacagagtgcctgtgtctgccaagctggccagcagccgcagcctgaaggtgctgaagaacagcagcagcaatgagtggacaggagagaccgggaagggcaccctgctggacagtgatgagggcagcctgagcagcggcacccagagcagcggctgccccacagctgagggccggcaggacagcaagagcaccagccctgggaagtacccccaccctggcctggccgactttgctgacaacctgatcaaggagagtgacatcctgagtgatgaagatgatgaccaccggcagacagtgaagcagggcagccccaccaaggacatcgagatccagttccagaggctgcgcatcagtgaagatcctgatgtgcaccctgaggccgagcagcagcccggccctgagagcggggagggccagaagggcggggagcagcccaagctggtgcggggccacttctgccccatcaagaggaaggccaacagcaccaagagggaccggggcaccctgctgaaggcccagatccgccaccagagcctggacagccagagtgaaaatgccaccatcgacctgaacagcgtgctggagcgggagttctctgtgcagagcctgacctctgtggtgtctgaggagtgcttctatgaaacagagagccacggcaagagctag

SEQ ID NO: 174597 - DNA, 165 bp, Artificial Sequence
  derived and/or modified sequence
atgggcaacagcgacagccagtacaccctgcagggcagcaagaaccacagcaacaccatcactggagccaagcagatcccctgcagcctgaagatccggggcatccacgccaaggaggagaagagcctgcacggctggggccacggcagcaatggagctggatag

SEQ ID NO: 174598 - DNA, 588 bp, Artificial Sequence
  derived and/or modified sequence
atgggcaacagcgacagccagtacaccctgcagggcagcaagaaccacagcaacaccatcactggagccaagcagatcccctgcagcctgaagatccggggcatccacgccaaggaggagaagagcctgcacggctggggccacggcagcaatggagctggctacaagagccgcagcctggcccggagctgcctgagccacttcaagagcaaccagccctatgccagccggctgggcggccccacctgcaaggtgtcccggggcgtggcctacagcacccacaggaccaatgcccctgggaaggacttccagggcatctctgctgccttcagcacagaaaatggcttccacagcgtgggccacgagctggccgacaaccacatcaccagccgggactgcaatggccacctgctgaactgctatggaagaaatgaaagcatcgccagcaccccacctggagaggacaggaagagcccccgggtgctgatcaagaccctgggcaagctggatggctgcctgcgggtggagttccacaatggaggcaaccccagcaaggtgcctgctgaggactgcagcgagcctgtgtag

SEQ ID NO: 174599 - DNA, 258 bp, Artificial Sequence
  derived and/or modified sequence
atgggcaacagcgacagccagtacaccctgcagggcagcaagaaccacagcaacaccatcactggagccaagcagatcccctgcagcctgaagatccggggcatccacgccaaggaggagaagagcctgcacggctggggccacggcagcaatggagctggctacaagagccgcagcctggcccggagctgcctgagccacttcaagagcaaccagccctatgccagccggctgggcggccccacctgcaaggtgtag

SEQ ID NO: 174600 - DNA, 162 bp, Artificial Sequence
  derived and/or modified sequence
atgggcaacagcgacagccagtacaccctgcagggcagcaagaaccacagcaacaccatcactggagccaagcagatcccctgcagcctgaagatccggggcatccacgccaaggaggagaagagcctgcacggctggggccacggcagcaatggagcctag

SEQ ID NO: 174601 - DNA, 1881 bp, Artificial Sequence
  derived and/or modified sequence
atggagggcccccgggagaaccaggacccccccccccggagcctggctcggcatctctccgacgcggaccgcctgaggaaagtcatccaggaattggtggacacagagaagtcgtatgtgaaagacctcagttgtctttttgaactgtacctggagccactccagaatgagaccttcttgactcaggatgaaatggagagtctttttgggtctctgccagaaatgctcgaattccaaaaagtgttcctagagacacttgaggatgggatctccgcttcatccgatttcaacacacttgagacgcccagccagtttcggaaactcttgttttcccttggagggtcctttctctattatgctgatcattttaagttgtattcaggtttctgcgccaaccatattaaagtgcagaaggtacttgagagagcgaagacagacaaggcgtttaaggcttttctcgacgcccgcaatcccacaaaacagcatagcagcacccttgagtcgtatttgatcaagccggtgcagcgtgttctgaaatatcccctgctgcttaaggagcttgtgtctctaacagaccaggaaagtgaggagcactaccatttaacagaagctttgaaggcaatggaaaaggtggcctctcacattaatgaaatgcagaagatctacgaagattacggtacagtgtttgatcagctcgtggcagaacaatccggcactgagaaggaggtcacggagcttagcatgggggaactgctcatgcatagtaccgtgtcctggctgaacccattcctgtcacttggcaaggcacggaaggatctcgaacttactgtcttcgtatttaaacgggctgtgatattggtgtacaaggaaaattgcaaattgaaaaaaaaactgcccagcaattccaggccagctcacaattctacagatctggacccattcaaattcagatggttgattccaatttcagcgctacaggttcgcctgggcaatcctgccggtacagaaaacaacagtatctgggaattaatccacaccaagtcagagatcgaaggaaggcctgagaccatcttccaattgtgttgcagcgattctgagagcaagaccaacattgtgaaggtgatcaggtccattctgcgcgaaaacttcaggcgacacattaagtgcgagctgcccctcgaaaagacctgcaaggataggttagttcctctgaaaaatagggttccagtttctgctaagctggccagctccagatcactcaaggtgcttaagaactcgtcgagtaatgagtggacaggagaaactggtaaaggcactctcctcgacagcgacgagggctctttgtctagcggcacacagtcgtcaggttgcccaacggccgagggccggcaggattcaaagtccacctctcctggaaagtacccccaccccggactggcagacttcgcagacaacttgatcaaggaatccgacattctttctgatgaggacgatgatcatcgccaaacagtgaaacaaggctcacctaccaaggacattgagatccagttccagcgattaaggatctcggaggatccagatgtgcaccctgaagccgaacagcaacccggtcccgagagcggggaagggcagaagggaggggaacaacccaagctcgtgcgagggcacttctgccctatcaaacgcaaggccaacagtaccaaacgcgacagagggactctcttaaaggcacagattcgacaccaatccttggacagtcaatctgagaatgctaccatcgacctcaattcagtgctcgaacgggagttttcagtgcagagccttacctccgtggtgtccgaagaatgcttctacgagactgagtcccatggtaaatcctag

SEQ ID NO: 174602 - DNA, 5106 bp, Artificial Sequence
  derived and/or modified sequence
atgggcaacagcgacagccagtacaccctgcagggcagcaagaaccatagtaacaccattacaggagccaagcagattccatgttccctcaaaataagaggaattcacgccaaggaagaaaagagtttgcacggttggggccatgggagtaacggagcaggatacaagagccgctctctcgctagatcctgtctgagtcatttcaaatctaatcagccctatgcctctcggctcggcggacctacatgtaaggttagccgtggtgtagcttacagtactcaccgaactaatgcccctgggaaggactttcaagggatctctgccgccttttccaccgagaacgggtttcactctgtgggccatgagctcgcagacaatcatataactagccgcgattgcaatggccacctcctcaattgctatgggagaaacgaatccatagccagcaccccccctggcgaagaccggaagtcacccagggttttaattaagacgctcggaaaactggacggctgcttacgggtagaattccataacggaggcaatccctcaaaggtgccagccgaggactgctccgagcccgtgcagctccttcgttacagccccactctggcaagcgagacaagccctgtacctgaagccagacgcggatctagcgcggactcccttccctctcatagacctagcccaacagacagtcgtctacggtcttcgaagggctcttctctgtcctctgaaagctcctggtatgattcaccgtggggcaacgccggcgagctgagtgaggccgaagggtctttccttgcacctggtatgcctgatccatcactgcatgcctctttcccacctggagatgcgaagaagccattcaaccagagctcgagcctgagctcactgagagagctctataaggacgcgaatctggggagcctttcccccagcggtataaggctaagcgatgagtacatgggtacccatgcgtcgctttccaatcgagttagtttcgcttctgacatagacgttccctcgagggtcgcgcacggcgatcccattcagtacagttcatttacactcccgtgtaggaagcctaaggcgttcgtggaagacactgccaaaaaagactccctgaaagcaaggatgcgtagaatctcagactggactggtagcctttctagaaagaagagaaagctgcaggagcccagaagcaaggaaggctcagattatttcgactctcggtctgatggcctgaacaccgatgtacaggggtctagtcaggctagcgccttcctgtggtccggcggctctacacagatcctcagccaaagaagtgaatccactcatgccatcgggtccgaccctctccggcagaatatatacgagaacttcatgcgggaactggaaatgagtagaaccaatactgagaatatcgagacgtctaccgaaaccgccgaatctagttcagaaagtctgtcatcgctggagcagctcgatctgctgtttgaaaaagagcagggtgtggtccgcaaggccggctggctgttctttaagccactggtaacagtgcagaaagaacgcaagttagaactcgttgctcggcgaaaatggaaacagtactgggtaacacttaaagggtgcactctgttattttatgagacatacggtaagaattccatggatcaatcgtccgctcccagatgtgctctctttgccgaggattcgatcgtgcaatctgtgcccgaacatcccaagaaagagaacgtcttttgtctgagtaactcctttggtgacgtttacctgttccaggcaactagtcagaccgatctggaaaattgggtgaccgcagttcactctgcttgcgctagcctgtttgccaagaagcatggcaaagaagatacactgagactgctcaagaaccagaccaagaatttattgcagaaaatagacatggacagtaagatgaagaaaatggccgaactgcagctgtctgttgtctccgaccccaagaatagaaaggctatcgagaatcagattcaacagtgggaacagaatctggaaaaatttcatatggacctttttcgcatgagatgctatttagctagccttcagggaggggagttgccgaaccctaagtcacttctagctgccgcttcccgcccatcaaaactagcattgggacggctgggcatcctttcagtttcaagctttcacgccctggtgtgctccagggatgattctgccctcagaaaacgcaccctgtccctgacacaacgggggagaaataagaagggcatattttcatccctgaaaggcctggataccctcgcccgtaagggaaaggagaaacgtccaagcatcacgcaggtagatgagctcttgcacatttacggtagcaccgtggacggggtgcccagggataacgcgtgggaaattcaaacctacgtgcactttcaagataatcacggtgtcacagtggggattaaacccgagcatagggtagaggatatcttgaccctggcctgtaagatgcgccagctggagccatcccactacgggcttcagctgcgcaaacttgtcgatgacaatgtggaatattgcattcctgcaccctacgagtatatgcagcagcaagtgtacgatgagattgaagtgtttccattaaacgtgtacgatgtgcagctgacaaagaccggttctgtttgtgatttcggatttgcggttactgctcaagtcgacgaaagacaacatctatcaagaatcttcataagcgatgtcctgcccgacgggcttgcttacggagagggcctgagaaaaggtaacgagattatgactctgaacggcgaggcggtgagcgatctcgaccttaaacagatggaggctctgtttagtgaaaagagcgtgggcttaacgttgatcgctaggccccctgacacgaaagcaaccctatgcaccagttggtctgacagtgacctgttcagccgagatcagaaaagtctgctacccccgcccaatcagagccagttgctggaagagttcttagataatttcaagaagaatacagccaatgattttagtaatgttcctgacatcactaccggcctgaaaagatcccagacagatgggaccctcgatcaggtgtcccacagagagaagatggagcaaaccttccgctccgccgagcagatcaccgccctgtgccgatcattcaacgactcccaggcaaacggaatggaaggcccccgggagaaccaggacccgccccccaggtctctcgcccgccacctctctgatgcagacagattacgaaaggttatccaagagcttgtcgacaccgagaagtcttacgtgaaggacctctcttgtctcttcgagctgtacctcgagcctttacagaatgaaacctttttgactcaagacgagatggagagcctcttcggtagtttacctgagatgctggaattccagaaagtcttcctggaaaccttagaagacggtatcagcgcctcttcagattttaatactctagagactccatctcagtttcggaaattactgttctctctcgggggatccttcttatactacgctgaccatttcaaactgtatagcggcttttgcgccaatcatatcaaggtccaaaaggtgctcgaacgagccaagactgataaagcatttaaggcgttcctggatgctagaaacccaaccaagcagcactcttcgacactggaatcatacctcattaagcccgtgcagagagtattgaaatacccacttctgttgaaggaattagtttcattgaccgaccaggagtccgaggagcactaccatttgactgaggcgttaaaagcaatggaaaaggtggccagtcatatcaatgagatgcagaagatttacgaagactacggtaccgtattcgatcagctggtcgccgaacagagcggtactgagaaggaagttacggaattgagcatgggcgaactcctgatgcatagcacggtgtcttggcttaatccttttctttccctgggaaaagctaggaaagacctggagctgacagtcttcgtgttcaagagggccgtcattctggtgtataaggaaaactgcaagctgaagaaaaagctcccgtccaatagccgccctgctcacaacagtacagacctggacccctttaagttccggtggctcatacccatatctgcgctgcaagtccgactgggcaacccagcagggacagagaacaactctatttgggagctgatacacactaaatctgagattgagggccgccccgaaaccattttccagttgtgctgttctgattcagaatcaaagacaaatattgttaaagtgatcaggtcgatcctccgggagaacttcagacgtcacatcaaatgtgagctgcccctggaaaaaacatgtaaggatcgtctggtgcccctgaaaaatagagtgcccgtgtcggctaagctggcatcttctagatcactaaaggtgttaaaaaacagctctagcaacgagtggaccggcgagaccggtaaaggaacactgctggattccgacgagggttccctctcttcgggtacccagagctctggctgccctaccgctgaaggacgtcaggattcaaaatctacctcacccggaaaatacccccatccaggtctggccgatttcgccgataatctcatcaaagagagtgacattctgagcgatgaggatgatgatcaccggcagactgtgaagcagggcagccccacgaaggatatcgagattcaatttcagaggttgagaatctcagaggatccggacgtgcaccctgaggccgagcagcagccaggtcccgagtcaggtgagggccaaaaaggaggagaacagcccaaacttgtgagagggcatttctgtccaattaagagaaaagctaactctaccaagagagaccggggcacacttctcaaggcccagatccgacaccagtcactggactctcagtcggaaaatgccactatcgacctaaactccgtgctggaaagagaatttagcgttcagagcctgacaagcgtagtgtccgaagagtgtttctacgaaactgaatctcacggtaagtcatag

SEQ ID NO: 174603 - DNA, 3234 bp, Artificial Sequence
  derived and/or modified sequence
atggacagcaagatgaagaagatggccgagctgcagctgagcgtggtgtccgatccgaaaaacagaaaggccattgagaatcagattcagcaatgggaacagaacctcgagaaatttcacatggatctcttccgcatgcgctgctacctcgccagtctgcagggtggtgagctgcctaatcctaaaagcctccttgccgcagcatcacgaccatcaaaacttgctctcggacgtttaggaattctcagtgtcagttccttccatgctctcgtgtgtagcagagacgactctgcactgcggaaaagaactctgagtctgactcagcgtgggcggaataagaaaggaatcttcagcagtttaaaggggttggatacgttggctcggaagggtaaggagaagaggccgagcattacccagatcttcgacagttccggatcacacgggttttcaggaacccaactcccacaaaattccagcaacagcagtgaggtggatgagctcctgcatatatacggcagtacagtcgacggtgtccctagagacaacgcttgggaaattcagacctacgtccacttccaggacaaccacggagtgacagttggaattaagcctgagcacagagtggaagacattctgacacttgcctgtaagatgagacagttagagccaagccactacggacttcagctgcgtaaattggtggacgacaatgtggagtactgtatccctgcgccttacgaatacatgcaacaacaggtgtacgatgaaatcgaagtgtttccattaaacgtatacgacgtgcagctgaccaagaccgggtctgtgtgtgacttcgggttcgccgtgacagcccaggttgacgagaggcagcatctgtcacgcatcttcatcagtgatgtgctccctgacggactggcatatggggaggggctccgaaagggaaacgagataatgaccctgaatggagaggctgtgagtgacttggatctcaaacagatggaggccctattcagtgagaagtctgtgggtcttacactcattgctagacctccagacaccaaagcaactctctgtacaagctggtcagattctgacctgtttagtcgggaccaaaagtcactgctgcctccccccaatcagtcacagcttttggaggaatttctggacaacttcaagaagaatactgcgaacgatttctccaacgtgcccgacatcacaactggattaaaacgctcgcagaccgatggcactctggaccaagtctctcatcgggaaaagatggaacaaacattccggagtgcagaacaaataaccgccctgtgcagaagttttaatgactcccaagccaacggcatggagggccctagggagaatcaagatcctcccccccggagcctagcgagacacctgagcgacgcagatagattaagaaaagttatccaagaactggtcgatacagaaaaatcttatgttaaagatttatcttgcctattcgaactgtatctggaaccacttcagaatgagacattcctcacacaagatgaaatggagtccttgtttgggtcactgcctgaaatgttagagtttcagaaggttttcctggaaacgttggaggatggaatttccgcctctagtgacttcaataccttagagaccccctcccaatttaggaagctactttttagtctaggaggttcttttttgtattacgccgatcacttcaagctttattctggtttttgcgcaaatcacataaaggtgcagaaggttctcgagcgcgccaaaactgataaagctttcaaagctttcctagacgctcgaaaccccacgaagcaacattcatctacgttggagagttatctgatcaagcccgtccaacgagtcttaaagtaccctctccttttaaaggaactggttagcctcactgaccaagaatcggaggagcattatcatctgaccgaggcgctaaaggctatggaaaaggtggcttcccatattaatgagatgcaaaagatctatgaagattacggaactgtatttgatcagcttgtggccgaacagagcggaactgaaaaggaggtgacagaactgtccatgggcgagttactgatgcactcaaccgtgagttggttaaatccatttcttagcctcgggaaggcccgtaaagacctggagctgaccgttttcgttttcaagcgagccgttatcctggtgtataaagaaaactgtaaactaaagaaaaaactgcccagcaactcccggcccgcccacaatagcacagacctggatccttttaaatttcggtggcttattccaatttctgctcttcaagtgagactaggcaaccccgccgggacagaaaacaatagcatctgggagttaatccacacaaagagcgagatcgaggggagacctgagaccattttccagttatgttgttccgactccgagtcaaaaactaatatagtaaaagtgatccgctccattcttagagaaaactttcgtagacacataaagtgcgaactacccttggaaaagacatgtaaggaccgactggttccccttaagaatcgagttcctgtgtcagctaaactcgcttcttcacgaagtctcaaagtgctgaaaaactccagttctaacgagtggaccggcgagacagggaagggtactctactggacagcgacgaaggttccctttcttccggcacccagtcatctggatgtcccactgccgagggccggcaagattcgaaaagcacttcacccggcaagtatcctcacccaggcctggcagatttcgccgacaatcttatcaaggaatcagatattctgagcgacgaagacgacgatcataggcagaccgtgaagcagggatcccccacaaaggacatcgagattcagttccagcggctcaggatcagcgaggatccagatgtacaccctgaggctgagcagcagcccggtcctgagagtggcgaaggtcagaaaggaggggaacagcccaaactggtccgtggccacttctgccctattaaaaggaaagccaactccacgaaacgagatcgaggaactcttctgaaggcccagatcaggcaccagtcactagactcacagtccgagaatgccaccatagatctcaacagcgtgctagagcgggagttttcagtacaatcactcacctcagtcgtctctgaagagtgcttctacgagacagagtcacatggcaagtcctag

SEQ ID NO: 174604 - DNA, 5193 bp, Artificial Sequence
  derived and/or modified sequence
atgggcaacagcgacagccagtacaccctgcagggcagcaagaaccactcaaacacaataaccggggcgaagcagattccctgcagtctgaagatcaggggcattcatgcaaaagaggagaagtcactgcacggctgggggcatggcagcaacggcgcaggatataaatcgagatccctggcacgcagctgcctcagccatttcaaaagtaaccagccctacgcctcccggctggggggaccaacatgcaaggtttcacggggcgtggcctactctacacataggactaacgccccgggcaaggacttccagggcatctccgctgccttttcaacggagaacggcttccactctgtcggacacgaactggcggataaccatatcacgtcccgggactgcaatggccacctcctgaattgctacggtcgcaacgagagcatagccagcacgccccctggcgaggaccgaaagtctccacgcgtcctgataaaaaccctcggcaagctggacggttgcctaagagtggaatttcataacgggggcaatccatccaaagtgccagcagaggattgcagcgagcctgtacagctgttgcgatacagccccacactggcctccgagacctctcccgtgcccgaggcaaggagggggtccagcgccgactctttgcccagccaccgcccctcacctacggactcgcgactgcggagctccaagggatcttcgctgagctcagaatcaagttggtacgactccccttggggcaacgccggggaattaagcgaggctgagggatcattcctggctcccggtatgcccgaccccagtctgcacgcatccttccctccaggtgatgcaaaaaagcctttcaaccagtcatccagtctgagtagcctcagagagctctataaggatgctaaccttggcagccttagtccctcaggcatccggctaagcgacgaatacatgggaacccacgcttctcttagcaaccgagtcagcttcgcttccgacattgatgtgccttcccgtgtcgcccacggggaccccattcagtactcctcttttaccctgccctgccgcaagccaaaagcctttgtggaagatacagccaagaaggacagtctcaaggcacgcatgagacggatatccgactggaccggtagcctgtctcggaagaaacgcaaactacaggaacccagaagtaaggagggaagcgactactttgactcccggtctgatggcctgaatactgacgtccaggggtcatctcaggccagtgccttcctctggtccggagggtcaactcagattctctcccagcggtctgagtccacacatgcaatcggcagtgatcccctgcggcaaaatatttatgagaattttatgcgggaactcgagatgagccgcacaaatactgaaaatatcgaaacctcgactgagacagcggaatcttcaagtgaatccctgtcgtctctggaacaacttgacctactgttcgagaaagagcagggtgtggtgaggaaggctggttggctttttttcaagcctttggtcacagtgcagaaggaaagaaaactcgagctggttgcccggcgaaagtggaagcagtattgggtgactctgaagggctgtacactgctcttctacgaaacctatgggaagaatagcatggatcagagttctgcacctcgctgtgcactgtttgctgaagatagcatcgtgcagtctgtgcccgagcatcctaagaaggagaacgtcttctgtttaagcaattccttcggcgacgtgtatctctttcaggctaccagccaaaccgacctggagaattgggtcactgcagtgcactccgcatgtgctagccttttcgcaaagaaacatggcaaggaagacaccctccgccttctgaagaatcagactaagaatctcctgcagaagatagacatggactccaaaatgaaaaagatggcagagctacaactaagcgtggtctctgacccaaaaaatagaaaagctatcgagaatcaaattcagcagtgggagcaaaacctggagaaattccacatggacctgtttcgcatgcgatgttatttggccagcctccagggcggcgagctacccaatcctaaatccctgctggccgcagccagcaggccaagtaagttagcactcgggagactgggcatcctgagcgtgtcctcattccacgccctggtgtgctccagggacgactcagcgctcagaaagagaaccttgagcttaacccagaggggccggaataagaaaggcattttcagctccttaaaaggtcttgacacgcttgcgcggaaggggaaagagaagcgccccagtatcactcaggtcgatgagctgcttcacatctatggatccacggtggatggtgtcccaagagacaacgcctgggaaattcaaacatatgtgcattttcaagataatcatggggtcactgttgggattaaaccagaacacagagttgaggacatccttacgctcgcttgtaaaatgcggcagctagagccgtcccactacgggctgcagcttcgaaagctcgtggacgacaacgtcgaatattgcattccagctccatatgaatacatgcagcagcaggtgtacgatgagatcgaagtttttcccctgaatgtatacgacgtccagttgaccaagaccggttcagtgtgcgactttggtttcgccgtgactgcgcaggtggatgagcggcaacatttatctaggatattcatcagcgacgtgcttccagacggtcttgcttatggagaaggactcagaaagggaaatgagattatgaccttgaacggggaggccgtgtctgatttagacctgaaacagatggaggccctcttctccgagaagtctgttggtctcactctgatcgcccgacctcctgatactaaagccacattgtgtacttcatggtccgactccgatttgttttcaagagatcaaaagtccctcctcccaccccccaaccaatctcagcttctggaggaattcctggataattttaaaaaaaatacagctaatgacttcagtaacgtcccagacatcactaccggccttaagcgaagccagaccgatggcaccctggaccaggtctcgcaccgcgagaaaatggagcaaacatttcgaagcgccgagcaaatcaccgccctatgtcgcagctttaacgattcacaggcgaacgggatggaaggccctcgcgaaaaccaggatccgcctcctcgtagtctcgccagacacctttcagatgccgacaggctccgcaaagtgatccaggagctggttgataccgaaaaatcctacgtcaaggatctgtcatgcctctttgagctgtacttagagcctctgcagaacgagacctttctgacgcaagacgagatggagtccttgttcgggtcattgcccgagatgttagagttccagaaggttttcctcgagaccctggaagatggaatctctgcctcgagcgatttcaatacccttgagaccccttcacagttccgaaagcttctattttctctggggggtagctttctgtactacgccgatcattttaagctgtattccgggttctgcgcaaatcacattaaagttcagaaggttctcgaacgcgccaagacggataaggcatttaaggcctttctcgatgctcggaatcccactaaacagcatagtagcaccctcgagtcttaccttattaagcctgtccagagggtacttaagtatcccctgctgctcaaggagctggtttcactcactgaccaggagagcgaagagcactaccacttgacagaagcccttaaggccatggagaaggtggcttcccacatcaatgaaatgcagaaaatttatgaagactatggtacggtctttgatcagctagtggccgagcagtcaggtaccgaaaaggaacagcccgagtggtcaagcgaggtaatggatgtgctggatcctagggggaagttgaccaaagggactcttgaggaaccccgaaccctggtgacagagctgtctatgggggaactgctgatgcattccacagtgtcatggttgaatccctttctgagtttaggcaaggcgcggaaggacctggaactaacagtgtttgttttcaagcgggccgtgatcctagtgtataaagagaactgcaaactcaaaaaaaaactaccgtctaactcccggcccgcccacaattccaccgatttggacccatttaagtttagatggctgatccctatctccgctctgcaagtcagactgggcaacccagccggcactgaaaataactcaatttgggagctgatccacacaaagtctgagatcgagggacgccccgagacaatttttcagctttgctgctctgactcagagagcaagaccaacattgttaaagtgatccggtccatcctccgcgaaaattttcgccggcacatcaaatgtgaactgcctctggagaaaacctgcaaagaccgcctggtgcctttaaaaaaccgagtgcccgtgagcgccaagctggccagttctagaagcctgaaggtacttaagaatagcagtagcaacgagtggaccggagaaaccggtaagggtacactcctcgattcagatgagggatccctgtcttccgggactcagagtagtggctgtcccaccgctgagggaagacaggattccaaatcgaccagtcctggcaaatatccccaccccgggctggccgatttcgctgacaatttgatcaaagaatccgacattctgtcagacgaggatgatgatcacagacagacggttaaacaggggagcccaaccaaggatatcgagattcagttccagcggttaagaatatcagaagacccagacgtccatccagaagcagaacagcaacctggcccggaatctggggagggtcagaagggtggggagcagcctaagctggttcggggccacttttgtcccattaaaagaaaggccaactccacaaaaagggaccggggtacactcctcaaggcccagattcgccatcagtccctggattctcagtccgaaaatgccacgattgatttaaacagtgtgctagaaagggagttctccgtacagtcattgacctcagtggtgagtgaagagtgcttctatgagaccgaaagccacggcaaaagttag

SEQ ID NO: 174605 - DNA, 3042 bp, Artificial Sequence
  derived and/or modified sequence
atggacctgttccggatgcggtgctacctggccagcctgcagggcggagaactccctaaccccaagtccctcctggctgcagccagccggccctccaagctcgcccttggacggctgggaatcctgagcgtatcaagttttcacgcacttgtatgctcgcgagatgattccgccctccgtaaacgcacactgagtctgacccagagaggacgaaacaagaaaggcatattcagctccctgaaaggccttgatacactggcaagaaaggggaaggagaaaaggcctagcataacgcaggttgacgagctgctacatatatatggatcaacggtagatggcgtgccccgagataatgcatgggaaatccagacatacgtgcacttccaagacaaccacggcgtgaccgtaggtataaagcccgaacaccgcgtggaggacatcctgacactggcctgtaagatgagacaattagaaccgtcccattatggactgcagctacgtaagcttgtggatgataatgtagaatattgcataccagctccatacgaatatatgcagcagcaggtttacgacgagattgaagtctttcccctgaacgtatatgacgtgcagctgactaaaaccggaagcgtgtgtgatttcggctttgccgtgactgcacaggtggacgaaaggcagcacctgagcaggatttttatctctgacgtgctacctgatggcctggcctacggtgaaggactgcggaaagggaatgagattatgactttaaatggggaagccgtgtcagatctggacttaaagcagatggaggccctcttctccgaaaaatctgtggggctgactctgatagcgcggccacctgacactaaagccactctctgcacatcatggtctgactctgacctgttcagccgcgaccagaaatctttgctgccacctcctaatcagtcccagcttctagaggaatttctggataacttcaagaagaacactgcgaacgacttcagtaacgtgccagacatcaccactggactgaagaggtcacaaacggatggaaccctagatcaggtttctcaccgtgagaaaatggagcaaacatttcgcagcgcagagcagattactgccctctgccgcagtttcaacgacagccaagcaaacggcatggaaggtccccgggagaaccaagacccaccccccaggtccctcgctcgacacctctctgatgctgacagactgcggaaagtgattcaagagctcgtagataccgaaaaaagctatgttaaggatctctcttgtctcttcgaactctacctggagccccttcagaatgaaacttttctcactcaggatgaaatggaatccctcttcggttctctgccagaaatgctggagttccagaaggtattcctcgagaccctagaggacggcattagtgcatcatccgattttaataccctggaaaccccttctcagtttcggaagctgcttttttccctgggtggctccttcctgtactacgcagaccactttaagctatatagtggcttctgcgccaaccacataaaggtgcagaaggttctggagcgcgccaagaccgataaagcttttaaggcgtttcttgacgcgaggaacccaaccaagcagcatagctcaactctggaaagttacctgatcaaacccgtgcaaagggtgctaaaatatccgctcttgttgaaggagctagtctctctgaccgatcaggagtccgaggagcactaccacctgaccgaggcgctcaaggccatggaaaaggtcgctagtcatataaatgagatgcaaaagatttacgaggactatggtacggtgtttgaccagctcgtggccgaacagtcaggcactgaaaaggaggtaactgagctgtctatgggtgaattgctgatgcattctaccgtgtcttggctgaatccctttctgagtttaggaaaggctcgcaaagacctcgagctgaccgtatttgttttcaagagagcggtgattttggtgtacaaggaaaactgcaagttgaagaaaaagcttccttcaaactcgagaccagcccacaattctaccgacctcgacccattcaaatttcgttggttgatccctattagtgcccttcaggtacggttaggaaacccagccggaaccgagaacaatagcatttgggagctcattcataccaagagcgagatcgaaggccgccctgagacaatctttcaactttgttgcagcgactctgagtcaaaaaccaatattgtgaaggttatacggtccattctgcgcgagaacttcaggcggcatatcaaatgtgagcttcctctagaaaaaacatgtaaggaccggttagtccccctaaaaaacagagttccagtgagtgccaagcttgcgtcaagcagaagcttgaaagttttaaagaatagctcttcgaatgagtggaccggtgaaaccggaaagggcacattgctcgattcagacgaggggtccctatcgtcaggtactcagtcctccggatgtccgactgccgagggtaggcaggactccaaatctacgagcccaggcaaatacccgcatcctggtctcgcggactttgccgataacctgatcaaggagtcagacatactttctgatgaggatgatgaccaccggcagacggtaaagcaaggcagtcccaccaaagacatagagatccagttccagcgcctgaggatttccgaggaccccgatgtgcacccagaggctgaacagcagccaggtcctgagagtggagaaggccagaagggcggggaacagcctaagcttgtgagaggccatttttgtcccatcaagcgcaaggcaaacagcaccaaaagggataggggtacattgctcaaggcacagatccgtcaccagagccttgattcccaaagtgaaaatgcaacaatcgatctaaacagtgttctcgagcgggagttctccgtgcagtcactgacctcagtggttagcgaagagtgtttctatgaaacagagtcacacggaaaatcatag

SEQ ID NO: 174606 - DNA, 5106 bp, Artificial Sequence
  derived and/or modified sequence
atgggcaacagcgacagccagtacaccctgcagggcagcaagaaccactctaacacgataaccggggccaaacagattccgtgctcgctcaagatccgaggaattcatgcaaaggaggagaagtctctgcatggttgggggcacgggtcaaacggtgccggctacaaaagtaggtcattggccaggtcttgtttatcccatttcaagtccaatcagccttatgcttccaggttgggagggccaacttgtaaggtgagccgcggagtggcctattctacccacagaactaatgccccaggaaaagacttccaaggaatttccgctgcatttagcacagagaacgggttccactctgtcggtcatgagcttgctgacaaccatattacatcccgggattgtaacgggcacctgctgaattgctatggtcgcaatgagagtatagcgtccaccccgccaggggaggataggaaaagtcctcgagtgctgatcaaaacattgggaaaactggatgggtgcttgagagtggaatttcataatggcggcaacccaagcaaggtaccagctgaggactgctcggagcctgtgcagctgctccgctactctccaactctggcttctgagaccagtcctgtgcccgaggcccggcggggctcaagcgccgactccctcccctctcacaggccctctccgactgattcccggctcaggagtagcaaggggagttcactgagctcggagtctagttggtatgatagcccttggggaaatgccggcgagctatcggaagctgaaggttccttccttgcaccaggaatgccagaccctagcctccatgccagctttccccctggggacgcaaagaaacctttcaaccaatcctccagcctgtcaagcctgcgcgaattgtataaagacgcaaatttgggcagcctgagtccctcaggaattcgactgtctgacgagtatatgggaacgcacgctagcctcagcaaccgtgtgagtttcgccagcgacatcgacgttccaagtcgcgtggcgcatggggatccgatacagtattcgagctttaccctgccttgccggaagccgaaggcttttgtggaggatacagccaaaaaagattctctgaaggccaggatgcgaagaatctcagattggactggatcgttatcaaggaaaaagaggaagctccaggaacctcgctctaaagaggggtccgattatttcgacagcaggagtgacggattgaatacagatgtccaggggagctcccaggcttcagccttcctgtggtcgggtggatccacccagatcctcagtcagcggagtgaaagcacacatgcgattggttcggaccccctacggcagaatatctatgaaaacttcatgcgtgaattagaaatgtcacgcaccaacaccgagaacattgagactagcacagaaacggcagagtcgtcaagcgaaagtctgagctcccttgagcagctagatctgctgttcgagaaagaacagggagtcgtgcggaaggccggctggctgttctttaaacccctggtgacggtccagaaggagcgcaagttggagctggtggccaggcggaagtggaagcagtattgggtgactttgaagggctgcaccctgctgttttatgagacctatggcaagaatagtatggatcaatcctccgcccctcgttgcgcattgttcgccgaagactcgattgtacagtccgttcctgaacaccctaagaaagagaacgttttctgtctaagcaactcattcggggacgtctacctgtttcaagccacctcccagacagacctggaaaattgggtgactgcggtgcactctgcgtgcgcaagcctctttgcaaaaaagcatggcaaggaggacactcttcggctgcttaagaaccaaacaaaaaatcttctacagaagattgacatggacagtaaaatgaaaaaaatggcagagctacagctgtcggttgtgtctgatccaaagaatcggaaggccatagagaatcaaattcagcaatgggagcagaacctggaaaagttccatatggatttgtttcggatgaggtgttatctagcctctcttcagggcggtgaattgccaaaccctaagtcattattagctgccgcctccaggccatctaagttggctctgggccggctcggaatcctgtctgtcagttccttccatgcattggtgtgcagtcgagacgatagcgccttgagaaaacgcaccttgagtttgacccagcgaggtcggaacaagaaggggatcttctctagcctcaaagggctcgacaccctcgcccgtaaggggaaggaaaagagaccaagtatcacgcaggtggacgaattgctgcacatatacggttctactgtcgacggggtgccacgagataatgcgtgggagatccagacatacgtgcattttcaggacaaccatggggtgacagtcggaatcaagcccgagcacagagttgaggacattttgactctcgcatgcaaaatgcgacagttggagccaagccactacgggctgcagttacggaagctagtagatgacaatgttgaatattgtatacccgccccatacgagtacatgcagcagcaagtgtatgacgaaatcgaagtattccccctaaatgtgtacgacgttcagctgacaaaaaccggctctgtatgcgactttggcttcgctgtgacagcccaagtggacgaacggcagcacttgagtcgcatttttattagcgatgtgcttcctgacggtcttgcatatggcgaagggttgagaaagggtaatgagattatgacactaaacggagaggcagtctccgacctcgacttgaagcagatggaggctctgttcagcgagaaaagtgtcggcctgacactcatcgccaggccgcccgatactaaggctacgctctgtacatcttggtctgacagcgacctgtttagccgagatcagaagagtttgcttccacctcccaaccaatcccaattgctcgaggaatttctggacaattttaaaaagaacacagctaatgacttctccaacgttcctgacattacgacaggcctgaaacgctcccaaacggacgggacactggaccaggtctctcatcgagagaagatggaacagacttttcgctctgcagagcaaatcaccgctctgtgcaggtcattcaatgactctcaggccaatggcatggaaggtcctcgggaaaaccaggacccacctcctcgctcacttgcacggcatcttagcgacgccgacagactgcgcaaggttatacaggagctagtggataccgagaagtcctacgtgaaggacctttcttgcctgttcgagctgtatctggagccactgcaaaacgaaacgttcctgacccaagatgagatggaaagcctctttgggtccctgcctgagatgctggaattccagaaggtgttcctggaaacacttgaagacggtatctcagcatcaagcgatttcaacacactcgaaaccccttctcaatttcgcaagctcctgttttccctcggagggagttttctatattacgcggatcatttcaagctgtacagtgggttctgcgctaaccacattaaagtacagaaagtactagagagagcaaagacagacaaagcgttcaaggcgtttttagatgccaggaatcccactaaacagcactcttctactctcgaatcatacctcataaaacccgttcagagggtgctcaagtacccgctcttgcttaaagaactggtttcattgactgatcaggaatcggaagaacattatcacttgacagaagccctcaaggcaatggagaaagtggccagtcacataaatgagatgcaaaaaatatacgaagattacggaaccgtcttcgaccaattagtagcagagcaatctggtactgaaaaagaggttacggaattatctatgggagaactgttaatgcattccaccgtgagttggctgaacccttttctgtccctgggcaaagcccgcaaggacctagagcttactgttttcgtgtttaaacgggcagtaattctagtttataaagaaaattgcaaactcaagaaaaagctccccagcaatagtagacctgcacataactccactgatctggatccgttcaagttcagatggttgatccccatttccgcactgcaggtgaggttgggcaatccagccggcactgagaacaactcaatttgggagctgatccacacaaagtctgagatagaggggcggccagaaacaatatttcagctgtgttgcagcgatagcgaaagtaagacaaatatcgtgaaggtgatcaggtctatactacgggaaaacttcagacgccacatcaagtgtgaactgcctcttgagaagacctgtaaggatcgactggtccctctgaagaaccgcgtacctgtctctgccaagcttgcctcatcaaggagtctaaaggtcctcaagaattcctcaagcaacgaatggacgggtgaaactggtaagggtacgctgctggacagcgatgaagggtctctgagttctggaacgcagtcatctggatgtcctaccgcagaaggcagacaggattctaagtccacatccccaggaaagtaccctcatcctggattggccgattttgcggataacctgatcaaagaatccgacatcctgtcagatgaggacgatgaccatcgccagacagttaaacaggggtctcctaccaaggatatcgaaattcagttccagaggctgcgcatttccgaggacccagatgtccaccccgaggcagaacagcagcccggtcccgaatccggtgaggggcagaaaggcggggagcagcctaagcttgtacgcgggcatttctgcccgatcaaacgcaaggcaaactcgactaagcgtgaccggggcacattactgaaagctcagatcaggcatcaatcacttgactcccagagtgaaaacgctactatcgatctgaactctgtgctggagagggagttcagcgtacagtcacttacaagcgtagtgtcagaagagtgtttttacgagactgaatcccatgggaaatcctag

SEQ ID NO: 174607 - DNA, 4104 bp, Artificial Sequence
  derived and/or modified sequence
atgggcaacagcgacagccagtacaccctgcagggcagcaagaaccattctaatactataacaggtgcaaagcagattccatgctccctgaagatcaggggtattcacgcgaaggaggagaagtctctgcacggctggggccacgggagcaacggcgccggctacaaatcgagatcattagccaggagttgcttgagtcactttaaatcgaatcagccctatgcaagccggctgggagggccgacctgcaaagtttctagaggcgtggcctactcgacacacaggacaaatgcgcctggtaaagactttcaaggcatcagtgcagccttcagcacagagaacgggttccactcggtcggccatgagctggcggataatcacataactagtcgcgactgtaacggacacctgctaaactgttacggccgtaacgaatcaatcgctagtacccctcccggagaagaccgcaagtcgcccagggttctaatcaaaacgctcggaaaactagacgggtgtcttagagtcgagtttcacaatggaggaaaccctagtaaggtacccgcagaagattgctccgaacctgtgcaacttctgagatacagccctaccctcgccagtgagacctcaccagtccccgaggccagaagagggtcttctgctgacagccttcctagtcatcgccctagcccaaccgactccagactgagatcttccaagggctctagtcttagcagtgaaagttcctggtatgattcaccgtggggcaacgcgggggaacttagtgaagctgaaggatccttcctcgcaccagggatgcccgatccctctttgcacgcttcattccctcctggcgatgccaaaaagccttttaaccagtcatccagcctgtctagcttacgtgaactgtataaagatgccaatttgggttccctttcacctagcgggatccgcctcagtgatgagtacatgggcacccatgccagcctgagcaacagggtatccttcgcctctgatattgacgtgccatctcgcgtggcgcatggagaccctattcaatattcaagcttcacactcccatgccgaaagccaaaggcatttgtggaagacaccgccaaaaaggattcgctgaaggcacgaatgagaaggatttccgattggacaggctccctttcacgcaagaagcgcaaactccaagagccgagatccaaggagggatctgactacttcgattccaggagcgacggacttaacacagacgtccaggggagcagccaggcgtccgccttcctttggagcggcggctcaacccagatcttaagccaaagatccgagtctacgcacgccatcggctcggaccctttgaggcagaacatctacgaaaatttcatgagagagctggaaatgtctaggaccaatactgagaatatcgagacgtccacagagacagccgaaagctcttccgagtccctgagctctctggagcagcttgatttgctgtttgaaaaagagcagggcgtggtccgaaaggccggttggttgtttttcaaaccgttagtcacagtccaaaaagaacgaaagctggagctcgtggccagaaggaagtggaagcagtattgggtgaccctgaaggggtgcaccctgttgttctatgagacctacggcaagaactcaatggatcagagtagtgcacccagatgtgcgctgtttgccgaggattcaatcgtgcagagcgtcccagagcaccctaagaaagagaacgtcttttgcctttctaacagttttggcgatgtttacttattccaggccacgtcccagacagaccttgagaattgggttacagcggtccacagcgcgtgtgctagcctttttgctaagaagcatggcaaagaagataccctaagacttctgaaaaatcagaccaaaaatttgcttcagaaaatagatatggactctaaaatgaagaagatggctgagctgcagttaagcgttgtgtcggatcccaagaatagaaaagcgatcgagaatcaaattcagcagtgggagcagaatctcgagaaatttcatatggacttgttccggatgcgatgctaccttgcatcactacagggtggggagctccctaatcccaaaagtctactggctgcagcatcaaggcctagtaaactggccctgggccgactggggattctgtcagtttcctccttccacgcactggtttgctcccgcgacgacagtgcattgagaaaaaggactctctctttgacccaaaggggccggaataagaagggtatattttcgtctctgaaagggctggatacccttgcacgtaagggtaaggaaaaacggccctctataacacaggtggacgaactgctccatatctacggtagtactgtcgacggtgtcccccgggacaacgcctgggagatacagacatatgtccatttccaggataaccacggcgtcactgtgggcataaagcccgagcaccgcgtggaagacattcttactctggcctgtaaaatgaggcagctggaaccaagccactacggtttacagctgcgaaaactggtcgacgataacgtcgagtattgtatcccggctccgtacgagtatatgcagcagcaggtgtacgatgagatcgaagtgttcccccttaatgtgtacgacgttcagctgactaagacagggagcgtctgcgatttcggatttgcagtgaccgcccaggtagacgagaggcagcatttgtctcggatcttcataagcgatgtgctccctgacggtctggcatacggcgagggccttcggaagggaaatgagatcatgactcttaatggggaggccgtcagtgatctggatctcaagcaaatggaagctctcttctccgagaagtcagtcggtctcaccctgattgcccgccctcctgacaccaaagccaccttatgcacctcgtggtccgacagcgaccttttttctcgggaccagaaatccctgctccctccgccaaatcagtcccaacttttagaagagtttcttgacaatttcaaaaaaaacacggctaacgacttttcaaacgtccctgacatcactaccggccttaaacgcagccagacagatggaacactggaccaggtgtctcatcgcgaaaagatggaacaaacatttaggtccgcagagcagatcactgccctatgcagatcctttaacgactctcaggccaacgggatggaaggccctagagagaaccaggacccacctcctcgatccctagctcgccacctttcggatgcagaccggcttaggaaggtgatccaggaacttgttgatactgaaaaatcatacgtgaaagacctatcctgcctcttcgagttgtatctggagcctctccaaaatgagactttccttacccaggacgagatggagtcactcttcggctccttacccgaaatgctggaattccagaaggttttccttgaaactttggaggatggaatttctgctagttccgacttcaatactctcgagactccctcccagtttcggaaactgttgttttccctgggagggagcttcctatattacgctgaccacttcaaactgtattccggcttctgcgcaaaccacattaaggttcagaaggttctggagagagcaaagaccgacaaagccttcaaggcattcttagatgcacggaatccaacaaagcagcacagctcaaccctcgagtcttatctgatcaagccggtgcagagagttctgaagtatcctctgctgctcaaggagctggtgtcattaaccgaccaagagagcgaggagcactaccaccttaccgaggcgctgaaagcgatggaaaaggtggctagccacataaatgagatgcaaaaaatttacgaagactacggaacggttttcgaccagctggttgcagaacagagtggaactgagaaggaggtcacagaactcagtatgggggagttgctcatgcactccactgtatcctggctcaacccctttctgtccctcggcaaggctcggaaagaccttgaactcaccgtctttgtgttcaagagagctgtgattctcgtgtacaaggaaaactgctag

SEQ ID NO: 174608 - DNA, 5844 bp, Artificial Sequence
  derived and/or modified sequence
ggccggcccatcgacccccgggagggccccggccggccccccctggatggccgagaccattttggtaggccaccggttgatataagagagaacctcgtccgaccaggaatcgaccatctgggaaggcgcgatcacttcggattcaacccagagaaaccttgggggcaccgaggcgactttgacgagcgggagcatcgagttctgcccgtctatggcggccctaagggactgcacgaggagcggggccgtttcaggagcggcaattaccgctttgatccccgctctggaccttggaacagaggatttggacaggaagttcaccgtgattttgacgaccgcagacggccatgggaacggcagagagacagagacgatcgtgactttgatttttgccgagagatgaacggtaaccgactgggccgcgaccgcattcaaaacacatgggtgcctccacctcacgccagagtgtttgactatttcgagggagcaaccagccagagaaagggtgataatgttccacaggttaacggagaaaatactgagagacacgcccaacctcccccgatcccagtacagaacgatccagaattgtatgaaaagcttacatcatccaacgaaattaacaaggaaaaaagtgataccgttgctgatatcgagtccgaacccgtagtggagtctacggagaccgaagggacaccattgacaagcctgactgccgagacgcggcggcaagttaagatggggaattccgatagtcagtatactttgcagggcagtaaaaatcactcaaacaccataactggagcgaagcaaattccttgttctttgaagatccgcggaatacacgccaaggaagagaaatcactacacgggtggggccacggatccaacggagctggctacaaaagtcgaagcctggcccgtagttgcctgagtcatttcaagtcgaaccagccatatgctagccgcctggggggaccaacctgcaaggtatcaaggggagtggcttatagcacccacaggaccaacgccccaggcaaagatttccaggggatcagtgctgctttctcaaccgagaatggatttcactccgtgggccacgagttagccgataatcacatcacctcacgagactgcaacggccatctgctgaattgctacggccgaaatgaaagcatcgctagtacaccaccaggagaggatcgtaagtcaccacgcgtgctaattaaaacactcggtaagctcgacgggtgcctgagagtcgagttccataacggtggtaatccttccaaggtgccagccgaagattgcagcgaaccagtccagctgctaaggtatagccccaccctggccagtgagacgtccccagtgcccgaagcacgcaggggctctagcgcagatagcctgccctctcacaggccctcacccacagattcacggctacggtctagtaaagggagcagtcttagcagcgagtcaagctggtacgacagcccatggggaaacgctggggagctgtccgaagccgaggggagcttccttgctcccggcatgcccgatccatccctccacgccagcttccctcccggagacgccaagaaacccttcaatcagagcagctcactctcttccctgagagagctgtataaggatgcaaatcttggttctctgtccccatccggtatcagactttccgatgaatacatgggaactcacgcctctctgagcaatcgcgtgagttttgcttccgatatcgatgtgcctagtcgtgtagcgcacggtgacccaatccagtactcatcttttactcttccatgtagaaagcccaaggcgtttgtggaagacacagccaagaaggactctcttaaagctcgaatgaggaggatctcagattggactggctctctctccagaaaaaaaaggaagctgcaggaaccccggtccaaagagggctctgactattttgattcacgttccgacggtttgaacactgatgtgcagggaagctcccaggcaagcgcctttctctggtcaggcggttccacccaaatactctcccaacggagtgaatctacccatgccattggatccgaccctctgagacagaacatctatgagaatttcatgcgggagctcgaaatgtccaggacgaacaccgagaacatcgaaacaagcaccgaaactgccgagtcttcctcagagtcgctctcctcccttgaacagcttgatctgctctttgagaaggaacagggggtggtgaggaaagccggctggctgtttttcaaaccgttggtgacagttcagaaagagagaaagcttgagctggtcgcccggagaaagtggaaacaatattgggtgaccctgaaaggctgcacacttctgttttacgaaacttacggtaaaaactcaatggaccaaagtagtgctccgaggtgtgccctattcgcagaggactctatcgtacagagcgtccccgaacacccaaaaaaggagaacgtgttctgtctttctaattcctttggggatgtctatctctttcaggctacgtcccaaacagaccttgagaactgggtcacagcagtacacagtgcatgcgcatctctgttcgcgaaaaagcacggaaaagaggacacccttcggcttttgaaaaaccagacgaagaatctgctgcagaagatagatatggattccaaaatgaaaaaaatggccgagctccagctgagtgtagtttcagatccaaaaaatcggaaagctatcgaaaaccagatacagcagtgggagcagaatcttgaaaaattccacatggacctattcagaatgaggtgctacctggcctcactccagggaggggagctgcctaatcccaagagtttgctagccgctgcatctcgtccatccaaactggctctgggcaggctgggcatactgtctgtctcatcattccatgctctcgtctgttcgagggatgacagcgccttgaggaagcgaactttgtccctgacgcaaagaggcagaaataagaagggaattttttcttccctgaaaggactcgacaccctagctagaaaaggaaaggagaagagacccagcattacccaggtggatgagctgctccacatctatggaagcacggtggacggtgtgcctagggataacgcctgggagatccaaacttacgtgcattttcaggacaaccacggcgtgaccgtgggcatcaagcccgagcacagggtcgaggacatcctgacactagcctgcaaaatgcgccaattggagccatcgcactatggcttacaactcaggaagctggtcgacgacaatgtggagtattgcataccagcaccctatgagtatatgcagcagcaagtgtacgatgaaattgaggtgtttccgcttaatgtctatgacgttcagcttactaagaccggtagcgtgtgcgacttcggttttgcggtgacagcccaggtggatgagagacaacacttgagcaggattttcataagcgatgtgctgcctgacggcctggcctatggggaggggctgagaaaaggaaatgagatcatgactctgaacggagaagccgtatcagatttggacctgaaacagatggaagccttgttttcagagaagtctgtcgggctcaccttaattgcaaggccgcctgacacgaaggccaccctctgtacgtcatggagcgatagcgacttgtttagtcgagaccagaagtccctgctccctccacctaatcagagccagctgctcgaggaattcctcgacaattttaagaaaaataccgcgaatgacttcagcaacgtccctgacattactacaggtctcaaaagatcccagacagatggtacactcgatcaggtgtcacatagggagaagatggaacaaacctttcggagtgctgagcagataactgcactgtgtaggtcatttaacgattcccaggctaacggaatggaaggcccccgggagaaccaggaccccccaccccgctccctggcacggcatttatcagatgccgacagacttaggaaggtcatacaagagttggtggatactgagaagagctacgtcaaggacctgtcatgcctcttcgagctgtatctggaacctttacaaaacgaaacgtttctgactcaagacgaaatggaaagtttgtttggctcccttcccgagatgttggagtttcagaaggtgtttctggaaactttagaggatggcatttctgctagctccgatttcaacactctggagactcccagccaatttcgaaagcttctgtttagcctgggggggtcctttctgtattacgcagaccacttcaagctgtattccggcttttgcgccaaccatatcaaagttcagaaggtgctggagagagccaaaaccgacaaagcatttaaggcatttctggacgcccggaatcctactaagcaacattcctctacactggagtcatacctgatcaagccagtacagagggtcctgaagtacccccttctgctaaaagaactggtgagtttgaccgaccaggaaagcgaggagcactaccatctgactgaggccctcaaggccatggaaaaagttgcgagtcacataaacgaaatgcagaaaatttacgaggactacggcacagtcttcgatcaacttgtggccgagcagtccggtactgaaaaggaagtgaccgagctatcaatgggcgaactcctgatgcacagtaccgtatcgtggctgaatccctttctaagtctcggaaaggcccgcaaggacctcgagctgaccgtgttcgtgttcaaaagggccgtgattcttgtgtataaggagaattgtaaactgaaaaaaaaactacccagtaacagccgtcccgcccacaactcaaccgaccttgatccctttaaattcagatggctcatccccatcagtgccttacaagtcaggttgggaaatccagcgggaactgagaataattctatctgggagctgattcataccaaaagcgagatcgaagggcgtcccgagactatctttcagctgtgctgttccgacagtgagagtaagacaaacatcgttaaggtcatacgcagtattctgcgtgaaaacttcaggcgacatattaagtgtgaactgccattggagaagacatgtaaagaccggttggtccctctgaagaatcgggtccccgtgtctgctaagctcgctagcagccggagtctgaaagtgctgaagaactcctcctctaacgagtggactggagaaactgggaaggggactcttctagactcagacgaaggatctctttctagcggaacacagagcagcggctgtccaaccgcagaaggaagacaggactcgaaaagtacatctccaggtaaatacccacatcctggactggctgattttgccgataacctcattaaggagagtgatatcctcagtgatgaagatgacgaccaccgacagaccgtcaaacagggaagccccacgaaggacattgaaattcaattccagcgtctacgtatcagcgaagatccggatgtgcatccggaagctgaacagcagcctggaccggagtcaggggaaggacaaaagggaggcgagcagcctaagttagtcagaggccacttctgtcccatcaagcggaaggctaacagtaccaagcgcgaccgcggtacactgctgaaagcacagattagacaccagtcactggattctcagagtgagaatgccaccatagaccttaacagtgtgctggagagagaattctctgttcagtctttgactagcgtcgtgagcgaggagtgcttctacgagactgagtctcacggtaagtcatag

SEQ ID NO: 174609 - DNA, 165 bp, Artificial Sequence
  derived and/or modified sequence
atgggcaacagcgacagccagtacaccctgcagggcagcaagaaccattccaataccataacgggagccaagcagattccttgtagcctaaagatacgcggtatccacgctaaggaagagaagtcattacacggatgggggcacggttctaacggcgctggttag

SEQ ID NO: 174610 - DNA, 588 bp, Artificial Sequence
  derived and/or modified sequence
atgggcaacagcgacagccagtacaccctgcagggcagcaagaaccatagtaataccatcacaggagccaaacaaatcccctgctctctcaagattcgggggatccacgccaaagaggaaaaaagcctgcacgggtggggccacggttccaatggtgcaggctacaaatcacggagtctggcgaggagttgtctgtcacatttcaagtctaaccagccttacgcatcacgccttggcggccccacctgcaaagtgtcccgaggcgtggcctattccacacatcgcaccaatgcacctggaaaggactttcaaggcatcagcgctgccttcagcactgagaatggattccacagcgtaggccatgaactggccgacaaccacatcacctccagggattgtaatgggcatctgttaaactgttatggcaggaatgaaagtattgctagtacccctcccggcgaggaccggaaatctcccagggtacttatcaaaacgctgggtaagctggatggttgtctaagggtcgagtttcataacggagggaatccttctaaagtgccagcagaggactgtagtgagccagtgtag

SEQ ID NO: 174611 - DNA, 258 bp, Artificial Sequence
  derived and/or modified sequence
atgggcaacagcgacagccagtacaccctgcagggcagcaagaaccatagtaacactatcactggtgctaagcaaattccatgctcgttgaaaatcagaggaattcatgcgaaggaagagaaatccctacacggatggggacatggctcgaacggagcaggatacaagagccgcagtctggccaggtcctgtttgagccatttcaaatcaaaccagccctatgccagtagacttggtggccctacttgcaaagtctag

SEQ ID NO: 174612 - DNA, 162 bp, Artificial Sequence
  derived and/or modified sequence
atgggcaacagcgacagccagtacaccctgcagggcagcaagaaccactcgaataccattactggggccaagcagatcccttgttccctcaagattagagggatacatgccaaggaagagaagagtctgcatggatgggggcatggtagtaacggagcctag

SEQ ID NO: 174613 - DNA, 1881 bp, Artificial Sequence
  derived and/or modified sequence
atggagggcccacgagaaaaccaggacccgcctccccgtagtctcgcccgacacctgagcgacgcggatcgtctgagaaaggtgatccaggaactggtggacacagaaaaatcatatgtgaaggacctatcgtgcttattcgagctgtatctcgaacctttgcagaacgaaacattcttaacccaggatgaaatggaaagtcttttcggttccctgccagagatgctggaattccaaaaagtgtttctagagactctagaggatggcatttcagcatctagtgacttcaatacgctcgagaccccatcccagttcaggaagctgctgttctctttgggtggatctttcttatattatgccgatcactttaagttgtattcaggcttctgcgccaaccacataaaggtgcagaaagtgctggaacgcgctaagacagataaggcctttaaagccttcctcgatgcccgaaatccaacaaaacagcatagcagtacactggaatcttacctgattaagcccgtgcagcgagttctgaagtatccccttctcctaaaagagcttgtctccttaactgaccaggagagcgaggagcattaccatctcactgaagcgctgaaggctatggagaaggtggcctcgcatataaatgaaatgcagaagatctacgaggactacggcacggtgtttgaccagttagtggccgagcagtccggaaccgagaaagaggtgacggagttaagcatgggggagctgcttatgcattctactgtgtcttggctgaatcctttcctatccttgggcaaagctcgaaaggacctagaactcacggttttcgtattcaagagagccgtcatacttgtttacaaggagaattgcaagctgaagaaaaaactcccctcgaattctcgacccgcacataactcgacagacctcgacccgttcaagttccgctggctgatccctattagtgcgcttcaagtcaggttaggcaatccagctgggaccgaaaacaattctatttgggaactgattcataccaaatctgagatcgagggacgcccagagacaatctttcagttatgctgctcagacagcgagtccaaaacgaatatcgtgaaagtgattaggtctattttacgcgaaaatttccggagacacatcaagtgtgaattgcctttagaaaagacctgtaaggatcggctggttccattaaaaaaccgagtgcccgtctccgccaagctcgctagttccagatctcttaaagtccttaaaaacagcagttcaaacgagtggaccggggaaactggcaaggggaccctcctggactctgatgaagggagcctttcctcaggcactcaatcctccggttgccccaccgcggagggccgtcaggacagtaagtctacctcccctggaaaatatccacacccgggactggccgacttcgccgacaatctcattaaggagtccgatatactgagcgatgaagatgatgaccaccgtcagacggtgaagcagggatcgccaacaaaggatatcgaaattcagtttcagagactacggatttccgaagacccagatgttcatccagaagccgagcagcagcccggaccagagtcaggggagggccagaaaggtggagagcagccaaaactggttaggggtcatttttgccctatcaagcgcaaagcgaacagcaccaaacgcgatagaggaaccctgctcaaggcccaaatacgacatcagagcctggattcccaatcagagaacgctacaatcgacctgaatagcgtcctggaaagggagtttagcgtccagagccttacatctgtagtttcagaagagtgcttttatgagaccgaaagccatggcaagtcctag

SEQ ID NO: 174614 - DNA, 5105 bp, Artificial Sequence
  derived and/or modified sequence
atgggcaattctgatagccagtacactctccagggctcgaaaaaccactctaacacgatcactggcgctaaacagatcccctgtagcctgaagatccgtgggatccacgctaaagaagaaaagagcctacacggctggggccacggatccaatggggctggatataaatcaaggagcctggccagatcctgcctcagccacttcaagagtaaccagccttacgcgtctcgcctgggtgggcctacatgcaaggttagccgcggagtggcttactctacacatagaacgaacgcccctggcaaagacttccaaggcatctcagccgcatttagcacagagaacggattccactccgtgggacatgaattggccgacaatcacatcacctccagagactgcaacggccatttgctgaactgctatggtcgcaacgaatctatcgcctctacacctcccggagaagataggaaaagcccacgggtgctgattaagacgttaggcaaacttgatgggtgcctaagagtggaattccacaacgggggtaacccaagcaaggtgcccgcagaagactgctccgagcctgtgcagctccttaggtattcccctacactggcctctgaaacgtccccagttcccgaggcacggagagggagcagcgctgattctctaccttctcatagaccctcacctaccgactcccggctgcgatcaagtaaagggagctcactaagtagtgagagctcatggtacgactctccctggggtaatgccggagaactatccgaggctgagggatcttttcttgcacctggcatgcccgatcccagtttacacgcctcctttccaccaggggacgctaagaagcccttcaatcagtcttcgtccctctctagtctgagagagctctacaaagacgccaacctgggaagtctctcaccatcaggtattagactctccgatgagtatatgggaacccatgcgagcctctctaacagggtctcctttgcatccgatattgatgtgccctcacgggtggcccatggagatcctattcagtattcatcctttaccttgccctgcaggaagccaaaggcatttgtggaagatacagccaagaaagactctctgaaggcccgtatgagacggatcagtgattggacgggctctctgtcccgcaaaaagcggaaactccaggagccacgttctaaggagggcagcgattattttgattcacgctcggatggactgaacaccgacgtgcagggcagctcacaggcaagtgctttcctgtggagcggtggtagcacccagattctgtcccaacggtctgaatcaactcacgcgatcgggtccgatcccctgcggcagaacatctatgaaaactttatgagggagctggagatgagtaggactaataccgagaacatcgagactagcacagaaaccgccgagtcaagcagcgaaagcctttcaagtctcgagcagctagacctcctgttcgaaaaggagcagggcgtcgtccgaaaagccggttggctgttttttaaaccactcgttacagtacagaaggagcggaaactcgagctggtggccaggcggaaatggaagcagtattgggtaaccctgaaaggctgtacactgctcttttacgagacatatggcaagaatagtatggatcagagcagcgccccacgatgtgcgctgtttgctgaagatagtattgtgcagagtgtgcccgagcacccaaaaaaggaaaacgttttctgcttatcaaactcatttggcgatgtctacctgttccaggccacctcacaaacagatctggaaaactgggtcaccgcggtccactctgcttgcgccagcttgttcgccaaaaagcatggaaaggaggacactctgagattgctgaaaaaccaaaccaaaaatctgctccagaagattgacatggattctaagatgaagaagatggctgaactccagctgtccgttgtttctgaccctaaaaatcgtaaggcgattgagaaccagattcagcagtgggaacagaatctggaaaagtttcacatggatttgtttagaatgcggtgctacctcgcctccttacagggtggtgagctccccaatccgaagagcctcctcgcagccgcaagcaggccttcgaaattagctctgggcaggctagggatccttagtgtcagttcattccatgccttggtctgctcacgggacgattcggccctgcgcaagcgaaccctgagcctgactcagcgtggccgaaacaaaaagggcattttttcatcactcaagggcctcgatacgctggctagaaaaggaaaggagaagagaccttctattacccaagtggatgaactactgcacatctatggctccaccgttgacggggtcccgcgagacaacgcatgggagatccaaacgtacgtgcatttccaggataatcatggggtgacagttggtattaagccagagcatagggtagaggatatattaactttagcctgtaaaatgcgccaactggaacccagccactatgggctccagctcaggaaactcgtggacgacaatgtcgagtattgtatcccagccccttacgagtatatgcaacaacaggtttacgatgagattgaggtatttccactaaatgtgtacgacgtccagctcacgaagacaggatccgtctgtgactttggctttgcagtgacagcacaggtcgacgagagacagcatctctcacgaatttttattagtgacgtcctaccagatggactggcttatggtgaaggtctgcggaaaggcaatgagattatgacgttgaacggcgaggccgtttctgacctcgacctgaaacaaatggaggcccttttctccgagaaatccgtgggcctcacactgatcgctagaccacccgatactaaagccacactctgcacatcttggagcgactcagacctcttttcgagggatcaaaagtctctgctgccaccccctaatcaatcgcagttacttgaagaattcctggataattttaagaaaaacactgcaaatgatttttcaaacgttcccgacatcacaaccggtttgaagcgctcgcagaccgacggaacgctcgaccaggtttcgcatcgggagaaaatggagcagactttcagatctgctgagcagattactgctctgtgccgcagctttaacgattcccaggcaaatggcatggagggtcctcgcgagaaccaggatcctccaccaagaagcctggccaggcacctctctgacgctgaccgactgagaaaagtcatccaggaactggttgacacagagaaatcctacgttaaggacctttcttgcctttttgagctgtacctcgaaccattgcaaaacgaaacatttctaactcaggacgagatggaatcactgtttgggtctctgcccgaaatgcttgaatttcaaaaagtcttcttggagacactggaagatgggatctcagcgagctcggactttaacactctcgagacaccatcccagttccgcaagctcctgttttctctggggggatccttcctgtattacgcggatcatttcaagttatattctggattctgtgcgaaccacattaaagtgcagaaggtacttgaacgtgcaaaaacggacaaagcgttcaaggcattcttggacgccagaaatccaaccaagcaacacagcagcacacttgagtcgtatctgattaagcccgttcagcgggttttgaaataccctctgctgctgaaggaacttgtaagtcttacagatcaggagagtgaggagcactaccatctaactgaagcgctgaaggccatggagaaggtggccagccatattaatgagatgcagaagatctatgaggactacggcacagttttcgatcagctggtcgctgaacaatcgggcacagagaaggaagttactgagctgagtatgggggagttgctcatgcactctaccgtgagctggttaaacccattcttgtctctgggtaaggcgaggaaggatctcgaactcaccgtcttcgtgttcaagagagcagtaatactggtgtacaaagagaactgtaaactgaagaaaaagctgccaagcaacagccgaccggcacataatagcaccgatttggatcccttcaagttcagatggttgattcctattagcgctttgcaggtgcgcctgggaaaccccgcaggcactgagaacaactcaatctgggaactgatccacaccaaaagcgaaattgaggggaggcccgagacgatctttcagttgtgttgctctgacagtgagagtaaaacgaatatcgtgaaggttatccggagcattctgcgcgagaacttcaggcggcatattaaatgcgaactgcctcttgaaaaaacatgtaaagaccgactggtccctctgaagaatcgtgtgcccgtgagcgctaaactcgcatcaagcaggtccttaaaggttttgaagaattcatccagcaacgaatggacaggggaaacaggaaaggggaccctactggacagtgacgaagggagcctcagttctggaacccagtcttctggttgtccaaccgccgagggtcggcaggacagcaagtcaacatctcctggaaagtacccccaccccggacttgcagactttgccgataacctcattaaggagtctgacattctcagtgacgaggacgatgatcaccgtcagactgtaaagcaggggagccctaccaaggacatcgaaatccagttccaacggttgaggatttccgaagatcctgatgttcaccccgaggccgaacagcaacctggcccagagtcaggcgaaggacagaaaggaggcgagcagcccaagctggtccgaggccacttctgtccaatcaagcgaaaggctaatagtaccaagagggaccgaggaacactgctaaaggctcagatcagacatcagtctttggacagtcagtccgagaatgccacgatagatttgaatagcgtactcgaacgcgaattttccgtgcagagcctgacatctgtggttagcgaggagtgcttctacgaaactgagtcacacggcaagagcta

SEQ ID NO: 174615 - DNA, 3234 bp, Artificial Sequence
  derived and/or modified sequence
atggacagcaagatgaagaagatggctgaactgcagctctctgtggtatcggaccctaagaacagaaaggcaatcgagaatcagatccaacagtgggagcagaatctagaaaagttccatatggacctgttccggatgcgctgctatctggccagcctccaaggtggtgagctgcctaatcccaaatcactcctggcagcggctagcagacccagcaaattggcactgggcagactcggtattttgtccgttagttcctttcatgctctcgtgtgtagtcgggacgacagcgccctgaggaaaagaaccctgtccctgactcagcgaggcagaaacaagaaaggaatcttttccagtttgaaaggactggataccctagctcggaagggcaaagagaaaaggccatcaatcacacagatattcgactcctccggatcacacgggttttcggggacacagctgccacagaacagctctaattcctcagaggttgacgagcttctgcatatctatgggtccaccgtagatggagtaccaagggataatgcttgggagatacagacgtacgtgcactttcaagacaatcacggcgtcaccgttggaattaagccggagcacagagtggaggatatcctaaccttggcttgtaaaatgagacaactggaaccttcccactacggtttacagttaaggaagctggtggatgataatgtcgaatactgcattcctgccccttatgagtacatgcagcagcaagtatacgacgaaatagaggtgtttcctcttaatgtgtatgacgttcagttgactaagacagggtccgtttgcgactttggctttgcagtgacagcgcaggtcgacgaaaggcagcacctttctagaatctttatctcagacgtcctccccgacggtctcgcctacggcgaaggactccggaagggcaatgagatcatgaccctcaatggtgaggccgtgagtgatttagacctgaaacagatggaggccttgttttctgaaaagagcgtaggcctgactctaatcgcacgcccaccagataccaaagcaacactgtgtaccagctggtccgattctgatctgtttagccgtgatcagaaatccctgcttccgccacccaaccagtcgcaattgctggaagagttcctagacaacttcaaaaaaaacacagctaatgacttcagcaatgttcccgatattacaactggactgaaacgaagccagacagatgggacccttgatcaagtctcacatagggagaaaatggaacagacgtttaggtccgcagaacagatcacagcactttgccgctctttcaacgatagccaagccaacggtatggagggccctagagaaaatcaggacccaccgcctaggtctctggcccgtcacttgtctgatgctgatagacttcgtaaggtaatccaagaacttgttgacaccgagaaatcatatgtgaaggatttatcatgcctgttcgaactctatctggaaccactgcaaaacgagacctttctaacacaggatgagatggaatctttgttcggcagtctgcctgaaatgttggaatttcagaaggtcttcctggagaccctcgaggatggaatttcggcctcatcagactttaatacgctggagacaccatcccaattcaggaagctgctattcagccttggtgggtctttcttatactatgcagaccatttcaaattatacagcggattctgtgctaatcacattaaggttcaaaaggtactcgaacgtgcaaagacagacaaagcctttaaggcgttcctggacgccagaaatccgacgaaacagcactcgtccacactggaatcctatctgattaagccagtgcagcgggtgctcaagtaccccttactcctcaaggaactcgttagtctgacagaccaggagtcagaggagcattatcatctgacggaagcactgaaggcaatggagaaggtcgcatcccacatcaacgaaatgcagaagatttatgaagactacggcactgtgtttgatcagcttgtggcggaacagtcggggacagagaaggaggtgaccgagctgtcaatgggagaattgctgatgcacagtacagtgtcctggctcaaccccttcctttccctcggcaaagctagaaaagacctggaattgaccgtgtttgttttcaaaagggccgtgattctagtctacaaggaaaactgtaagttaaagaaaaagctgccatccaactctaggccagctcataatagtaccgatctggatccattcaagttccgttggctgatccccatctctgccctacaggtgcgcctgggaaacccggcaggtaccgagaacaactctatctgggaactgattcacactaagtcagaaatagaaggcagacccgaaacgatttttcaattgtgctgcagtgacagcgaatccaaaaccaacatcgtgaaggtgatacggtcgattctgcgcgagaattttcggcgacatatcaagtgtgagttgcccctggaaaagacctgcaaagaccgcctggtccccctcaagaacagagtccctgtttcggcgaaactggcctccagccgtagcctgaaggtgttgaagaattcaagttctaatgagtggacgggagaaaccgggaaagggacattgctggactctgacgagggcagcctcagctctggtactcaatccagcgggtgtcctaccgcggaaggacggcaggacagtaaaagcaccagtcccggtaaatacccccatcccggactcgctgattttgcagataacctgattaaggagtcagacatattatccgatgaggacgatgatcaccgtcaaactgtgaagcaaggcagtcccacaaaggatattgagatccagttccaaaggctccgcatttcagaggacccagacgttcacccagaagcggagcaacagccaggcccagagtctggcgagggccagaagggaggcgaacaacccaagctggtgagaggacacttttgccctataaagcggaaggctaattcaactaagcgggacagaggcacactcctgaaagctcagatccggcatcagtcactcgactcccagagcgagaatgccaccatcgacctcaactccgtgctggaaagggagttcagcgtccagagcttaacttctgtcgtgtcagaggagtgcttttacgaaacagagtcgcatggcaagagttag

SEQ ID NO: 174616 - DNA, 5192 bp, Artificial Sequence
  derived and/or modified sequence
atgggcaattccgactcccagtacacccttcagggctcgaagaatcactcaaataccatcacaggcgcaaaacagatcccatgttctctgaagatcaggggaattcacgcaaaggaggaaaagtcccttcacggatggggacatgggagtaacggggctggctacaaaagcaggtcactggctcgctcatgcctgtctcacttcaaaagcaaccagccttacgccagtaggttgggagggccaacctgtaaagtaagccgcggagtcgcctatagtacccacagaacaaatgcccctggaaaagactttcaagggatctcagccgctttttcgacggagaatggctttcactctgtggggcatgagctagccgataatcatatcacatcacgcgattgcaatggccacctgctgaactgctacggccgaaatgagagtatagccagtactcctcctggcgaagaccgaaagtcacctagggtccttatcaagaccctgggaaagttggatgggtgtctaagagttgagttccacaacggcggtaacccctctaaggtgccagccgaagactgttccgagcccgtgcagcttttgcgctactcacccacacttgcatctgagacgagcccagtgcctgaggccaggcgtggcagctccgctgattcgctcccttcacatagacccagccccaccgattctcgcctgagaagtagcaaagggagctccttatcaagtgaatcctcctggtacgactccccatgggggaacgcaggagaactgtctgaggctgagggctcatttctagcacccggtatgcctgatcctagccttcatgcgtcttttcccccaggcgatgctaagaagccctttaaccagagttcatccctgtcctctctgagagagctttacaaagatgccaacctgggtagcctctccccatccgggatcaggctctcggacgagtacatgggcacccatgcatcccttagcaatagggtgtccttcgcctctgacattgatgtgcctagtcgtgttgctcatggggacccaatccaatactcgtcattcaccctgccatgtcggaagcctaaggccttcgtcgaagatacagctaaaaaagatagccttaaagcaaggatgagaagaatctcggactggaccggatctctctctcgcaagaaaagaaagctccaagaaccacgctcaaaagaaggtagcgattatttcgacagtcggtctgacggcctgaacacagatgtgcagggaagctctcaggcttcagcgttcctgtggtctggtggaagcacgcagatcctttcccagagatccgagtcgacacatgccatcgggagcgatcctctcagacagaacatctatgagaacttcatgcgagaattggagatgtcgcgcacgaatactgagaacattgagactagtaccgaaactgctgaaagttcatctgagagtctgagttcactcgagcagcttgacctactcttcgaaaaggagcagggagttgtgcgcaaggccggatggctcttttttaagccactggtgacggttcagaaagaacgcaaactggagcttgtggcgcgtagaaaatggaaacaatactgggtgaccctcaagggctgtactttactgttttacgagacttatggcaagaacagcatggatcaatccagcgctcccaggtgcgccttgttcgctgaagacagcatcgttcagtcggtgccagaacatccaaagaaggagaacgtcttctgcctgtctaacagttttggagatgtgtacttgtttcaagccacttctcagacggacctggaaaactgggtgacggcagttcacagcgcatgtgcgtctctgttcgccaaaaagcatgggaaggaggatactctgaggcttctaaagaatcagactaagaaccttctccaaaagatcgacatggatagcaaaatgaaaaagatggccgagctgcagcttagcgtggtgtctgatcccaagaatagaaaggcaatcgagaaccagatccaacagtgggaacagaacctcgaaaaatttcacatggatctgttccgcatgcgttgctacctggccagcctccaggggggagaactacctaatcctaagagcttactggccgctgcgtctcgccctagtaagttagcactcggcaggctgggtattctttccgtttcatcctttcatgctctggtctgttctcgggacgactcagctcttcgaaaaaggactttatcccttacccagcggggtcggaataagaaaggtatcttttcttcattgaaaggccttgacactctggcacgcaagggcaaggaaaaacgcccaagcatcacacaagtggatgagctccttcatatatatgggtcaaccgtggacggggtgccccgagacaatgcctgggagatacagacttacgtccattttcaggataaccacggcgttacagtgggtattaaacctgagcatcgggtcgaggacattcttacattagcctgtaagatgagacagttggagccctctcattacgggctccagctgaggaaacttgtggacgacaacgtggagtattgcattccggctccatatgagtacatgcagcaacaggtgtacgacgagatcgaagtctttcccctgaacgtgtacgacgtccagctaaccaagaccgggtcggtgtgcgacttcgggtttgctgtcactgcccaggtcgacgagagacaacatctgtctagaatatttatcagtgacgtcttgccagatggcctcgcctacggggaaggtctgcggaagggcaatgagattatgacactgaacggagaggctgtctccgatctggatcttaaacagatggaagccctgtttagcgagaaatcagtgggcttgacgctcatcgccaggccacctgatacaaaagcaaccctgtgcacttcttggagtgactccgacctcttcagtagagatcaaaagagccttttaccaccgcctaaccagagtcagcttctggaagaatttctagacaactttaagaaaaataccgcgaacgacttttctaatgtgcctgacattactaccgggctcaagagaagtcagacagacgggactttggatcaggtgtcccaccgggaaaagatggagcagacctttcgcagcgctgaacaaattactgccttgtgtcgatcttttaatgactctcaggccaacggcatggaggggccacgtgagaaccaagacccccctcctcgctcgctcgcaagacacctgtccgatgcggatcgtcttcgtaaggtaattcaggagttggtcgacactgagaagtcgtatgttaaagacctgagctgtttgtttgaactatacctcgaacctctgcagaatgagacgtttctcactcaagacgagatggagtccctttttggtagcctgcctgaaatgctcgagtttcagaaagtgtttctggaaacactggaagacgggatcagcgcaagctcagacttcaacacactcgagacaccttcccaatttaggaagctgctgttctccttgggaggaagctttctttactacgctgaccattttaagctctactctggcttctgcgcgaaccacattaaggtacagaaggtcctggagcgagcaaagactgacaaggctttcaaggctttcctagatgcaagaaaccccaccaagcagcattcctctaccctcgaaagctatttgattaaacctgtccaacgcgtcttaaagtatccactgttgctcaaagaactggtgtctctgactgaccaagagagcgaggagcattaccatttaacagaggccctgaaggctatggagaaggtggcgagtcacatcaatgagatgcagaagatttacgaagactacggcactgtattcgatcaactcgtcgcggagcagagcggcaccgaaaaggaacaacccgagtggagttccgaggtcatggacgtcttggatccacgtggcaaactgaccaagggtacactggaggagccacggacactagtcacggagctgtccatgggagaattgctgatgcattccaccgtgtcatggttgaatcccttcctgtcactgggtaaggctcggaaggatcttgagctcacggtcttcgtgtttaaaagagcagtcatcctggtctacaaggagaattgtaagctgaaaaaaaagctgccatctaattctagacctgctcataacagcacagacctcgatccctttaagtttagatggctcatcccaattagcgccttgcaggttcgcctgggtaaccccgcaggtacagaaaacaattccatttgggaactcatccacacaaagagtgagatcgaaggcaggcccgaaaccatctttcaactgtgttgtagcgattccgagagtaagactaacatcgtcaaggtgatccgcagcatcttaagagaaaatttccgcaggcatattaaatgcgagcttcctctcgagaaaacttgtaaagatcggctcgttccactcaaaaatcgagtgcccgtttcggcaaaattggcttcttcacggtcactcaaagtcctgaaaaacagcagttccaacgaatggaccggagaaaccgggaagggaacgctgttggacagcgacgagggatcattgtcctctgggacacagtcctccggctgtccgaccgcagagggtcgtcaggatagtaaatccacctctcccggaaagtacccccatccaggcctcgcagacttcgctgataatctgataaaagagtcggatatcctgagcgacgaggacgatgaccatcgacagacagtcaaacaaggatcgccaaccaaggatattgagatacagtttcagcgacttcgcatttccgaggatccagatgtgcatccagaagccgagcagcagccgggaccagaaagcggagagggacagaagggcggagaacagccaaaactcgtcaggggacatttttgccccatcaaacgaaaagcgaacagtaccaaaagggataggggcactttgctgaaagcccaaatacggcatcagtccctcgattctcagtccgagaatgccacaattgatcttaactccgtgttggagagggaattctcggtgcaaagcttgacaagcgtagtgtctgaagagtgtttctacgaaactgaatcccatggcaaatcata

SEQ ID NO: 174617 - DNA, 3042 bp, Artificial Sequence
  derived and/or modified sequence
atggatctgttcagaatgcgctgctacctggccagcttacaagggggagaactgcctaatcccaagtctctgctggccgctgcctctcgaccttcaaaacttgctctaggtcgcctcggaatcctcagcgtgtcatctttccacgcattggtgtgctctagggatgattctgcattgcggaaacgtactctgtccctcactcaaagaggaagaaacaaaaagggaatcttctcttctttgaagggactggatacactggcccgtaaagggaaagagaaaagacccagtatcacacaagttgacgaactgctccacatttacggaagtactgttgatggggtacccagagataatgcttgggagatacagacctatgtccactttcaggacaatcacggtgttacagttggaatcaagcctgaacatagggtggaggatatcctgaccctggcctgtaagatgaggcagctggaacctagccactacggattgcaactccgaaagctggttgacgataatgtagaatactgtattccagctccttacgagtacatgcagcagcaggtatatgatgagatcgaagtgttcccgctcaatgtatacgatgtccaacttaccaaaactggctcagtgtgtgactttggtttcgctgtgactgcccaggtcgatgagcgtcaacacttatctaggattttcatctcagatgtcctgccagacgggttggcctacggagaaggactgaggaagggcaacgagatcatgacactcaacggcgaggcagtctctgatctggatctgaagcagatggaggccctgttcagcgagaaatctgtgggtctaactctcattgccagacccccagacaccaaggctacattatgtacgagctggtctgattctgacctgttttcccgggatcagaagtccttactgccaccaccaaatcagtcccaattgctagaagagttcctcgataactttaaaaagaatacagctaatgacttttctaatgtgccagacatcactaccgggttgaaacgctctcaaacagatggcactctcgaccaggtgtcccatagagagaaaatggagcaaacattcaggagcgccgagcaaataaccgccctgtgtcgatcattcaacgactcacaggccaatggcatggagggcccacgtgaaaatcaggacccgccacctcgctccctggccaggcacctgtcagacgccgatcggttaagaaaggtcatccaggagctggtggacactgagaaaagttacgtgaaggacttaagctgcctgtttgagctgtaccttgagcccctgcagaatgaaacttttctgacgcaagacgaaatggaatctttgtttggatctctacccgaaatgttagagttccagaaagtcttcctggaaaccttagaggatggaatctcagcgagcagtgacttcaatacccttgaaacaccttctcagtttcgaaaactgttgttcagcctgggcggttcatttctgtactacgccgaccacttcaaactatattcggggttctgcgccaaccatatcaaggtccagaaggtgctggaaagggcaaagaccgacaaagcattcaaagccttcctggatgcccgtaatcccacgaaacaacacagcagtaccctggagagttatctgataaaacctgttcagagggtactcaagtacccccttttgttgaaggaactggtgtccctaacagaccaggaatccgaagagcactatcacctcacggaagcactgaaggctatggagaaagttgcctcccatattaacgaaatgcagaagatctatgaggattacggaactgtgttcgatcagttagtggctgagcaaagcggaaccgaaaaagaggttactgagctctctatgggagaattgctcatgcactctaccgtgtcttggctgaatccttttctctcactaggtaaagcacgaaaggatttggagcttacagtttttgttttcaaacgggctgtgatcctagtttataaggagaactgtaagctcaagaaaaaactccctagtaattctcgacccgctcacaattcaactgacctagacccttttaaatttaggtggctgataccgatatccgctctgcaagttaggctagggaacccggcaggcactgagaataatagcatctgggaactcatccacactaagtccgaaattgaaggcagaccagaaacaatttttcaactgtgctgttccgacagcgagagtaaaacaaatattgtcaaagtcattcgatcaattctccgagagaattttcgcaggcatatcaagtgcgaacttcccctggagaagacgtgtaaagataggctggtgcccctgaagaaccgcgtgcccgtcagtgcaaaattagctagttctagatccctaaaggtcctgaaaaactccagcagtaatgagtggacgggagagaccggcaagggtactctattagacagcgatgaaggaagccttagctccgggacgcagtcatccgggtgccccactgcagagggtagacaagattcaaagagcacctcccctggaaagtatccacacccgggtctagccgacttcgccgacaatttgatcaaggaaagcgacattctgtcagatgaggatgatgaccatcgccagactgttaagcaaggaagtcccacgaaggatattgagatacagttccagaggcttcgcatttccgaagatcccgacgtccacccggaggcagaacaacagcccggacctgagtctggcgaggggcagaaaggtggggaacagccaaagttggtgagaggacacttctgtccaataaagagaaaggctaactcgactaaacgtgatcgaggaactctgctgaaggcccaaattaggcaccagtctctcgactctcaatccgagaatgctacaattgacttgaacagcgttcttgaacgggagttctccgtccaatccttaactagcgttgtctctgaggagtgcttctacgaaactgagagccatggaaagagctag

SEQ ID NO: 174618 - DNA, 5105 bp, Artificial Sequence
  derived and/or modified sequence
atgggtaattccgactcacagtacacattgcaaggttccaagaaccactccaacaccattactggagccaagcagatcccttgttccctgaaaatacgcggaattcatgctaaggaggaaaagtctcttcacggctggggacatgggtcaaacggcgcaggttacaagtctcgttctctggcgagatcgtgcctgtctcattttaaaagcaaccagccgtatgctagtcggctcggcggacccacatgcaaagttagccggggtgtagcctacagtacacaccgaactaatgctcctggtaaggacttccagggtattagtgctgccttctccacagaaaacggattccactctgtgggccacgagctggccgacaaccatataaccagcagggactgtaatgggcacctgctaaactgctacgggagaaacgaatccattgccagcacacccccaggcgaggatagaaaaagccctcgagtgctgataaaaacactaggtaaactcgacggttgtctgcgtgtagagtttcataatgggggaaaccctagcaaggtgccggctgaagactgctcggagccagtccagttgctccggtactcccctactcttgcctccgagacatcgccagtgcccgaggccaggcgcggaagcagtgccgattcgctcccttctcatagaccgagccctactgattcccgtctccggtcttcaaaaggcagcagtctttcaagcgaatcatcttggtatgacagtccttgggggaacgccggtgaacttagcgaggcggagggctccttcctggccccaggtatgcccgacccctctttgcatgcttcctttccccctggagatgcaaagaaaccttttaatcagtcgtcttcgctgtcaagcctacgagagctctacaaggacgccaatctgggcagtttatctccttcagggatcaggctttcagacgagtatatgggaacgcatgcatccctgtcgaatcgggtttctttcgcttcggatattgacgtcccaagtcgtgtcgcgcacggggacccaatccagtacagcagcttcacactcccgtgcaggaagccgaaagcttttgttgaggacaccgctaaaaaggactccttaaaggcccgaatgcgcagaatatctgattggaccggatcactgtcccgtaagaagcggaagctgcaggagccccgttctaaggagggctcagactatttcgactctaggtccgatggccttaacacggacgtgcaggggtcctcccaagcaagcgcgtttctctggagcggcggtagtacacaaatactcagccaaagatctgaaagcacccatgcaattggctcagatcccctgcggcaaaatatttatgagaactttatgcgagagctggaaatgagtcggactaacaccgaaaacatagagacttcaaccgagacggctgagtcctcaagcgagagcctatctagtctcgagcaactcgatctactcttcgaaaaggaacaaggggtggtgcgcaaagccggatggctgtttttcaaacctctcgtgactgtccagaaggagagaaaattagagttggtcgcgcgacggaagtggaagcagtactgggtgacgctgaaaggatgcacactgttgttttatgagacgtacgggaaaaattctatggaccagtctagcgctcctcgatgcgccctgttcgcagaggattctatcgttcaaagtgtgccggagcatcctaagaaagaaaacgtgttctgcctgtccaactctttcggcgacgtgtacctcttccaggccacgtcccagacagatcttgagaattgggtcacagccgtccattccgcatgcgcgtcactgtttgctaaaaaacacggtaaagaggatacactgcgcctgttaaagaaccaaacaaaaaacctgctgcagaaaatcgatatggattctaagatgaagaagatggcagagctgcagctgtcggtggtttcagacccaaaaaacaggaaagccattgaaaaccaaatacaacagtgggaacagaatttggagaaattccacatggacctgtttcgcatgcggtgctatttggcctcactccagggcggagagctgccaaatcccaagtctctgctcgcagcggctagccgaccaagcaagctggctctcggaaggttggggatcttatctgtttccagttttcatgctcttgtgtgttcccgagacgattctgctctgaggaagaggaccttaagcctaacacagcgcggtagaaataagaaggggatattctctagtctcaaagggctcgatacactagcgaggaagggtaaagaaaaaaggcccagcataacccaggtggacgaactactgcatatctacggaagcactgtggacggggtgcctcgcgacaacgcgtgggaaatccagacttacgtgcatttccaggataaccacggggtgacagtcggcatcaaacctgaacaccgggtagaagatatcctcaccttggcttgtaaaatgcggcaactggagccctctcactatggccttcagctgcgaaaacttgtcgatgacaatgtggaatactgtattcctgccccatacgaatacatgcagcaacaggtttacgatgaaatcgaagtattccctctgaacgtgtacgatgttcaacttaccaagaccggtagcgtgtgcgatttcggattcgcagtgactgctcaggtggacgagagacagcatctctcacggattttcattagcgatgtgcttcctgatggtcttgcatatggagaaggcctgcgcaagggcaatgaaattatgaccctcaacggcgaagcagtaagtgacttggacctgaaacagatggaggcactgttcagcgaaaaaagcgttggcctcaccttaatagccagacctcccgatacaaaagccactctgtgtacatcctggagcgactcagacctgtttagccgagatcagaagagcctcctaccaccacctaatcagtcacaactgctggaggaattcctagacaactttaagaaaaacacagccaacgatttttccaacgtcccagacatcaccacggggctgaagagatcgcagacggacgggacattggatcaggtcagccatagggagaagatggaacagacctttcgctctgccgagcagatcactgccctgtgtcggtctttcaacgattcacaggcaaatggtatggagggcccacgagaaaaccaggacccgccaccccgttctctcgcaagacatctcagcgacgccgatagacttcgcaaagtcatccaggagttggtggacacggaaaaaagttacgtcaaagacttgtcttgtctattcgagttgtatctggaacctttacagaacgaaaccttcctcacacaagacgaaatggaatctctgttcggatcactcccggaaatgctggaatttcagaaggtgttccttgaaaccttagaggatggcattagcgcctccagtgacttcaacaccttggagactccatcgcagtttcgcaaactattgttcagcttaggcggatcctttttgtactacgcggatcatttcaaattatattctggtttttgcgcaaatcacattaaagtccaaaaagttctcgagcgggcaaagactgacaaagctttcaaagcttttctggatgccaggaaccccaccaaacaacattctagcacactagaaagctacctgattaagccagtgcaacgagtgttaaagtatccccttctcctgaaagagcttgtgtccctaacagaccaggagtctgaggagcactatcaccttacggaagctctgaaagccatggagaaggtggcatcccacataaacgagatgcagaagatctacgaggactacgggacagttttcgatcagttggtggccgaacagagtgggactgagaaggaggtaacggaactgtcaatgggtgagctgcttatgcactctactgttagctggcttaatccgttcctatcccttggaaaagcgcgtaaagacctcgaattgactgtgttcgttttcaaaagagccgtaattcttgtctacaaagagaattgcaagttgaaaaaaaagctgccttctaacagtagaccagctcataattctaccgacctggaccccttcaagtttagatggctgattcccattagcgctcttcaggtgcggttgggcaaccccgcaggcaccgaaaataattctatctgggagttaatccacacaaaatccgaaattgagggccgtcccgagacaattttccagttatgctgtagtgattcggaaagtaagactaatatcgtgaaagtcatccggtctatattaagagagaacttcaggaggcacatcaagtgtgagctccctctagaaaagacttgcaaagacaggcttgtgcccctgaagaacagggttccagtatccgcgaagctcgcttctagcagaagcctgaaggtcctgaaaaactctagttcaaacgagtggacaggggagacaggcaaagggactctgttggactctgatgagggctctctgagctcaggtacccaaagttctgggtgccctactgctgaaggtcgtcaggacagcaagagtacatcccccggaaaatacccccacccaggactagccgacttcgcagataatctgatcaaggagtcagatattctgagtgacgaagatgatgatcacaggcagactgtgaagcaaggatcccccacaaaggacattgagattcagtttcaaagactccggatttcagaggatcctgatgtgcacccagaggccgaacagcagcccggacccgagtctggggaaggacagaaaggaggagaacagccgaagttagtaagaggccatttttgcccaataaaacggaaggctaatagcacaaagagggaccggggtaccctccttaaggcgcaaatccgccatcagtccctggattcccagtctgaaaatgctactatcgacctaaacagcgttttagaaagagagttctccgtccagtcccttaccagtgtcgttagcgaagagtgtttctacgagactgaaagccatggaaagagtta

SEQ ID NO: 174619 - DNA, 4104 bp, Artificial Sequence
  derived and/or modified sequence
atgggaaattcagactctcagtatactctccagggatccaagaaccattctaatactataacaggcgctaaacagatcccttgctcactgaagatcagaggtattcatgcgaaagaggaaaagagcctgcacgggtgggggcacgggtctaatggcgctggatataaatctcgaagtctcgccagatcctgtctgtcccactttaaatccaatcagccatatgcctcccggctcgggggacctacgtgcaaagtgtccaggggagtggcttactctactcacagaacaaatgcgccagggaaggatttccagggaataagcgcagctttcagcactgagaacggctttcactctgtgggacacgagcttgccgataaccatattacatccagggactgtaacggacatcttctgaattgttatggccgtaatgaaagtattgcatcaactccaccaggggaggataggaaatccccacgggtcctgataaagaccctgggtaaattggatggctgcctgcgggtggaattccataatggcggtaatccgagcaaagtgcctgccgaggactgcagtgagcctgtccagctgctccggtactcccccactctggcctccgagacatccccagttcctgaagctcggaggggatccagtgccgattcattgccatctcatagaccatctcccaccgactcccggctgcgcagtagcaagggatcttctctctcaagcgaatccagctggtatgactccccatggggtaacgccggtgagctgtctgaagccgaaggatcattccttgcacctggcatgcccgaccctagcttgcacgccagctttccccctggtgacgctaagaagccatttaaccaaagtagtagcctgtcttccctcagagagctttacaaagacgctaatctgggaagcctgagtccctccggtatacggctgagtgatgagtacatgggcacccacgcctccctatcgaatcgcgtgtcttttgccagcgatatcgacgtcccttcccgagtcgcccatggagacccaattcagtactcaagctttaccttgccctgccgaaaaccaaaagccttcgttgaggacactgctaagaaggacagcttaaaagctcgtatgcggcgtatatcagactggaccgggtctctgagccggaaaaagcgtaagctgcaagaaccgagatctaaggaaggcagcgactacttcgatagccgatccgacggactcaacacagatgttcagggtagctctcaggccagcgcctttttgtggtcgggaggcagcacgcagattctgtcccagcggagcgaaagcacacatgccatcgggagtgaccctcttcggcagaatatctacgagaattttatgcgagaactggaaatgagcagaactaacactgagaatatagaaacttcaaccgagacagcggaaagttcatcagagtctctgtcgtccctggaacagttggacctgctgtttgaaaaggaacagggggtggtccgcaaagctggatggctgttcttcaagcctttggttacagtgcaaaaggagagaaaactggagctggttgcgaggcgcaaatggaaacagtattgggtaacattgaaaggttgcaccctgcttttttacgagacttatgggaagaacagtatggaccaatccagcgccccacgttgcgccctgttcgctgaggactccattgtgcagtcagtaccagaacaccctaagaaggaaaacgtcttctgcttgtctaattctttcggggatgtgtatctgtttcaggctacatctcagaccgatcttgagaactgggtgactgccgtgcatagcgcctgcgcttctcttttcgccaagaaacatggcaaggaggataccctgaggttgctgaagaaccagacaaaaaatctgctgcagaaaatcgatatggacagcaagatgaaaaagatggctgaattgcaactgagcgttgtgtcagacccaaagaataggaaggcgattgaaaaccagatccagcagtgggaacagaaccttgaaaagttccatatggacctctttaggatgcgctgttatctggcctctctccagggtggggaactcccaaatcctaaatcgcttctcgccgcagctagccgccctagtaagctagccctgggcaggctgggcattctgagtgtttcgtctttccacgctctggtatgcagtcgggatgattccgcactgcggaaaagaaccttatctctaacccaacgcggacgaaacaagaaaggtatcttttcaagtcttaaggggttagatacattggctagaaaggggaaggagaagagaccctctatcactcaggtggatgaactgctacatatttacggctccaccgtggacggtgttccgagggataacgcctgggagattcaaacttacgtgcacttccaggacaaccatggagtcaccgtgggaattaagcctgagcatagagtggaggacattctgactctggcatgtaaaatgagacaactggaaccctctcattatggcctgcagctgcggaagttggtggacgataacgttgagtactgcatcccagctccctatgaatatatgcagcagcaagtgtacgatgagatagaggtttttccactgaatgtatatgacgtccaactcacaaaaactgggagcgtgtgcgattttgggtttgccgtcacagcccaggttgatgagcgacagcatctgtctcggattttcatttcagatgtccttcccgatggcttagcctacggggaaggtctgaggaaagggaacgagattatgacactcaatggggaggccgttagcgacttagaccttaagcagatggaggctctgttttctgaaaaatctgtcggtttgacattgatagcgagacctccagataccaaggccactctctgcacatcttggtccgacagcgacctgtttagcagggaccaaaagtctttactgcctccacctaatcagagccagcttctggaggagttccttgataattttaaaaagaacacagccaatgatttctcaaatgtacctgacatcactacaggcctcaagaggagtcagacagatggcacactggatcaggtgtctcacagagagaaaatggagcagaccttcaggtcggccgaacagattacagcgctgtgtaggagttttaacgactcccaggcaaacgggatggaagggccaagggaaaatcaggatccccctccaaggtctttagccaggcacttgtcagacgcagacaggttgaggaaggtgattcaggagctagttgatactgaaaaatcctatgtcaaggatcttagctgtctctttgagctgtatctggagccactgcaaaatgaaacgttcctgacacaggacgaaatggagtccctgtttgggagcctgcccgagatgctggagtttcagaaagtgttcctggagacgctcgaagacggaatttccgcttcttctgatttcaatacacttgaaacacccagccagttcagaaagcttctcttcagtctgggaggaagcttcttgtactatgcagatcactttaaactatacagcggattctgtgccaaccacataaaagtccagaaggtgctcgaaagagctaaaaccgataaggccttcaaggcttttcttgacgctcgtaaccccaccaagcaacacagcagcacccttgaatcatacctgatcaaacctgttcagcgggtgctgaagtatccactgctgctgaaagagctagtgagcctcacggaccaggagtcggaggaacattatcacttaacggaggcccttaaggccatggagaaggtggcctcccatataaacgaaatgcagaagatctacgaagactatgggacagtcttcgaccaactggtagcggagcagagcggcactgaaaaagaagttaccgaactgtctatgggcgaactcctcatgcactcaaccgtctcctggctgaatccctttctttctctgggcaaagcacgcaaagatcttgagctcaccgtattcgtgtttaaaagggctgttatcctggtgtacaaagagaactgttag

SEQ ID NO: 174620 - DNA, 5843 bp, Artificial Sequence
  derived and/or modified sequence
ggtcgtcctattgatcctagagaggggcctgggcgaccaccgttggacggaagggatcacttcggaagaccccctgtggatatcagagagaatcttgttaggcccggaatcgaccacctgggccgtagggatcacttcggattcaaccccgaaaaaccttggggtcaccggggagattttgacgaacgcgaacaccgtgtcctgccagtgtacggagggcctaagggccttcacgaggaaaggggtcgtttccgctccgggaactatcgttttgacccacgttccgggccttggaataggggattcggccaggaggtgcaccgcgattttgatgacagaaggcggccatgggaacggcagagagaccgggatgaccgcgactttgacttttgtcgtgaaatgaatggcaataggctgggacgcgaccgaatccaaaatacttgggtccctccccctcacgcacgtgtcttcgactattttgaaggcgctacaagccagcgcaagggcgataacgtgcctcaggttaacggagagaataccgagaggcacgcacagcctcccccaattcctgtgcagaacgacccagaactgtacgagaaactgacatcctcaaatgagatcaataaggagaagtctgacaccgtcgctgatatcgagtcagagcccgtggttgagtccacggagaccgaggggacacccctcacatctctgacagccgagacacgcagacaggtcaagatgggtaacagtgactcccagtataccctgcaaggttccaaaaaccactctaatacgattaccggagctaaacagatcccttgctcccttaagatcagaggtatccatgccaaagaagaaaaatctttacacggatggggccacggcagtaatggagcgggttacaagagtcgctcccttgcacgatcatgtctgagccactttaaatccaatcaaccctacgcatctaggctgggagggcctacctgtaaagtctcccgcggtgtggcctattccacacacagaaccaacgccccagggaaagacttccagggtatttcagcagccttcagtaccgaaaacggcttccatagcgttggacacgaactggccgataatcatattaccagccgggattgtaacggccatctgttaaattgttacggcaggaacgaatctatcgcctctactcctccaggtgaagatagaaaatcgccaagagtcctgattaaaacactgggcaagctcgatggctgtttacgagtggagttccacaacggtggcaatccttcaaaagtgcccgcagaagattgctccgaacctgtgcagttgctgcggtattcccctactcttgcgtctgagacttcccccgtgcccgaggcgagacgcggaagcagcgccgattcattgccatctcatcgaccttcccctacagatagccgtttgcgaagctctaaaggctcgtcgctgagctctgagagctcttggtatgactccccatggggaaacgccggtgaattatctgaagctgagggtagctttcttgctcctggtatgccagacccaagcctgcacgcttcctttcccccaggtgatgctaaaaaacctttcaaccagtcttcttctctgagctccctgagggagctgtacaaagatgccaacttggggtctctgagcccctcgggaattaggttgtctgatgagtacatgggcacgcatgcatccttaagtaatagagtgagctttgcttctgacatcgatgtaccctcacgggttgctcatggtgatcccattcagtacagctcattcaccctcccctgccgcaagcccaaagcatttgtggaggatactgcgaagaaggattcactcaaggcgaggatgagacgtatttctgattggaccggctctctttcgaggaagaaaaggaaactccaggagccacgttcaaaggagggttctgactacttcgactctcgctccgacggcttaaatacagacgtccagggctctagccaggcaagcgccttcttatggagcggaggcagcacgcagatcttgtctcagcggtctgaatccacccacgccatcgggtccgatcctctacgccaaaatatctacgagaattttatgcgggagctggagatgtcccgcacaaacaccgagaatatagaaactagcacggagactgctgagtctagcagcgagagtctctccagtctcgagcagttggaccttctctttgagaaggaacaaggagtggtcaggaaggccggttggctctttttcaagcctttggtgaccgtgcaaaaggagagaaaactggaactggttgcgagacggaagtggaaacaatactgggttacactgaaagggtgtacactgctcttctacgagacctacggaaagaatagcatggatcaatcttcagcgccacgttgtgccctcttcgcagaggattctatcgtgcaatctgtacccgagcacccgaaaaaggagaatgtattttgtcttagcaactcctttggtgacgtttatcttttccaggccacctcacaaactgatctggagaattgggttactgccgtacactcagcctgcgcatcattgtttgccaagaaacatggcaaggaagacactttgaggttgcttaaaaatcaaactaagaacttactccagaagatcgatatggatagcaagatgaaaaaaatggccgagttgcagttatccgttgtttccgatcccaaaaaccgaaaagccatcgaaaatcagattcagcaatgggagcagaacctggagaagttccatatggacctctttcgaatgcgttgttatctggcctcactgcaaggcggagagttgccaaatccaaaatccctgctggccgcagcaagtcggccatcaaagctagccctgggacgtcttggaattctcagcgtttcaagcttccatgcacttgtctgttcccgtgacgatagcgctctccggaagagaacgctgagcctcactcagagaggtaggaacaagaaagggatatttagctcactgaagggccttgataccctagcccgaaaaggtaaggagaagagaccgtcaatcacccaagtcgacgagttgctccatatctatggtagcactgtggacggagtgcctcgcgataatgcctgggagatccaaacttacgttcattttcaagacaatcacggagttacggtcggaataaagccggagcaccgcgtagaggatattcttacgctcgcctgcaagatgaggcaacttgagccttctcactacgggctgcaattgcgtaaattagtggacgacaacgttgagtattgtataccagccccatacgaatatatgcagcagcaggtttacgacgaaatagaagtttttccactcaatgtttatgacgtgcagctgactaagacagggtcggtctgtgactttggatttgctgtgacagcacaggtcgacgaaaggcaacatctaagccgcatctttatctctgatgtgctgcctgatgggttggcctacggtgaaggcctccggaagggaaacgagattatgacactgaatggtgaggcggtctcagacctggatcttaagcagatggaggcccttttcagcgagaagagcgtcggactaaccctcattgcacgaccaccagacacaaaagcaacgttgtgcacaagctggtctgactccgatctgtttagcagagaccaaaagtctttgctgccccctccgaatcagtcccagctgctggaggagttcctggataatttcaagaagaacacagctaatgacttcagtaatgtcccagacattaccaccggtctaaaacggagccaaaccgacggaacacttgaccaagtctcacaccgggaaaaaatggagcagacctttcggagcgctgagcagatcaccgccctgtgccggagcttcaatgatagccaagcgaatggaatggaaggaccacgtgagaaccaggaccccccaccaaggtccctggcgagacacctgagtgatgcagatcggctgcgaaaagtcatccaggagctggttgacaccgaaaaatcttatgtaaaggacctgtcgtgcctgtttgagctctacctggaaccgctccagaatgaaacttttctaacacaggacgaaatggaatctttattcgggtcactacctgaaatgctagaattccagaaggtcttccttgagacattggaggatgggatctctgcttctagcgatttcaatactctggagactcctagtcagttccggaagttactattctctcttggcggatccttcttgtactacgcggaccatttcaagctgtatagcggcttttgcgctaaccatataaaagttcagaaggtgctcgaacgggctaagaccgacaaagctttcaaagcatttcttgacgcacggaaccccacaaaacagcattcctctaccctcgaatcctacctaattaaaccagtccaacgagtactcaagtatccattgttgcttaaagagctggtgagtctgacagatcaggagtcagaagaacactatcatctgaccgaagcactgaaggcgatggagaaggtagcctcccacattaacgagatgcagaagatctatgaggactatggcacggtattcgaccagttggtggccgaacagagcggcacggaaaaagaagttaccgagctgtcaatgggggaactccttatgcactcgaccgtcagctggctgaacccttttctgtcactggggaaggcacgaaaggatctcgagcttacagtgttcgtatttaagagagccgtgattttggtgtataaagagaactgcaaattgaaaaagaagctgcccagcaattctagacccgcacataactctaccgatctggacccattcaaatttcgatggctgatacccatctcagccctccaagtgcgcttgggcaatccagccggaacggagaataactcaatatgggagttgattcatacaaagagcgaaatcgaaggacggccagaaacgattttccagctgtgttgttcagattcagagtccaaaacgaacatcgtgaaggttatccggagtatccttcgggaaaattttcggaggcatattaagtgcgagcttcctctcgaaaagacctgtaaggaccgcctcgtgcccctcaaaaatcgggtgccagtgtccgccaagttggccagcagccgatccctgaaggtgctcaaaaactcatcttccaacgaatggacaggggaaaccgggaaaggcacactcttggactctgacgaggggagtctttcctcagggacacagagctccgggtgccctacagccgaaggcaggcaggactctaagagtacctctcccggaaagtacccccatcctggcctggcagattttgccgataacctaattaaagagagcgatatcctctcggatgaagacgatgaccatcggcagaccgtcaaacagggaagccccacaaaagatatagagattcagttccaaagattgcggattagcgaagatcccgacgtccacccagaggccgaacagcaacctgggccagagtcaggggaaggacaaaagggcggagagcagccaaagttggtgcgaggccacttctgccccattaaacgcaaagccaattccactaaaagagacagagggacactcctgaaagcacagattaggcaccagtcattagacagccagagtgaaaacgccacaatcgatctgaatagtgtgctggagcgagaattttccgtgcagtctcttacaagcgtagtgtctgaggagtgcttttacgagaccgaatcccatggcaaatctta

SEQ ID NO: 174621 - DNA, 165 bp, Artificial Sequence
  derived and/or modified sequence
atgggcaactcagacagtcaatacactctgcagggatctaagaaccactcaaatacaatcactggggctaaacagattccgtgtagcttaaagatccgcggaatacacgcaaaggaggagaaatcactacacggctggggccatggcagtaatggtgccggttag

SEQ ID NO: 174622 - DNA, 588 bp, Artificial Sequence
  derived and/or modified sequence
atgggcaacagcgactcgcagtacaccctgcaaggtagcaagaatcacagcaatactataacgggagccaaacagattccctgttctctcaaaatcagagggattcacgccaaggaagaaaaatccctgcatggatgggggcacggttcaaacggcgctgggtacaagtccagaagcctagcccgtagttgcctctctcactttaagtcaaatcagccctacgcaagtcgattgggcggtcctacatgtaaggtctcacgaggggtggcctattcaacccataggactaatgcccctggaaaagactttcagggaatttctgccgcattctccacagaaaacgggttccacagcgtgggacatgaactggccgacaaccatataaccagccgcgattgcaacggccacctcctgaactgctatggccgtaacgagagcattgcatccacccccccaggggaggatcgcaaaagccctcgcgttctgattaaaacactggggaagttagacggatgtctgcgcgttgagttccacaatggagggaatccaagcaaggtgccggctgaagattgctctgagccagtgtag

SEQ ID NO: 174623 - DNA, 258 bp, Artificial Sequence
  derived and/or modified sequence
atgggcaattctgactctcagtacacacttcaggggtctaaaaatcattcaaacacaataactggcgctaagcagataccctgttctcttaagatccggggtattcacgccaaggaggaaaagagcttacatgggtggggccacggttccaacggtgcaggctataaaagcagatctctagcgagaagctgtctgtcacacttcaaaagcaaccaaccatatgcctctagactgggtggaccaacatgcaaagtatag

SEQ ID NO: 174624 - DNA, 162 bp, Artificial Sequence
  derived and/or modified sequence
atgggaaattccgactcccagtacactctgcagggatctaaaaatcactctaataccattacaggtgccaagcagattccatgcagccttaagattaggggcattcatgctaaggaagagaaaagtcttcacggctgggggcatggatccaatggagcatag

SEQ ID NO: 174625 - DNA, 6003 bp, Artificial Sequence
  derived and/or modified sequence
ggctctgtgtatgaatgacaaggataccttcagccagctcattctggatgaatgaatgattacactaagtgtcctccacattcctctgtgggctcacttcatggactcactttgcgtgcttgttaaatgtgctgtgttgctcccaagaccatgtaaagcctactgaccactaacctccctcacagcagaaactagacgtcaggttaaaatgggcaactccgacagtcagtacacccttcaaggatctaaaaatcatagcaatactattactggtgctaagcaaattccttgctccctgaaaatacgtggcattcatgcaaaagaggaaaagtcattgcatggatggggtcacggaagcaacggagcaggttacaagtccaggtccctggcccgaagctgcctttctcactttaagagtaaccagccttacgcatcgagactcggtggccccacatgcaaggtctccagaggtgttgcctactccacgcacaggacaaatgccccagggaaggatttccagggcatcagtgctgctttctcaactgagaatggcttccactctgttggccacgagctggcagataaccacatcacctccagagactgcaacggacaccttctcaactgctacgggaggaatgagagcattgcctccaccccaccgggcgaagaccgcaagagcccccgagtgctcatcaaaacgctggggaagctggatgggtgtttaagggtcgagttccacaatggtggcaaccccagcaaagtgcctgcagaggactgcagtgagccggtgcagctgctgaggtactcacctaccttagcatcggaaacctcccctgtgcctgaagccaggagggggtccagcgccgattccctgcccagccatcgcccctctcccacggactctcgcctgcggtccagcaaaggcagctccctgagttctgagtcatcctggtacgactccccttggggcaatgctggagagctgagcgaggctgagggctccttcctggcccccggcatgcctgaccccagtctccatgccagcttcccacctggcgatgccaaaaagcctttcaaccaaagctcttccctctcctccctccgggaactgtacaaagatgccaacctggggagcctctccccctcaggtatccgcctttctgatgaatacatgggcacgcatgccagcctgagcaaccgtgtctcttttgcttccgacattgatgtgccctccagagtggcacacggggaccccatccagtacagttccttcactctcccctgtcggaagcccaaagcctttgttgaggatactgcgaagaaggactccctcaaagccaggatgcgacggatcagtgactggacgggaagcctctcaaggaagaaaaggaaactccaggagccgaggtccaaggagggcagtgactactttgacagtcgctctgatggactgaatacagatgtgcagggatcctcccaggcatctgcttttctgtggtcagggggctctactcagatcctgtctcagagaagtgaatccacacatgcgattggcagcgatcccctccggcagaacatttatgagaatttcatgcgagagttggaaatgagcaggaccaacactgagaacatagaaacatctacagaaaccgccgagtccagcagcgagtcactcagctctctggaacagctggatctgctctttgagaaggaacagggggtggtccggaaggccgggtggctcttcttcaagcccctggtcactgtgcagaaggaaaggaagcttgagctggtggcacgaaggaaatggaaacagtactgggtaacgctgaaaggatgcacgctgctgttttatgagacctatgggaagaattccatggatcagagcagtgcccctcggtgtgctctgtttgcagaagacagcatagtgcagtctgttccagagcatcccaagaaagaaaatgtgttctgcctcagcaactcctttggagatgtctaccttttccaggccaccagccagacagatctagaaaactgggtcactgctgtacactctgcttgtgcatccctttttgcaaagaagcatgggaaagaggacacgctgcggctgctgaagaaccagaccaaaaacctgcttcagaagatagacatggacagcaagatgaagaagatggcagagctgcagctgtccgtggtgagcgacccaaagaacaggaaagccatagagaaccagatccagcaatgggagcagaatcttgagaaatttcacatggatctgttcaggatgcgctgctatctggccagcctacaaggtggggagttaccgaacccaaagagtctccttgcagccgccagccgcccctccaagctggccctcggcaggctgggcatcttgtctgtttcctctttccatgctctggtatgttctagagatgactctgctctccggaaaaggacactgtcactgacccagcgagggagaaacaagaagggaatattttcttcgttaaaagggctggacacactggccagaaaaggcaaggagaagagaccttctataactcaggtcgatgaacttctgcatatatatggttcaacagtagacggtgttccccgagacaatgcatgggaaatccagacttatgtccactttcaggacaatcacggagttactgtagggatcaagccagagcacagagtagaagatattttgactttggcatgcaagatgaggcagttggaacccagccattatggcctacagcttcgaaaattagtagatgacaatgttgagtattgcatccctgcaccatatgaatatatgcaacaacaggtttatgatgaaatagaagtctttccactaaatgtttatgacgtgcagctcacgaagactgggagtgtgtgtgactttgggtttgcagttacagcgcaggtggatgagcgtcagcatctcagccggatatttataagcgacgttcttcccgatggcctggcgtatggggaagggctgagaaagggcaatgagatcatgaccttaaatggggaagctgtgtctgatcttgaccttaagcagatggaggccctgttttctgagaagagcgtcggactcactctgattgcccggcctccggacacaaaagcaaccctgtgtacatcctggtcagacagtgacctgttctccagggaccagaagagtctgctgccccctcctaaccagtcccaactgctggaggaattcctggataactttaaaaagaatacagccaatgatttcagcaacgtccctgatatcacaacaggtctgaaaaggagtcagacagatggcactctggatcaggtttcccacagggagaaaatggagcagacattcaggagtgctgagcagatcactgcactgtgcaggagttttaacgacagtcaggccaacggcatggaaggaccgcgggagaatcaggatcctcctccgaggtctctggcccgccacctgtctgatgcagaccgcctccgcaaagtcatccaggagcttgtggacacagagaagtcctacgtgaaggatttgagctgcctctttgaattatacttggagccacttcagaatgagacctttcttacccaagatgagatggagtcactttttggaagtttgccagagatgcttgagtttcagaaggtgtttctggagaccctggaggatgggatttcagcatcatctgactttaacaccctagaaaccccctcacagtttagaaaattactgttttcccttggaggctctttcctttattacgcggaccactttaaactgtacagtggattctgtgctaaccatatcaaagtacagaaggttctggagcgagctaaaactgacaaagccttcaaggcttttctggacgcccggaaccccaccaagcagcattcctccacgctggagtcctacctcatcaagccggttcagagagtgctcaagtacccgctgctgctcaaggagctggtgtccctgacggaccaggagagcgaggagcactaccacctgacggaagcactaaaggcaatggagaaagtagcgagccacatcaatgagatgcagaagatctatgaggattatgggaccgtgtttgaccagctagtagctgagcagagcggaacagagaaggagcagcccgaatggagctcagaggtgatggatgtactagatcccaggggaaagcttacaaaaggcactctggaagaaccacggacactggtaacagaactttcgatgggagagcttctgatgcactctacggtttcctggttgaatccatttctgtctctaggaaaagctagaaaggaccttgagctcacagtatttgtttttaagagagccgtcatactggtttataaagaaaactgcaaactgaaaaagaaattgccctcgaattcccggcctgcacacaactctactgacttggacccatttaaattccgctggttgatccccatctccgcgcttcaagtcagactggggaatccagcagggacagaaaataattccatatgggaactgatccatacgaagtcagaaatagaaggacggccagaaaccatctttcagttgtgttgcagtgacagtgaaagcaaaaccaacattgttaaggtgattcgttctattctgagggagaacttcaggcgtcacataaagtgtgaattaccactggagaaaacgtgtaaggatcgcctggtacctcttaagaaccgagttcctgtttcggccaaattagcttcatccaggtctttaaaagtcctgaagaattcctccagcaacgagtggaccggtgagactggcaagggaaccttgctggactctgacgagggcagcttgagcagcggcacccagagcagcggctgccccacggctgagggcaggcaggactccaagagcacttctcccgggaaatacccacaccccggcttggcagattttgccgacaatctcatcaaagagagtgacatcctgagcgatgaagatgatgaccaccgtcagactgtgaagcagggcagccctactaaagacatcgaaattcagttccagagactgaggatttccgaggacccagacgttcaccccgaggctgagcagcagcctggcccggagtcgggtgagggtcagaaaggaggagagcagcccaaactggtccgggggcacttctgccccattaaacgaaaagccaacagcaccaagagggacagaggaactttgctcaaggcgcagatccgtcaccagtcccttgacagtcagtctgaaaatgccaccatcgacctaaattctgttctagagcgagaattcagtgtccagagtttaacatctgttgtcagtgaggagtgtttttatgaaacagagagccacggaaaatcatagtatgattcaatccagatatgggttaaattcctcattttacttttaaactggtggtaaagtggaaattgcaaaaaaaaaaaaaaaaaaaaactgttcattcctgggttttgtgcagtatacattttcccacaaaatggttgtaaagatttaagttattttaatttattgtggatcagaaacctagatgaaactggtcagaatctgtaaattacttagtttatatccactttgagcaggtatcaaatgatttaggatccttaaaattacattctaataattaagttatgtggaaaaagtaaggctggggaagtcgtgattaatagttttcaaagggccattttttaaaatcctctgggcattttctttcagctgtttgttagtttttgctttatttaaagcatatttaagttattttaatgtggtttaggggcaaaatgtgcagatacttcatttttgtaagatagattgtaatagatgctgtttatactaaacatgtcataactatctatacagtatatattaaaagaaagcttgtactgtatcttatttgatgatatttattttctctgccaagctgtatagtaaaaggaaaataagtcaca

SEQ ID NO: 174626 - DNA, 3275 bp, Artificial Sequence
  derived and/or modified sequence
agcttgtcccacagcgagctgtggagctgggagggccattcagagctctgcatggaggcagggtggccggccttcgtcccctcaggccagcagggcaaggcagctcccctcaatagagatccagcaatgggagcagaatcttgagaaatttcacatggatctgttcaggatgcgctgctatctggccagcctacaaggtggggagttaccgaacccaaagagtctccttgcagccgccagccgcccctccaagctggccctcggcaggctgggcatcttgtctgtttcctctttccatgctctggtatgttctagagatgactctgctctccggaaaaggacactgtcactgacccagcgagggagaaacaagaagggaatattttcttcgttaaaagggctggacacactggccagaaaaggcaaggagaagagaccttctataactcaggtcgatgaacttctgcatatatatggttcaacagtagacggtgttccccgagacaatgcatgggaaatccagacttatgtccactttcaggacaatcacggagttactgtagggatcaagccagagcacagagtagaagatattttgactttggcatgcaagatgaggcagttggaacccagccattatggcctacagcttcgaaaattagtagatgacaatgttgagtattgcatccctgcaccatatgaatatatgcaacaacaggtttatgatgaaatagaagtctttccactaaatgtttatgacgtgcagctcacgaagactgggagtgtgtgtgactttgggtttgcagttacagcgcaggtggatgagcgtcagcatctcagccggatatttataagcgacgttcttcccgatggcctggcgtatggggaagggctgagaaagggcaatgagatcatgaccttaaatggggaagctgtgtctgatcttgaccttaagcagatggaggccctgttttctgagaagagcgtcggactcactctgattgcccggcctccggacacaaaagcaaccctgtgtacatcctggtcagacagtgacctgttctccagggaccagaagagtctgctgccccctcctaaccagtcccaactgctggaggaattcctggataactttaaaaagaatacagccaatgatttcagcaacgtccctgatatcacaacaggtctgaaaaggagtcagacagatggcactctggatcaggtttcccacagggagaaaatggagcagacattcaggagtgctgagcagatcactgcactgtgcaggagttttaacgacagtcaggccaacggcatggaaggaccgcgggagaatcaggatcctcctccgaggtctctggcccgccacctgtctgatgcagaccgcctccgcaaagtcatccaggagcttgtggacacagagaagtcctacgtgaaggatttgagctgcctctttgaattatacttggagccacttcagaatgagacctttcttacccaagatgagatggagtcactttttggaagtttgccagagatgcttgagtttcagaaggtgtttctggagaccctggaggatgggatttcagcatcatctgactttaacaccctagaaaccccctcacagtttagaaaattactgttttcccttggaggctctttcctttattacgcggaccactttaaactgtacagtggattctgtgctaaccatatcaaagtacagaaggttctggagcgagctaaaactgacaaagccttcaaggcttttctggacgcccggaaccccaccaagcagcattcctccacgctggagtcctacctcatcaagccggttcagagagtgctcaagtacccgctgctgctcaaggagctggtgtccctgacggaccaggagagcgaggagcactaccacctgacggaagcactaaaggcaatggagaaagtagcgagccacatcaatgagatgcagaagatctatgaggattatgggaccgtgtttgaccagctagtagctgagcagagcggaacagagaaggaggtaacagaactttcgatgggagagcttctgatgcactctacggtttcctggttgaatccatttctgtctctaggaaaagctagaaaggaccttgagctcacagtatttgtttttaagagagccgtcatactggtttataaagaaaactgcaaactgaaaaagaaattgccctcgaattcccggcctgcacacaactctactgacttggacccatttaaattccgctggttgatccccatctccgcgcttcaagtcagactggggaatccagcagggacagaaaataattccatatgggaactgatccatacgaagtcagaaatagaaggacggccagaaaccatctttcagttgtgttgcagtgacagtgaaagcaaaaccaacattgttaaggtgattcgttctattctgagggagaacttcaggcgtcacataaagtgtgaattaccactggagaaaacgtgtaaggatcgcctggtacctcttaagaaccgagttcctgtttcggccaaattagcttcatccaggtctttaaaagtcctgaagaattcctccagcaacgagtggaccggtgagactggcaagggaaccttgctggactctgacgagggcagcttgagcagcggcacccagagcagcggctgccccacggctgagggcaggcaggactccaagagcacttctcccgggaaatacccacaccccggcttggcagattttgccgacaatctcatcaaagagagtgacatcctgagcgatgaagatgatgaccaccgtcagactgtgaagcagggcagccctactaaagacatcgaaattcagttccagagactgaggatttccgaggacccagacgttcaccccgaggctgagcagcagcctggcccggagtcgggtgagggtcagaaaggaggagagcagcccaaactggtccgggggcacttctgccccattaaacgaaaagccaacagcaccaagagggacagaggaactttgctcaaggcgcagatccgtcaccagtcccttgacagtcagtctgaaaatgccaccatcgacctaaattctgttctagagcgagaattcagtgtccagagtttaacatctgttgtcagtgaggagtgtttttatgaaacagagagccacggaaaatcatagtatgattcaatccagatatgggttaaattcctcattttacttttaaactggtggtaaagtggaaattgcaaaaaaaaaa

SEQ ID NO: 174627 - DNA, 6981 bp, Artificial Sequence
  derived and/or modified sequence
gggcggcctatagatccaagagaaggtcctggacggcctccactagatggtagggatcattttggaagacctcctgtagatataagagagaatcttgtgaggccaggtatagatcatcttggtcgaagagaccactttggctttaatccagagaagccctgggggcatagaggagattttgatgagagagagcatcgggttctaccggtctatggtggtccaaaaggcttacatgaagaaagaggtagatttcggtctggaaactatcgatttgatcctagaagtggtccttggaaccgaggatttggacaagaagttcacagagattttgatgaccgcagaagaccctgggagaggcaaagggatagggatgacagagattttgatttctgcagagaaatgaatggaaatcgtcttggacgagacagaattcaaaacacttgggttccccctcctcatgctcgggtttttgattattttgaaggggccacttctcaacgaaaaggtgataatgtgcctcaggttaatggtgaaaatacagagagacatgctcagccaccacctataccagtacagaatgatcctgaactttatgaaaaactgacatcttcaaatgaaataaacaaggagaagagtgacacagttgctgatatagaaagtgaaccagtggtagaaagcacagaaactgaggggacataatcatcactcagtaggttaatgatgaaatggcaggtaattcacacttttggacagagcgcaccgcccccgtggaatcaccctacagaagaggccagctataaaggatgtctcacacctttaagatcagtgtttctcaatgtgtggaccatggatacctgtattagaatacccaaaggatttgtttaaaattcaggctgagcccttcccaagacctaatagagctaaaagctttgggagtaggtggaggaaacctgcatctttacccagcaatccaggacagaatgacttggaagataacggagcttcgaagcttctagcagaatatgaagtctttcgtcttcagctacctgggttaagtttaagcagggctctgtgtatgaatgacaaggataccttcagccagctcattctggatgaatgaatgattacactaagtgtcctccacattcctctgtgggctcacttcatggactcactttgcgtgcttgttaaatgtgctgtgttgctcccaagaccatgtaaagcctactgaccactaacctccctcacagcagaaactagacgtcaggttaaaatgggcaactccgacagtcagtacacccttcaaggatctaaaaatcatagcaatactattactggtgctaagcaaattccttgctccctgaaaatacgtggcattcatgcaaaagaggaaaagtcattgcatggatggggtcacggaagcaacggagcaggttacaagtccaggtccctggcccgaagctgcctttctcactttaagagtaaccagccttacgcatcgagactcggtggccccacatgcaaggtctccagaggtgttgcctactccacgcacaggacaaatgccccagggaaggatttccagggcatcagtgctgctttctcaactgagaatggcttccactctgttggccacgagctggcagataaccacatcacctccagagactgcaacggacaccttctcaactgctacgggaggaatgagagcattgcctccaccccaccgggcgaagaccgcaagagcccccgagtgctcatcaaaacgctggggaagctggatgggtgtttaagggtcgagttccacaatggtggcaaccccagcaaagtgcctgcagaggactgcagtgagccggtgcagctgctgaggtactcacctaccttagcatcggaaacctcccctgtgcctgaagccaggagggggtccagcgccgattccctgcccagccatcgcccctctcccacggactctcgcctgcggtccagcaaaggcagctccctgagttctgagtcatcctggtacgactccccttggggcaatgctggagagctgagcgaggctgagggctccttcctggcccccggcatgcctgaccccagtctccatgccagcttcccacctggcgatgccaaaaagcctttcaaccaaagctcttccctctcctccctccgggaactgtacaaagatgccaacctggggagcctctccccctcaggtatccgcctttctgatgaatacatgggcacgcatgccagcctgagcaaccgtgtctcttttgcttccgacattgatgtgccctccagagtggcacacggggaccccatccagtacagttccttcactctcccctgtcggaagcccaaagcctttgttgaggatactgcgaagaaggactccctcaaagccaggatgcgacggatcagtgactggacgggaagcctctcaaggaagaaaaggaaactccaggagccgaggtccaaggagggcagtgactactttgacagtcgctctgatggactgaatacagatgtgcagggatcctcccaggcatctgcttttctgtggtcagggggctctactcagatcctgtctcagagaagtgaatccacacatgcgattggcagcgatcccctccggcagaacatttatgagaatttcatgcgagagttggaaatgagcaggaccaacactgagaacatagaaacatctacagaaaccgccgagtccagcagcgagtcactcagctctctggaacagctggatctgctctttgagaaggaacagggggtggtccggaaggccgggtggctcttcttcaagcccctggtcactgtgcagaaggaaaggaagcttgagctggtggcacgaaggaaatggaaacagtactgggtaacgctgaaaggatgcacgctgctgttttatgagacctatgggaagaattccatggatcagagcagtgcccctcggtgtgctctgtttgcagaagacagcatagtgcagtctgttccagagcatcccaagaaagaaaatgtgttctgcctcagcaactcctttggagatgtctaccttttccaggccaccagccagacagatctagaaaactgggtcactgctgtacactctgcttgtgcatccctttttgcaaagaagcatgggaaagaggacacgctgcggctgctgaagaaccagaccaaaaacctgcttcagaagatagacatggacagcaagatgaagaagatggcagagctgcagctgtccgtggtgagcgacccaaagaacaggaaagccatagagaaccagatccagcaatgggagcagaatcttgagaaatttcacatggatctgttcaggatgcgctgctatctggccagcctacaaggtggggagttaccgaacccaaagagtctccttgcagccgccagccgcccctccaagctggccctcggcaggctgggcatcttgtctgtttcctctttccatgctctggtatgttctagagatgactctgctctccggaaaaggacactgtcactgacccagcgagggagaaacaagaagggaatattttcttcgttaaaagggctggacacactggccagaaaaggcaaggagaagagaccttctataactcaggtcgatgaacttctgcatatatatggttcaacagtagacggtgttccccgagacaatgcatgggaaatccagacttatgtccactttcaggacaatcacggagttactgtagggatcaagccagagcacagagtagaagatattttgactttggcatgcaagatgaggcagttggaacccagccattatggcctacagcttcgaaaattagtagatgacaatgttgagtattgcatccctgcaccatatgaatatatgcaacaacaggtttatgatgaaatagaagtctttccactaaatgtttatgacgtgcagctcacgaagactgggagtgtgtgtgactttgggtttgcagttacagcgcaggtggatgagcgtcagcatctcagccggatatttataagcgacgttcttcccgatggcctggcgtatggggaagggctgagaaagggcaatgagatcatgaccttaaatggggaagctgtgtctgatcttgaccttaagcagatggaggccctgttttctgagaagagcgtcggactcactctgattgcccggcctccggacacaaaagcaaccctgtgtacatcctggtcagacagtgacctgttctccagggaccagaagagtctgctgccccctcctaaccagtcccaactgctggaggaattcctggataactttaaaaagaatacagccaatgatttcagcaacgtccctgatatcacaacaggtctgaaaaggagtcagacagatggcactctggatcaggtttcccacagggagaaaatggagcagacattcaggagtgctgagcagatcactgcactgtgcaggagttttaacgacagtcaggccaacggcatggaaggaccgcgggagaatcaggatcctcctccgaggtctctggcccgccacctgtctgatgcagaccgcctccgcaaagtcatccaggagcttgtggacacagagaagtcctacgtgaaggatttgagctgcctctttgaattatacttggagccacttcagaatgagacctttcttacccaagatgagatggagtcactttttggaagtttgccagagatgcttgagtttcagaaggtgtttctggagaccctggaggatgggatttcagcatcatctgactttaacaccctagaaaccccctcacagtttagaaaattactgttttcccttggaggctctttcctttattacgcggaccactttaaactgtacagtggattctgtgctaaccatatcaaagtacagaaggttctggagcgagctaaaactgacaaagccttcaaggcttttctggacgcccggaaccccaccaagcagcattcctccacgctggagtcctacctcatcaagccggttcagagagtgctcaagtacccgctgctgctcaaggagctggtgtccctgacggaccaggagagcgaggagcactaccacctgacggaagcactaaaggcaatggagaaagtagcgagccacatcaatgagatgcagaagatctatgaggattatgggaccgtgtttgaccagctagtagctgagcagagcggaacagagaaggaggtaacagaactttcgatgggagagcttctgatgcactctacggtttcctggttgaatccatttctgtctctaggaaaagctagaaaggaccttgagctcacagtatttgtttttaagagagccgtcatactggtttataaagaaaactgcaaactgaaaaagaaattgccctcgaattcccggcctgcacacaactctactgacttggacccatttaaattccgctggttgatccccatctccgcgcttcaagtcagactggggaatccagcagggacagaaaataattccatatgggaactgatccatacgaagtcagaaatagaaggacggccagaaaccatctttcagttgtgttgcagtgacagtgaaagcaaaaccaacattgttaaggtgattcgttctattctgagggagaacttcaggcgtcacataaagtgtgaattaccactggagaaaacgtgtaaggatcgcctggtacctcttaagaaccgagttcctgtttcggccaaattagcttcatccaggtctttaaaagtcctgaagaattcctccagcaacgagtggaccggtgagactggcaagggaaccttgctggactctgacgagggcagcttgagcagcggcacccagagcagcggctgccccacggctgagggcaggcaggactccaagagcacttctcccgggaaatacccacaccccggcttggcagattttgccgacaatctcatcaaagagagtgacatcctgagcgatgaagatgatgaccaccgtcagactgtgaagcagggcagccctactaaagacatcgaaattcagttccagagactgaggatttccgaggacccagacgttcaccccgaggctgagcagcagcctggcccggagtcgggtgagggtcagaaaggaggagagcagcccaaactggtccgggggcacttctgccccattaaacgaaaagccaacagcaccaagagggacagaggaactttgctcaaggcgcagatccgtcaccagtcccttgacagtcagtctgaaaatgccaccatcgacctaaattctgttctagagcgagaattcagtgtccagagtttaacatctgttgtcagtgaggagtgtttttatgaaacagagagccacggaaaatcatagtatgattcaatccagatatgggttaaattcctcattttacttttaaactggtggtaaagtggaaattgcaaaaaaaaaaaaaaaaaaaaactgttcattcctgggttttgtgcagtatacattttcccacaaaatggttgtaaagatttaagttattttaatttattgtggatcagaaacctagatgaaactggtcagaatctgtaaattacttagtttatatccactttgagcaggtatcaaatgatttaggatccttaaaattacattctaataattaagttatgtggaaaaagtaaggctggggaagtcgtgattaatagttttcaaagggccattttttaaaatcctctgggcattttctttcagctgtttgttagtttttgctttatttaaagcatatttaagttattttaatgtggtttaggggcaaaatgtgcagatacttcatttttgtaagatagattgtaatagatgctgtttatactaaacatgtcataactatctatacagtatatattaaaagaaagcttgtactgtatcttatttgatgatatttattttctctgccaagctgtatagtaaaaggaaaataagtcaca

SEQ ID NO: 174628 - DNA, 4404 bp, Artificial Sequence
  derived and/or modified sequence
acacacacacacacacacacacacacacacacctgagatggggtagatcattgtatttttgtgtctaccagcaagaaaaggaaggaaaaactaagggctctgtgtatgaatgacaaggataccttcagccagctcattctggatgaatgaatgattacactaagtgtcctccacattcctctgtgggctcacttcatggactcactttgcgtgcttgttaaatgtgctgtgttgctcccaagaccatgtaaagcctactgaccactaacctccctcacagcagaaactagacgtcaggttaaaatgggcaactccgacagtcagtacacccttcaaggatctaaaaatcatagcaatactattactggtgctaagcaaattccttgctccctgaaaatacgtggcattcatgcaaaagaggaaaagtcattgcatggatggggtcacggaagcaacggagcaggttacaagtccaggtccctggcccgaagctgcctttctcactttaagagtaaccagccttacgcatcgagactcggtggccccacatgcaaggtctccagaggtgttgcctactccacgcacaggacaaatgccccagggaaggatttccagggcatcagtgctgctttctcaactgagaatggcttccactctgttggccacgagctggcagataaccacatcacctccagagactgcaacggacaccttctcaactgctacgggaggaatgagagcattgcctccaccccaccgggcgaagaccgcaagagcccccgagtgctcatcaaaacgctggggaagctggatgggtgtttaagggtcgagttccacaatggtggcaaccccagcaaagtgcctgcagaggactgcagtgagccggtgcagctgctgaggtactcacctaccttagcatcggaaacctcccctgtgcctgaagccaggagggggtccagcgccgattccctgcccagccatcgcccctctcccacggactctcgcctgcggtccagcaaaggcagctccctgagttctgagtcatcctggtacgactccccttggggcaatgctggagagctgagcgaggctgagggctccttcctggcccccggcatgcctgaccccagtctccatgccagcttcccacctggcgatgccaaaaagcctttcaaccaaagctcttccctctcctccctccgggaactgtacaaagatgccaacctggggagcctctccccctcaggtatccgcctttctgatgaatacatgggcacgcatgccagcctgagcaaccgtgtctcttttgcttccgacattgatgtgccctccagagtggcacacggggaccccatccagtacagttccttcactctcccctgtcggaagcccaaagcctttgttgaggatactgcgaagaaggactccctcaaagccaggatgcgacggatcagtgactggacgggaagcctctcaaggaagaaaaggaaactccaggagccgaggtccaaggagggcagtgactactttgacagtcgctctgatggactgaatacagatgtgcagggatcctcccaggcatctgcttttctgtggtcagggggctctactcagatcctgtctcagagaagtgaatccacacatgcgattggcagcgatcccctccggcagaacatttatgagaatttcatgcgagagttggaaatgagcaggaccaacactgagaacatagaaacatctacagaaaccgccgagtccagcagcgagtcactcagctctctggaacagctggatctgctctttgagaaggaacagggggtggtccggaaggccgggtggctcttcttcaagcccctggtcactgtgcagaaggaaaggaagcttgagctggtggcacgaaggaaatggaaacagtactgggtaacgctgaaaggatgcacgctgctgttttatgagacctatgggaagaattccatggatcagagcagtgcccctcggtgtgctctgtttgcagaagacagcatagtgcagtctgttccagagcatcccaagaaagaaaatgtgttctgcctcagcaactcctttggagatgtctaccttttccaggccaccagccagacagatctagaaaactgggtcactgctgtacactctgcttgtgcatccctttttgcaaagaagcatgggaaagaggacacgctgcggctgctgaagaaccagaccaaaaacctgcttcagaagatagacatggacagcaagatgaagaagatggcagagctgcagctgtccgtggtgagcgacccaaagaacaggaaagccatagagaaccagatccagcaatgggagcagaatcttgagaaatttcacatggatctgttcaggatgcgctgctatctggccagcctacaaggtggggagttaccgaacccaaagagtctccttgcagccgccagccgcccctccaagctggccctcggcaggctgggcatcttgtctgtttcctctttccatgctctggtatgttctagagatgactctgctctccggaaaaggacactgtcactgacccagcgagggagaaacaagaagggaatattttcttcgttaaaagggctggacacactggccagaaaaggcaaggagaagagaccttctataactcaggtcgatgaacttctgcatatatatggttcaacagtagacggtgttccccgagacaatgcatgggaaatccagacttatgtccactttcaggacaatcacggagttactgtagggatcaagccagagcacagagtagaagatattttgactttggcatgcaagatgaggcagttggaacccagccattatggcctacagcttcgaaaattagtagatgacaatgttgagtattgcatccctgcaccatatgaatatatgcaacaacaggtttatgatgaaatagaagtctttccactaaatgtttatgacgtgcagctcacgaagactgggagtgtgtgtgactttgggtttgcagttacagcgcaggtggatgagcgtcagcatctcagccggatatttataagcgacgttcttcccgatggcctggcgtatggggaagggctgagaaagggcaatgagatcatgaccttaaatggggaagctgtgtctgatcttgaccttaagcagatggaggccctgttttctgagaagagcgtcggactcactctgattgcccggcctccggacacaaaagcaaccctgtgtacatcctggtcagacagtgacctgttctccagggaccagaagagtctgctgccccctcctaaccagtcccaactgctggaggaattcctggataactttaaaaagaatacagccaatgatttcagcaacgtccctgatatcacaacaggtctgaaaaggagtcagacagatggcactctggatcaggtttcccacagggagaaaatggagcagacattcaggagtgctgagcagatcactgcactgtgcaggagttttaacgacagtcaggccaacggcatggaaggaccgcgggagaatcaggatcctcctccgaggtctctggcccgccacctgtctgatgcagaccgcctccgcaaagtcatccaggagcttgtggacacagagaagtcctacgtgaaggatttgagctgcctctttgaattatacttggagccacttcagaatgagacctttcttacccaagatgagatggagtcactttttggaagtttgccagagatgcttgagtttcagaaggtgtttctggagaccctggaggatgggatttcagcatcatctgactttaacaccctagaaaccccctcacagtttagaaaattactgttttcccttggaggctctttcctttattacgcggaccactttaaactgtacagtggattctgtgctaaccatatcaaagtacagaaggttctggagcgagctaaaactgacaaagccttcaaggcttttctggacgcccggaaccccaccaagcagcattcctccacgctggagtcctacctcatcaagccggttcagagagtgctcaagtacccgctgctgctcaaggagctggtgtccctgacggaccaggagagcgaggagcactaccacctgacggaagcactaaaggcaatggagaaagtagcgagccacatcaatgagatgcagaagatctatgaggattatgggaccgtgtttgaccagctagtagctgagcagagcggaacagagaaggaggtaacagaactttcgatgggagagcttctgatgcactctacggtttcctggttgaatccatttctgtctctaggaaaagctagaaaggaccttgagctcacagtatttgtttttaagagagccgtcatactggtttataaagaaaactgc

SEQ ID NO: 174629 - DNA, 5844 bp, Artificial Sequence
  derived and/or modified sequence
gggcggcctatagatccaagagaaggtcctggacggcctccactagatggtagggatcattttggaagacctcctgtagatataagagagaatcttgtgaggccaggtatagatcatcttggtcgaagagaccactttggctttaatccagagaagccctgggggcatagaggagattttgatgagagagagcatcgggttctaccggtctatggtggtccaaaaggcttacatgaagaaagaggtagatttcggtctggaaactatcgatttgatcctagaagtggtccttggaaccgaggatttggacaagaagttcacagagattttgatgaccgcagaagaccctgggagaggcaaagggatagggatgacagagattttgatttctgcagagaaatgaatggaaatcgtcttggacgagacagaattcaaaacacttgggttccccctcctcatgctcgggtttttgattattttgaaggggccacttctcaacgaaaaggtgataatgtgcctcaggttaatggtgaaaatacagagagacatgctcagccaccacctataccagtacagaatgatcctgaactttatgaaaaactgacatcttcaaatgaaataaacaaggagaagagtgacacagttgctgatatagaaagtgaaccagtggtagaaagcacagaaactgaggggacaccactaacctccctcacagcagaaactagacgtcaggttaaaatgggcaactccgacagtcagtacacccttcaaggatctaaaaatcatagcaatactattactggtgctaagcaaattccttgctccctgaaaatacgtggcattcatgcaaaagaggaaaagtcattgcatggatggggtcacggaagcaacggagcaggttacaagtccaggtccctggcccgaagctgcctttctcactttaagagtaaccagccttacgcatcgagactcggtggccccacatgcaaggtctccagaggtgttgcctactccacgcacaggacaaatgccccagggaaggatttccagggcatcagtgctgctttctcaactgagaatggcttccactctgttggccacgagctggcagataaccacatcacctccagagactgcaacggacaccttctcaactgctacgggaggaatgagagcattgcctccaccccaccgggcgaagaccgcaagagcccccgagtgctcatcaaaacgctggggaagctggatgggtgtttaagggtcgagttccacaatggtggcaaccccagcaaagtgcctgcagaggactgcagtgagccggtgcagctgctgaggtactcacctaccttagcatcggaaacctcccctgtgcctgaagccaggagggggtccagcgccgattccctgcccagccatcgcccctctcccacggactctcgcctgcggtccagcaaaggcagctccctgagttctgagtcatcctggtacgactccccttggggcaatgctggagagctgagcgaggctgagggctccttcctggcccccggcatgcctgaccccagtctccatgccagcttcccacctggcgatgccaaaaagcctttcaaccaaagctcttccctctcctccctccgggaactgtacaaagatgccaacctggggagcctctccccctcaggtatccgcctttctgatgaatacatgggcacgcatgccagcctgagcaaccgtgtctcttttgcttccgacattgatgtgccctccagagtggcacacggggaccccatccagtacagttccttcactctcccctgtcggaagcccaaagcctttgttgaggatactgcgaagaaggactccctcaaagccaggatgcgacggatcagtgactggacgggaagcctctcaaggaagaaaaggaaactccaggagccgaggtccaaggagggcagtgactactttgacagtcgctctgatggactgaatacagatgtgcagggatcctcccaggcatctgcttttctgtggtcagggggctctactcagatcctgtctcagagaagtgaatccacacatgcgattggcagcgatcccctccggcagaacatttatgagaatttcatgcgagagttggaaatgagcaggaccaacactgagaacatagaaacatctacagaaaccgccgagtccagcagcgagtcactcagctctctggaacagctggatctgctctttgagaaggaacagggggtggtccggaaggccgggtggctcttcttcaagcccctggtcactgtgcagaaggaaaggaagcttgagctggtggcacgaaggaaatggaaacagtactgggtaacgctgaaaggatgcacgctgctgttttatgagacctatgggaagaattccatggatcagagcagtgcccctcggtgtgctctgtttgcagaagacagcatagtgcagtctgttccagagcatcccaagaaagaaaatgtgttctgcctcagcaactcctttggagatgtctaccttttccaggccaccagccagacagatctagaaaactgggtcactgctgtacactctgcttgtgcatccctttttgcaaagaagcatgggaaagaggacacgctgcggctgctgaagaaccagaccaaaaacctgcttcagaagatagacatggacagcaagatgaagaagatggcagagctgcagctgtccgtggtgagcgacccaaagaacaggaaagccatagagaaccagatccagcaatgggagcagaatcttgagaaatttcacatggatctgttcaggatgcgctgctatctggccagcctacaaggtggggagttaccgaacccaaagagtctccttgcagccgccagccgcccctccaagctggccctcggcaggctgggcatcttgtctgtttcctctttccatgctctggtatgttctagagatgactctgctctccggaaaaggacactgtcactgacccagcgagggagaaacaagaagggaatattttcttcgttaaaagggctggacacactggccagaaaaggcaaggagaagagaccttctataactcaggtcgatgaacttctgcatatatatggttcaacagtagacggtgttccccgagacaatgcatgggaaatccagacttatgtccactttcaggacaatcacggagttactgtagggatcaagccagagcacagagtagaagatattttgactttggcatgcaagatgaggcagttggaacccagccattatggcctacagcttcgaaaattagtagatgacaatgttgagtattgcatccctgcaccatatgaatatatgcaacaacaggtttatgatgaaatagaagtctttccactaaatgtttatgacgtgcagctcacgaagactgggagtgtgtgtgactttgggtttgcagttacagcgcaggtggatgagcgtcagcatctcagccggatatttataagcgacgttcttcccgatggcctggcgtatggggaagggctgagaaagggcaatgagatcatgaccttaaatggggaagctgtgtctgatcttgaccttaagcagatggaggccctgttttctgagaagagcgtcggactcactctgattgcccggcctccggacacaaaagcaaccctgtgtacatcctggtcagacagtgacctgttctccagggaccagaagagtctgctgccccctcctaaccagtcccaactgctggaggaattcctggataactttaaaaagaatacagccaatgatttcagcaacgtccctgatatcacaacaggtctgaaaaggagtcagacagatggcactctggatcaggtttcccacagggagaaaatggagcagacattcaggagtgctgagcagatcactgcactgtgcaggagttttaacgacagtcaggccaacggcatggaaggaccgcgggagaatcaggatcctcctccgaggtctctggcccgccacctgtctgatgcagaccgcctccgcaaagtcatccaggagcttgtggacacagagaagtcctacgtgaaggatttgagctgcctctttgaattatacttggagccacttcagaatgagacctttcttacccaagatgagatggagtcactttttggaagtttgccagagatgcttgagtttcagaaggtgtttctggagaccctggaggatgggatttcagcatcatctgactttaacaccctagaaaccccctcacagtttagaaaattactgttttcccttggaggctctttcctttattacgcggaccactttaaactgtacagtggattctgtgctaaccatatcaaagtacagaaggttctggagcgagctaaaactgacaaagccttcaaggcttttctggacgcccggaaccccaccaagcagcattcctccacgctggagtcctacctcatcaagccggttcagagagtgctcaagtacccgctgctgctcaaggagctggtgtccctgacggaccaggagagcgaggagcactaccacctgacggaagcactaaaggcaatggagaaagtagcgagccacatcaatgagatgcagaagatctatgaggattatgggaccgtgtttgaccagctagtagctgagcagagcggaacagagaaggaggtaacagaactttcgatgggagagcttctgatgcactctacggtttcctggttgaatccatttctgtctctaggaaaagctagaaaggaccttgagctcacagtatttgtttttaagagagccgtcatactggtttataaagaaaactgcaaactgaaaaagaaattgccctcgaattcccggcctgcacacaactctactgacttggacccatttaaattccgctggttgatccccatctccgcgcttcaagtcagactggggaatccagcagggacagaaaataattccatatgggaactgatccatacgaagtcagaaatagaaggacggccagaaaccatctttcagttgtgttgcagtgacagtgaaagcaaaaccaacattgttaaggtgattcgttctattctgagggagaacttcaggcgtcacataaagtgtgaattaccactggagaaaacgtgtaaggatcgcctggtacctcttaagaaccgagttcctgtttcggccaaattagcttcatccaggtctttaaaagtcctgaagaattcctccagcaacgagtggaccggtgagactggcaagggaaccttgctggactctgacgagggcagcttgagcagcggcacccagagcagcggctgccccacggctgagggcaggcaggactccaagagcacttctcccgggaaatacccacaccccggcttggcagattttgccgacaatctcatcaaagagagtgacatcctgagcgatgaagatgatgaccaccgtcagactgtgaagcagggcagccctactaaagacatcgaaattcagttccagagactgaggatttccgaggacccagacgttcaccccgaggctgagcagcagcctggcccggagtcgggtgagggtcagaaaggaggagagcagcccaaactggtccgggggcacttctgccccattaaacgaaaagccaacagcaccaagagggacagaggaactttgctcaaggcgcagatccgtcaccagtcccttgacagtcagtctgaaaatgccaccatcgacctaaattctgttctagagcgagaattcagtgtccagagtttaacatctgttgtcagtgaggagtgtttttatgaaacagagagccacggaaaatcatag

SEQ ID NO: 174630 - DNA, 550 bp, Artificial Sequence
  derived and/or modified sequence
agaaaaggctggagtcccagtccgtggaggagcacttacagggtctttcctaagtgctgatggcaaagaattagaaactaagtggatgctttcgacagaggaacagttggataagatgtcacacgtccatgccttggatttctgcacttgacctggaaggattcccatgagaaaagaaaagggctctgtgtatgaatgacaaggataccttcagccagctcattctggatgaatgaatgattacactaagtgtcctccacattcctctgtgggctcacttcatggactcactttgcgtgcttgttaaatgtgctgtgttgctcccaagaccatgtaaagcctactgaccactaacctccctcacagcagaaactagacgtcaggttaaaatgggcaactccgacagtcagtacacccttcaaggatctaaaaatcatagcaatactattactggtgctaagcaaattccttgctccctgaaaatacgtggcattcatgcaaaagaggaaaagtcattgcatggatggggtcacggaagcaacggagcagg

SEQ ID NO: 174631 - DNA, 877 bp, Artificial Sequence
  derived and/or modified sequence
attccccttcagttgctccatctgggcagccagctcagggcctcagtccagagacaaagcagaggcagacgattctagttttctttgctgtaaatgccacactacatggaactagagaatttgggaatctgactcatccaatcaagcccaggctaaaggcaaatgaagaaaaggctcacttcatggactcactttgcgtgcttgttaaatgtgctgtgttgctcccaagaccatgtaaagcctactgaccactaacctccctcacagcagaaactagacgtcaggttaaaatgggcaactccgacagtcagtacacccttcaaggatctaaaaatcatagcaatactattactggtgctaagcaaattccttgctccctgaaaatacgtggcattcatgcaaaagaggaaaagtcattgcatggatggggtcacggaagcaacggagcaggttacaagtccaggtccctggcccgaagctgcctttctcactttaagagtaaccagccttacgcatcgagactcggtggccccacatgcaaggtctccagaggtgttgcctactccacgcacaggacaaatgccccagggaaggatttccagggcatcagtgctgctttctcaactgagaatggcttccactctgttggccacgagctggcagataaccacatcacctccagagactgcaacggacaccttctcaactgctacgggaggaatgagagcattgcctccaccccaccgggcgaagaccgcaagagcccccgagtgctcatcaaaacgctggggaagctggatgggtgtttaagggtcgagttccacaatggtggcaaccccagcaaagtgcctgcagaggactgcagtgagccggtgca

SEQ ID NO: 174632 - DNA, 642 bp, Artificial Sequence
  derived and/or modified sequence
gcgttttatgagccatatggaagtctgaagagctgctcagctctgacagctgtttaaattatctgtgacactgcatcccaccattagcagggatgatggattgttgacagtctccatcagaaaaggctggagtcccagtccgtggaggagcacttacagggtctttcctaagtgctgaggctctgtgtatgaatgacaaggataccttcagccagctcattctggatgaatgaatgattacactaagtgtcctccacattcctctgtgggctcacttcatggactcactttgcgtgcttgttaaatgtgctgtgttgctcccaagaccatgtaaagcctactgaccactaacctccctcacagcagaaactagacgtcaggttaaaatgggcaactccgacagtcagtacacccttcaaggatctaaaaatcatagcaatactattactggtgctaagcaaattccttgctccctgaaaatacgtggcattcatgcaaaagaggaaaagtcattgcatggatggggtcacggaagcaacggagcaggttacaagtccaggtccctggcccgaagctgcctttctcactttaagagtaaccagccttacgcatcgagactcggtggccccacatgcaaggtct

SEQ ID NO: 174633 - DNA, 506 bp, Artificial Sequence
  derived and/or modified sequence
acagcgcgcgtccaagtggagaacaaagtgacccccagaacttctccaactcctcccggcgttcccgcgagggccacgcgccgagggtagcggagggcggcgcgcgaccggccccaccgagcccggcgcgcgacccgagggctctgtgtatgaatgacaaggataccttcagccagctcattctggatgaatgaatgattacactaagtgtcctccacattcctctgtgggctcacttcatggactcactttgcgtgcttgttaaatgtgctgtgttgctcccaagaccatgtaaagcctactgaccactaacctccctcacagcagaaactagacgtcaggttaaaatgggcaactccgacagtcagtacacccttcaaggatctaaaaatcatagcaatactattactggtgctaagcaaattccttgctccctgaaaatacgtggcattcatgcaaaagaggaaaagtcattgcatggatggggtcacggaagcaacggagca

SEQ ID NO: 174634 - DNA, 2491 bp, Artificial Sequence
  derived and/or modified sequence
acaatgtccctttgggtgaggaggttgaaagagtttttggtttgttctgggaacttaaggtatattaagcagtccccacagacatgctgcctgcactccacctgctgagctggctctgaggctcaggagacgtggccctctgtggtcccattgtctccacgtctgtggtaacccggtgcctttctagagcaggcaggctcccggcatgggtggaaacagagcagggggccagcttcccccaatcaccggtgctgctgtggaggaagagcttggtggcgctaggacgtccttgtgaatgtgacttggaagagcagtttgggatttttttcattgcctggggatgagagggagagacaacgtgtgtcttacacatctcccaacagccgacttagatgtgatccgttctcccagagggagcaggtttctttgaacttttcctttttatgtacagcatagtgctgagcagatcactgcactgtgcaggagttttaacgacagtcaggccaacggcatggaaggaccgcgggagaatcaggatcctcctccgaggtctctggcccgccacctgtctgatgcagaccgcctccgcaaagtcatccaggagcttgtggacacagagaagtcctacgtgaaggatttgagctgcctctttgaattatacttggagccacttcagaatgagacctttcttacccaagatgagatggagtcactttttggaagtttgccagagatgcttgagtttcagaaggtgtttctggagaccctggaggatgggatttcagcatcatctgactttaacaccctagaaaccccctcacagtttagaaaattactgttttcccttggaggctctttcctttattacgcggaccactttaaactgtacagtggattctgtgctaaccatatcaaagtacagaaggttctggagcgagctaaaactgacaaagccttcaaggcttttctggacgcccggaaccccaccaagcagcattcctccacgctggagtcctacctcatcaagccggttcagagagtgctcaagtacccgctgctgctcaaggagctggtgtccctgacggaccaggagagcgaggagcactaccacctgacggaagcactaaaggcaatggagaaagtagcgagccacatcaatgagatgcagaagatctatgaggattatgggaccgtgtttgaccagctagtagctgagcagagcggaacagagaaggaggtaacagaactttcgatgggagagcttctgatgcactctacggtttcctggttgaatccatttctgtctctaggaaaagctagaaaggaccttgagctcacagtatttgtttttaagagagccgtcatactggtttataaagaaaactgcaaactgaaaaagaaattgccctcgaattcccggcctgcacacaactctactgacttggacccatttaaattccgctggttgatccccatctccgcgcttcaagtcagactggggaatccagcagggacagaaaataattccatatgggaactgatccatacgaagtcagaaatagaaggacggccagaaaccatctttcagttgtgttgcagtgacagtgaaagcaaaaccaacattgttaaggtgattcgttctattctgagggagaacttcaggcgtcacataaagtgtgaattaccactggagaaaacgtgtaaggatcgcctggtacctcttaagaaccgagttcctgtttcggccaaattagcttcatccaggtctttaaaagtcctgaagaattcctccagcaacgagtggaccggtgagactggcaagggaaccttgctggactctgacgagggcagcttgagcagcggcacccagagcagcggctgccccacggctgagggcaggcaggactccaagagcacttctcccgggaaatacccacaccccggcttggcagattttgccgacaatctcatcaaagagagtgacatcctgagcgatgaagatgatgaccaccgtcagactgtgaagcagggcagccctactaaagacatcgaaattcagttccagagactgaggatttccgaggacccagacgttcaccccgaggctgagcagcagcctggcccggagtcgggtgagggtcagaaaggaggagagcagcccaaactggtccgggggcacttctgccccattaaacgaaaagccaacagcaccaagagggacagaggaactttgctcaaggcgcagatccgtcaccagtcccttgacagtcagtctgaaaatgccaccatcgacctaaattctgttctagagcgagaattcagtgtccagagtttaacatctgttgtcagtgaggagtgtttttatgaaacagagagccacggaaaatcatagtatgattcaatccagatatgggttaaattcctcattttacttttaaactggtggtaaagtggaaattgcaaaaaaaaaaaaaaaaaaaaactgttcatt

SEQ ID NO: 174635 - DNA, 5916 bp, Artificial Sequence
  derived and/or modified sequence
ggctctgtgtatgaatgacaaggataccttcagccagctcattctggatgaatgaatgattacactaagtgtcctccacattcctctgtgggctcacttcatggactcactttgcgtgcttgttaaatgtgctgtgttgctcccaagaccatgtaaagcctactgaccactaacctccctcacagcagaaactagacgtcaggttaaaatgggcaactccgacagtcagtacacccttcaaggatctaaaaatcatagcaatactattactggtgctaagcaaattccttgctccctgaaaatacgtggcattcatgcaaaagaggaaaagtcattgcatggatggggtcacggaagcaacggagcaggttacaagtccaggtccctggcccgaagctgcctttctcactttaagagtaaccagccttacgcatcgagactcggtggccccacatgcaaggtctccagaggtgttgcctactccacgcacaggacaaatgccccagggaaggatttccagggcatcagtgctgctttctcaactgagaatggcttccactctgttggccacgagctggcagataaccacatcacctccagagactgcaacggacaccttctcaactgctacgggaggaatgagagcattgcctccaccccaccgggcgaagaccgcaagagcccccgagtgctcatcaaaacgctggggaagctggatgggtgtttaagggtcgagttccacaatggtggcaaccccagcaaagtgcctgcagaggactgcagtgagccggtgcagctgctgaggtactcacctaccttagcatcggaaacctcccctgtgcctgaagccaggagggggtccagcgccgattccctgcccagccatcgcccctctcccacggactctcgcctgcggtccagcaaaggcagctccctgagttctgagtcatcctggtacgactccccttggggcaatgctggagagctgagcgaggctgagggctccttcctggcccccggcatgcctgaccccagtctccatgccagcttcccacctggcgatgccaaaaagcctttcaaccaaagctcttccctctcctccctccgggaactgtacaaagatgccaacctggggagcctctccccctcaggtatccgcctttctgatgaatacatgggcacgcatgccagcctgagcaaccgtgtctcttttgcttccgacattgatgtgccctccagagtggcacacggggaccccatccagtacagttccttcactctcccctgtcggaagcccaaagcctttgttgaggatactgcgaagaaggactccctcaaagccaggatgcgacggatcagtgactggacgggaagcctctcaaggaagaaaaggaaactccaggagccgaggtccaaggagggcagtgactactttgacagtcgctctgatggactgaatacagatgtgcagggatcctcccaggcatctgcttttctgtggtcagggggctctactcagatcctgtctcagagaagtgaatccacacatgcgattggcagcgatcccctccggcagaacatttatgagaatttcatgcgagagttggaaatgagcaggaccaacactgagaacatagaaacatctacagaaaccgccgagtccagcagcgagtcactcagctctctggaacagctggatctgctctttgagaaggaacagggggtggtccggaaggccgggtggctcttcttcaagcccctggtcactgtgcagaaggaaaggaagcttgagctggtggcacgaaggaaatggaaacagtactgggtaacgctgaaaggatgcacgctgctgttttatgagacctatgggaagaattccatggatcagagcagtgcccctcggtgtgctctgtttgcagaagacagcatagtgcagtctgttccagagcatcccaagaaagaaaatgtgttctgcctcagcaactcctttggagatgtctaccttttccaggccaccagccagacagatctagaaaactgggtcactgctgtacactctgcttgtgcatccctttttgcaaagaagcatgggaaagaggacacgctgcggctgctgaagaaccagaccaaaaacctgcttcagaagatagacatggacagcaagatgaagaagatggcagagctgcagctgtccgtggtgagcgacccaaagaacaggaaagccatagagaaccagatccagcaatgggagcagaatcttgagaaatttcacatggatctgttcaggatgcgctgctatctggccagcctacaaggtggggagttaccgaacccaaagagtctccttgcagccgccagccgcccctccaagctggccctcggcaggctgggcatcttgtctgtttcctctttccatgctctggtatgttctagagatgactctgctctccggaaaaggacactgtcactgacccagcgagggagaaacaagaagggaatattttcttcgttaaaagggctggacacactggccagaaaaggcaaggagaagagaccttctataactcaggtcgatgaacttctgcatatatatggttcaacagtagacggtgttccccgagacaatgcatgggaaatccagacttatgtccactttcaggacaatcacggagttactgtagggatcaagccagagcacagagtagaagatattttgactttggcatgcaagatgaggcagttggaacccagccattatggcctacagcttcgaaaattagtagatgacaatgttgagtattgcatccctgcaccatatgaatatatgcaacaacaggtttatgatgaaatagaagtctttccactaaatgtttatgacgtgcagctcacgaagactgggagtgtgtgtgactttgggtttgcagttacagcgcaggtggatgagcgtcagcatctcagccggatatttataagcgacgttcttcccgatggcctggcgtatggggaagggctgagaaagggcaatgagatcatgaccttaaatggggaagctgtgtctgatcttgaccttaagcagatggaggccctgttttctgagaagagcgtcggactcactctgattgcccggcctccggacacaaaagcaaccctgtgtacatcctggtcagacagtgacctgttctccagggaccagaagagtctgctgccccctcctaaccagtcccaactgctggaggaattcctggataactttaaaaagaatacagccaatgatttcagcaacgtccctgatatcacaacaggtctgaaaaggagtcagacagatggcactctggatcaggtttcccacagggagaaaatggagcagacattcaggagtgctgagcagatcactgcactgtgcaggagttttaacgacagtcaggccaacggcatggaaggaccgcgggagaatcaggatcctcctccgaggtctctggcccgccacctgtctgatgcagaccgcctccgcaaagtcatccaggagcttgtggacacagagaagtcctacgtgaaggatttgagctgcctctttgaattatacttggagccacttcagaatgagacctttcttacccaagatgagatggagtcactttttggaagtttgccagagatgcttgagtttcagaaggtgtttctggagaccctggaggatgggatttcagcatcatctgactttaacaccctagaaaccccctcacagtttagaaaattactgttttcccttggaggctctttcctttattacgcggaccactttaaactgtacagtggattctgtgctaaccatatcaaagtacagaaggttctggagcgagctaaaactgacaaagccttcaaggcttttctggacgcccggaaccccaccaagcagcattcctccacgctggagtcctacctcatcaagccggttcagagagtgctcaagtacccgctgctgctcaaggagctggtgtccctgacggaccaggagagcgaggagcactaccacctgacggaagcactaaaggcaatggagaaagtagcgagccacatcaatgagatgcagaagatctatgaggattatgggaccgtgtttgaccagctagtagctgagcagagcggaacagagaaggaggtaacagaactttcgatgggagagcttctgatgcactctacggtttcctggttgaatccatttctgtctctaggaaaagctagaaaggaccttgagctcacagtatttgtttttaagagagccgtcatactggtttataaagaaaactgcaaactgaaaaagaaattgccctcgaattcccggcctgcacacaactctactgacttggacccatttaaattccgctggttgatccccatctccgcgcttcaagtcagactggggaatccagcagggacagaaaataattccatatgggaactgatccatacgaagtcagaaatagaaggacggccagaaaccatctttcagttgtgttgcagtgacagtgaaagcaaaaccaacattgttaaggtgattcgttctattctgagggagaacttcaggcgtcacataaagtgtgaattaccactggagaaaacgtgtaaggatcgcctggtacctcttaagaaccgagttcctgtttcggccaaattagcttcatccaggtctttaaaagtcctgaagaattcctccagcaacgagtggaccggtgagactggcaagggaaccttgctggactctgacgagggcagcttgagcagcggcacccagagcagcggctgccccacggctgagggcaggcaggactccaagagcacttctcccgggaaatacccacaccccggcttggcagattttgccgacaatctcatcaaagagagtgacatcctgagcgatgaagatgatgaccaccgtcagactgtgaagcagggcagccctactaaagacatcgaaattcagttccagagactgaggatttccgaggacccagacgttcaccccgaggctgagcagcagcctggcccggagtcgggtgagggtcagaaaggaggagagcagcccaaactggtccgggggcacttctgccccattaaacgaaaagccaacagcaccaagagggacagaggaactttgctcaaggcgcagatccgtcaccagtcccttgacagtcagtctgaaaatgccaccatcgacctaaattctgttctagagcgagaattcagtgtccagagtttaacatctgttgtcagtgaggagtgtttttatgaaacagagagccacggaaaatcatagtatgattcaatccagatatgggttaaattcctcattttacttttaaactggtggtaaagtggaaattgcaaaaaaaaaaaaaaaaaaaaactgttcattcctgggttttgtgcagtatacattttcccacaaaatggttgtaaagatttaagttattttaatttattgtggatcagaaacctagatgaaactggtcagaatctgtaaattacttagtttatatccactttgagcaggtatcaaatgatttaggatccttaaaattacattctaataattaagttatgtggaaaaagtaaggctggggaagtcgtgattaatagttttcaaagggccattttttaaaatcctctgggcattttctttcagctgtttgttagtttttgctttatttaaagcatatttaagttattttaatgtggtttaggggcaaaatgtgcagatacttcatttttgtaagatagattgtaatagatgctgtttatactaaacatgtcataactatctatacagtatatattaaaagaaagcttgtactgtatcttatttgatgatatttattttctctgccaagctgtatagtaaaaggaaaataagtcaca

SEQ ID NO: 174636 - DNA, 1881 bp, Artificial Sequence
  derived and/or modified sequence
atggagggccccagagagaaccaggaccccccccccagaagcctggccagacacctgagcgacgccgacagactgagaaaggtgatccaggagctggtggacaccgagaagagctacgtgaaggacctgagctgcctgttcgagctgtacctggagcccctgcagaacgagaccttcctgacccaggacgagatggagagcctgttcggcagcctgcccgagatgctggagttccagaaggtgttcctggagaccctggaggacggcatcagcgccagcagcgacttcaacaccctggagacccccagccagttcagaaagctgctgttcagcctgggcggcagcttcctgtactacgccgaccacttcaagctgtacagcggcttctgcgccaaccacatcaaggtgcagaaggtgctggagagagccaagaccgacaaggccttcaaggccttcctggacgccagaaaccccaccaagcagcacagcagcaccctggagagctacctgatcaagcccgtgcagagagtgctgaagtaccccctgctgctgaaggagctggtgagcctgaccgaccaggagagcgaggagcactaccacctgaccgaggccctgaaggccatggagaaggtggccagccacatcaacgagatgcagaagatctacgaggactacggcaccgtgttcgaccagctggtggccgagcagagcggcaccgagaaggaggtgaccgagctgagcatgggcgagctgctgatgcacagcaccgtgagctggctgaaccccttcctgagcctgggcaaggccagaaaggacctggagctgaccgtgttcgtgttcaagagagccgtgatcctggtgtacaaggagaactgcaagctgaagaagaagctgcccagcaacagcagacccgcccacaacagcaccgacctggaccccttcaagttcagatggctgatccccatcagcgccctgcaggtgagactgggcaaccccgccggcaccgagaacaacagcatctgggagctgatccacaccaagagcgagatcgagggcagacccgagaccatcttccagctgtgctgcagcgacagcgagagcaagaccaacatcgtgaaggtgatcagaagcatcctgagagagaacttcagaagacacatcaagtgcgagctgcccctggagaagacctgcaaggacagactggtgcccctgaagaacagagtgcccgtgagcgccaagctggccagcagcagaagcctgaaggtgctgaagaacagcagcagcaacgagtggaccggcgagaccggcaagggcaccctgctggacagcgacgagggcagcctgagcagcggcacccagagcagcggctgccccaccgccgagggcagacaggacagcaagagcaccagccccggcaagtacccccaccccggcctggccgacttcgccgacaacctgatcaaggagagcgacatcctgagcgacgaggacgacgaccacagacagaccgtgaagcagggcagccccaccaaggacatcgagatccagttccagagactgagaatcagcgaggaccccgacgtgcaccccgaggccgagcagcagcccggccccgagagcggcgagggccagaagggcggcgagcagcccaagctggtgagaggccacttctgccccatcaagagaaaggccaacagcaccaagagagacagaggcaccctgctgaaggcccagatcagacaccagagcctggacagccagagcgagaacgccaccatcgacctgaacagcgtgctggagagagagttcagcgtgcagagcctgaccagcgtggtgagcgaggagtgcttctacgagaccgagagccacggcaagagctag

SEQ ID NO: 174637 - DNA, 5106 bp, Artificial Sequence
  derived and/or modified sequence
atgggcaacagcgacagccagtacaccctgcagggcagcaagaaccacagcaacaccatcaccggcgccaagcagatcccctgcagcctgaagatcagaggcatccacgccaaggaggagaagagcctgcacggctggggccacggcagcaacggcgccggctacaagagcagaagcctggccagaagctgcctgagccacttcaagagcaaccagccctacgccagcagactgggcggccccacctgcaaggtgagcagaggcgtggcctacagcacccacagaaccaacgcccccggcaaggacttccagggcatcagcgccgccttcagcaccgagaacggcttccacagcgtgggccacgagctggccgacaaccacatcaccagcagagactgcaacggccacctgctgaactgctacggcagaaacgagagcatcgccagcaccccccccggcgaggacagaaagagccccagagtgctgatcaagaccctgggcaagctggacggctgcctgagagtggagttccacaacggcggcaaccccagcaaggtgcccgccgaggactgcagcgagcccgtgcagctgctgagatacagccccaccctggccagcgagaccagccccgtgcccgaggccagaagaggcagcagcgccgacagcctgcccagccacagacccagccccaccgacagcagactgagaagcagcaagggcagcagcctgagcagcgagagcagctggtacgacagcccctggggcaacgccggcgagctgagcgaggccgagggcagcttcctggcccccggcatgcccgaccccagcctgcacgccagcttcccccccggcgacgccaagaagcccttcaaccagagcagcagcctgagcagcctgagagagctgtacaaggacgccaacctgggcagcctgagccccagcggcatcagactgagcgacgagtacatgggcacccacgccagcctgagcaacagagtgagcttcgccagcgacatcgacgtgcccagcagagtggcccacggcgaccccatccagtacagcagcttcaccctgccctgcagaaagcccaaggccttcgtggaggacaccgccaagaaggacagcctgaaggccagaatgagaagaatcagcgactggaccggcagcctgagcagaaagaagagaaagctgcaggagcccagaagcaaggagggcagcgactacttcgacagcagaagcgacggcctgaacaccgacgtgcagggcagcagccaggccagcgccttcctgtggagcggcggcagcacccagatcctgagccagagaagcgagagcacccacgccatcggcagcgaccccctgagacagaacatctacgagaacttcatgagagagctggagatgagcagaaccaacaccgagaacatcgagaccagcaccgagaccgccgagagcagcagcgagagcctgagcagcctggagcagctggacctgctgttcgagaaggagcagggcgtggtgagaaaggccggctggctgttcttcaagcccctggtgaccgtgcagaaggagagaaagctggagctggtggccagaagaaagtggaagcagtactgggtgaccctgaagggctgcaccctgctgttctacgagacctacggcaagaacagcatggaccagagcagcgcccccagatgcgccctgttcgccgaggacagcatcgtgcagagcgtgcccgagcaccccaagaaggagaacgtgttctgcctgagcaacagcttcggcgacgtgtacctgttccaggccaccagccagaccgacctggagaactgggtgaccgccgtgcacagcgcctgcgccagcctgttcgccaagaagcacggcaaggaggacaccctgagactgctgaagaaccagaccaagaacctgctgcagaagatcgacatggacagcaagatgaagaagatggccgagctgcagctgagcgtggtgagcgaccccaagaacagaaaggccatcgagaaccagatccagcagtgggagcagaacctggagaagttccacatggacctgttcagaatgagatgctacctggccagcctgcagggcggcgagctgcccaaccccaagagcctgctggccgccgccagcagacccagcaagctggccctgggcagactgggcatcctgagcgtgagcagcttccacgccctggtgtgcagcagagacgacagcgccctgagaaagagaaccctgagcctgacccagagaggcagaaacaagaagggcatcttcagcagcctgaagggcctggacaccctggccagaaagggcaaggagaagagacccagcatcacccaggtggacgagctgctgcacatctacggcagcaccgtggacggcgtgcccagagacaacgcctgggagatccagacctacgtgcacttccaggacaaccacggcgtgaccgtgggcatcaagcccgagcacagagtggaggacatcctgaccctggcctgcaagatgagacagctggagcccagccactacggcctgcagctgagaaagctggtggacgacaacgtggagtactgcatccccgccccctacgagtacatgcagcagcaggtgtacgacgagatcgaggtgttccccctgaacgtgtacgacgtgcagctgaccaagaccggcagcgtgtgcgacttcggcttcgccgtgaccgcccaggtggacgagagacagcacctgagcagaatcttcatcagcgacgtgctgcccgacggcctggcctacggcgagggcctgagaaagggcaacgagatcatgaccctgaacggcgaggccgtgagcgacctggacctgaagcagatggaggccctgttcagcgagaagagcgtgggcctgaccctgatcgccagaccccccgacaccaaggccaccctgtgcaccagctggagcgacagcgacctgttcagcagagaccagaagagcctgctgcccccccccaaccagagccagctgctggaggagttcctggacaacttcaagaagaacaccgccaacgacttcagcaacgtgcccgacatcaccaccggcctgaagagaagccagaccgacggcaccctggaccaggtgagccacagagagaagatggagcagaccttcagaagcgccgagcagatcaccgccctgtgcagaagcttcaacgacagccaggccaacggcatggagggccccagagagaaccaggaccccccccccagaagcctggccagacacctgagcgacgccgacagactgagaaaggtgatccaggagctggtggacaccgagaagagctacgtgaaggacctgagctgcctgttcgagctgtacctggagcccctgcagaacgagaccttcctgacccaggacgagatggagagcctgttcggcagcctgcccgagatgctggagttccagaaggtgttcctggagaccctggaggacggcatcagcgccagcagcgacttcaacaccctggagacccccagccagttcagaaagctgctgttcagcctgggcggcagcttcctgtactacgccgaccacttcaagctgtacagcggcttctgcgccaaccacatcaaggtgcagaaggtgctggagagagccaagaccgacaaggccttcaaggccttcctggacgccagaaaccccaccaagcagcacagcagcaccctggagagctacctgatcaagcccgtgcagagagtgctgaagtaccccctgctgctgaaggagctggtgagcctgaccgaccaggagagcgaggagcactaccacctgaccgaggccctgaaggccatggagaaggtggccagccacatcaacgagatgcagaagatctacgaggactacggcaccgtgttcgaccagctggtggccgagcagagcggcaccgagaaggaggtgaccgagctgagcatgggcgagctgctgatgcacagcaccgtgagctggctgaaccccttcctgagcctgggcaaggccagaaaggacctggagctgaccgtgttcgtgttcaagagagccgtgatcctggtgtacaaggagaactgcaagctgaagaagaagctgcccagcaacagcagacccgcccacaacagcaccgacctggaccccttcaagttcagatggctgatccccatcagcgccctgcaggtgagactgggcaaccccgccggcaccgagaacaacagcatctgggagctgatccacaccaagagcgagatcgagggcagacccgagaccatcttccagctgtgctgcagcgacagcgagagcaagaccaacatcgtgaaggtgatcagaagcatcctgagagagaacttcagaagacacatcaagtgcgagctgcccctggagaagacctgcaaggacagactggtgcccctgaagaacagagtgcccgtgagcgccaagctggccagcagcagaagcctgaaggtgctgaagaacagcagcagcaacgagtggaccggcgagaccggcaagggcaccctgctggacagcgacgagggcagcctgagcagcggcacccagagcagcggctgccccaccgccgagggcagacaggacagcaagagcaccagccccggcaagtacccccaccccggcctggccgacttcgccgacaacctgatcaaggagagcgacatcctgagcgacgaggacgacgaccacagacagaccgtgaagcagggcagccccaccaaggacatcgagatccagttccagagactgagaatcagcgaggaccccgacgtgcaccccgaggccgagcagcagcccggccccgagagcggcgagggccagaagggcggcgagcagcccaagctggtgagaggccacttctgccccatcaagagaaaggccaacagcaccaagagagacagaggcaccctgctgaaggcccagatcagacaccagagcctggacagccagagcgagaacgccaccatcgacctgaacagcgtgctggagagagagttcagcgtgcagagcctgaccagcgtggtgagcgaggagtgcttctacgagaccgagagccacggcaagagctag

SEQ ID NO: 174638 - protein, 1056 aa, Artificial Sequence
  derived and/or modified sequence
MMGDYRLPDHPQPMEILNLYLGDSLEPHPGECPRETCSHEDPPEPFEEQTWATDPPEPTRQNVPPWGSGVELTHLGSWVHQDGLEPCQEQTRATDPPESTRQDAPPWGSGVELTHLGSPSAQREHRQNTASPGSPVNSHLPGSPKQNRSTSTQVVFWAGILQAQMCVLDLEEELEKTEGLKAGLKCCLPTPPVDLPGDTGLHSSPPENEDSGEDSSEPEGEGQAWLREGTPDSSPQWGAEEESMFFSNPLFLASPCSENSASGECFSWGASDSHAGVRTGPESPATLEPPLPEDTVLWELESEPDLGDGAAISGHCTPPFPVPIYKPHSICWASVAAAEGAPAAPPGHGESEGDRLGPAPSAAPCVDEALTWESGCVGSDLGPAAHPVQPWASLSPEGWQRGGPFWPQVTLNSQDRDEREGGHPQESLPCTLAPCPWRSPASSPEPSSPESESRGPGPRPSPASSQEGSPQLQHHSSGILPKWTLDASQSSLLETDGEQPSSLKKKEAGEAPKPGEEVKSEGTARPAETGDVQPDIHLTSAEHENLRTPMNSSWLPGSPMPQAQSPEEGQRPPAGDKLANGVRNNKVAWNLASRLYRLEGFRKSEVAAYLQKNNDFSRAVAEEYLSFFQFGGQSLDRALRSFLQALVLSGETQERERILYQFSRRFHHCNPGIFPSVDSVHTLTCAIMLLNTDLHGQNIGKSMSCQEFITNLNGLRDGGNFPKELLKALYWSIRSEKLEWAVDEEDTARPEKAQPSLPAGKMSKPFLQLAQDPTVPTYKQGILARKMHQDADGKKTPWGKRGWKMFHTLLRGMVLYFLKQGEDHCLEGESLVGQMVDEPVGVHHSLATPATHYTKKPHVFQLRTADWRLYLFQAPTAKEMSSWIARINLAAATHSAPPFPAAVGSQRRFVRPILPVGPAQSSLEEQHRSHENCLDAAADDLLDLQRNLPERRGRGRELEEHRLRKEYLEYEKTRYETYVQLLVARLHCPSDALDLWEEQLGREAGGTREPKLSLKKSHSSPSLHQDEAPTTAKVKRNISERRTYRKIIPKRNRNQL

SEQ ID NO: 174639 - DNA, 3171 bp, Artificial Sequence
  derived and/or modified sequence
atgatgggcgactaccgcctacccgatcatccacagcctatggagatcctcaatctctaccttggagattctctggagccacacccaggtgaatgtccccgagagacctgttctcacgaagatccacccgaaccctttgaggagcagacctgggccaccgaccctccagaaccaactcggcagaacgttcccccatggggatccggtgtggaattgacgcatctgggctcctgggtgcaccaggacggactggagccttgtcaggaacagacaagggcaacggacccgcccgaaagcactcgtcaggatgcccccccctggggcagtggagtagaactgacccacctaggtagcccatctgcacagagggaacatcggcagaacaccgcaagcccaggcagtcccgttaattcccacctgccaggatcccccaagcaaaataggagtacgagtacgcaggtggtgttctgggctgggatcctgcaagcacagatgtgtgtgctcgacctggaggaggaactagagaaaactgagggccttaaggccggactcaaatgttgtcttcccactcctcccgtggacctaccaggggacaccggcttgcactcctcacctccggaaaatgaggactctggggaagactcatcggaacccgagggcgagggccaggcctggctcagggagggaacacctgactcgtccccgcagtggggggcagaggaagagtcaatgtttttctccaatccactgttcttggccagtccttgcagtgaaaactccgcaagcggcgagtgcttctcttggggagcttccgatagccacgccggtgtcagaacaggccctgagagccccgccacactggagccccccctccctgaggacaccgtgctgtgggaactggaatccgaaccagacctgggggacggtgcggcaatctcaggccactgcacaccaccttttcctgtacctatctacaaacctcacagcatctgttgggcctcagtcgctgctgccgaaggggctcccgctgccccaccaggccatggcgagtctgaaggggaccgcctaggcccagccccatccgccgcgccctgtgttgatgaggccttgacctgggaatcagggtgcgtcggtagcgatctgggaccagcggcgcacccagtgcagccctgggcaagcctttcccccgaaggttggcaacgaggaggccccttctggccacaagtcacactgaacagccaggatcgtgatgagagggaaggcggtcatccacaggaaagcctgccatgtacgctggctccatgcccctggcggtcacctgcgtcatctccagagccaagcagccccgaatctgagtcgagagggccagggccccgcccatctcctgcatcttcgcaggagggaagcccccagctccaacaccactcgagcggtatcttaccaaaatggaccctggacgccagccaatcatccctccttgagacagacggggaacagccctcatcactgaagaagaaagaggcaggagaggctccaaaaccaggcgaagaggtcaagtcagaagggaccgcccgaccggctgaaacgggagacgtgcagccagatatacacttgacgagtgcggagcacgagaacctgaggaccccaatgaacagttcatggctgcccggcagcccaatgccccaagctcagagccctgaagagggacagcggccccctgcaggagataagctcgcaaatggagtcagaaacaacaaagtcgcttggaacttagccagtcggctctatagattagagggcttcagaaaatctgaagtggccgcctatctgcagaaaaacaacgatttttcacgcgccgtggccgaggaatatctgtccttttttcagtttggcggacagagtctggacagggccctgcgtagctttttgcaggcactggttctctccggtgagacacaggaacgggaaagaatcctgtaccagtttagccggcggttccatcattgtaacccaggaatctttccttccgtcgactcggtgcatacactgacatgtgcgatcatgctgctgaatacggacttgcatggtcagaatatcgggaagtcaatgagctgtcaggaatttatcacaaatttaaacgggctaagggacggcggaaatttccccaaagaattgctgaaggccttgtattggtcgatcaggagcgaaaagctggagtgggctgtggatgaagaggatacagctaggcccgagaaggctcagcctagtctcccagccggaaaaatgagcaaaccctttctgcaactcgcccaagatccaaccgtaccaacatacaaacagggcatccttgctcgcaaaatgcaccaggatgctgacggcaaaaagacaccctggggaaagcgggggtggaaaatgtttcacaccctgctgagaggaatggtcctctatttcttgaaacagggcgaagatcattgtttagaaggggaaagcctggtgggacagatggtcgacgagccagtgggggtgcaccatagcctggccactcccgccacacattataccaaaaagccccacgtgttccagttgaggacggctgactggcgcctctacttatttcaggcccccacagcaaaggagatgtcctcctggattgctagaattaacctggccgcagccacacacagcgctccaccctttccagcggctgtcggctcccagcggaggttcgtgagaccgatcctgcctgtgggtcccgctcagtctagtctggaggaacaacataggagccatgagaactgtctcgacgccgctgcagacgatctcctggatttacagcgcaacttaccagagagaagaggacgcggcagggagctcgaggaacaccgtctcagaaaggaatacctggagtatgaaaagacaaggtacgagacctacgtacagttgctagttgccagactgcactgtccatccgacgccctggatttgtgggaagagcaattgggacgggaagctggagggacaagggagcccaagctttctctaaagaaatcacacagtagccctagtttgcatcaagacgaggcacctactactgccaaagtgaagcggaacatttccgaaagacggacgtatagaaaaattatcccgaaacgcaatcgcaatcagctatag

SEQ ID NO: 174640 - DNA, 3171 bp, Artificial Sequence
  derived and/or modified sequence
atgatgggagactaccgcctgcctgaccacccccagcccatggagatcctgaacctgtacctgggggacagcctggagccccaccctggagaatgtccccgggagacctgcagccatgaggaccccccagagccctttgaggagcagacctgggccacagatcctcctgagcccacccggcagaatgtgcccccctggggcagcggcgtggagctgacccacctgggctcctgggtgcaccaggacggcctggagccctgccaggagcagacccgggccacagaccccccagagagcacccggcaggatgccccaccctggggcagcggcgtggagctgacccacctgggcagccccagcgcccagcgggagcaccggcagaacacagccagccctggcagccctgtgaacagccacctgcccggcagccccaagcagaacagaagcaccagcacccaggtggtgttctgggccggcatcctgcaggcccagatgtgtgtgctggacctggaggaggagctggagaagacagagggcctgaaggccggcctgaagtgctgcctgcccaccccacctgtggacctgcccggggacaccggcctgcacagcagccccccagaaaatgaagattctggagaggacagcagcgagcctgagggggagggccaggcctggctgcgggagggcaccccagacagcagcccccagtggggcgctgaggaggagagcatgttcttcagcaaccccctcttcctggccagcccctgcagcgagaacagcgccagcggggagtgcttctcctggggcgccagtgacagccatgctggggtgaggactggacctgagagccctgccaccctggagccccccctgcctgaagatactgtgctgtgggagctggagagcgagccagacctgggagatggagctgccatcagcggccactgcaccccacccttccctgtgcccatctacaagccccacagcatctgctgggcctctgtggccgctgctgagggcgccccagctgcccctcctggccacggggagagcgagggggaccggctgggccctgcccccagcgctgccccctgtgtggatgaggccctgacctgggagagcggctgtgtgggcagtgacctgggccctgctgcccaccctgtgcagccctgggccagcctgagccctgagggctggcagaggggcggccccttctggccccaggtgaccctgaacagccaggacagagatgagcgggagggcggccacccccaggagagcctgccctgcaccctggccccctgcccctggaggagccctgccagcagccctgagcccagcagccctgagagcgagagccggggccctggcccccggcccagccctgccagcagccaggagggcagcccccagctgcagcaccacagcagcggcatcctgcccaagtggaccctggatgccagccagagcagcctgctggagacagatggagagcagcccagcagcctgaagaagaaggaggccggggaggcccccaagccaggagaggaggtgaagtctgagggcacagcccggcctgctgagactggagatgtgcagcctgacatccacctgaccagcgctgagcacgagaacctgcggacccccatgaacagctcctggctgcccggcagccccatgccccaggcccagagccctgaggagggccagaggcccccagctggggacaagctggccaacggggtgaggaacaacaaggtggcctggaacctggccagccggctgtaccgcctggagggcttcaggaagtctgaggtggccgcctacctgcagaagaacaatgacttcagcagagctgtggccgaggagtacctgtccttcttccagtttggaggccagagcctggaccgggccctgcgctccttcctgcaggccctggtgctgtctggagagacccaggagcgggagcgcatcctgtaccagttcagccgccgcttccaccactgcaaccctggcatcttccccagcgtggacagcgtgcacaccctgacctgtgccatcatgctgctgaacacagacctgcacggccagaacatcggcaagtccatgagctgccaggagttcatcaccaacctgaatggcctgagagatggcggcaacttccccaaggagctgctgaaggccctgtactggagcatccgctctgagaagctggagtgggccgtggatgaggaggacacagcccggcctgagaaggcccagcccagcctgcctgctgggaagatgagcaagcccttcctgcagctggcccaggaccccaccgtgcccacctacaagcagggcatcctggccaggaagatgcaccaggatgctgatggcaagaagaccccctggggcaagaggggctggaagatgttccacaccctgctgcggggcatggtgctgtacttcctgaagcagggcgaggaccactgcctggagggggagagcctggtgggccagatggtggatgagcctgtgggcgtgcaccacagcctggccaccccagccacccactacaccaagaagccccacgtgttccagctgaggacagctgactggaggctgtacctgttccaggcccccacagccaaggagatgagctcctggatcgcccgcatcaacctggccgccgccacccacagcgccccacccttccctgctgctgtgggcagccagaggagatttgtgcggcccatcctgcctgtgggccctgcccagagcagcctggaggagcagcacaggagccatgagaactgcctggatgctgctgctgatgacctgctggacctgcagaggaacctgcctgagcggcggggccggggccgggagctggaggagcaccggctgaggaaggagtacctggagtatgagaagaccaggtatgagacctacgtgcagctgctggtggcccggctgcactgccccagtgatgccctggacctgtgggaggagcagctgggccgggaggccggcggcacccgggagcccaagctgagcctgaagaagagccacagcagccccagcctgcaccaggatgaggcccccaccacagccaaggtgaagaggaacatcagcgagaggaggacctacaggaagatcatccccaagaggaacagaaaccagctgtag

SEQ ID NO: 174641 - DNA, 3171 bp, Artificial Sequence
  derived and/or modified sequence
atgatgggcgactaccggctgcccgaccacccccagcccatggagatcctgaatctttacctgggagactccctggagccacacccaggcgagtgtcctcgcgagacctgctcacacgaggaccctccagagccctttgaagagcagacctgggctacagatcctcctgagccgactcggcagaatgtgccaccttggggcagcggtgttgagctgacacacctggggtcatgggtccatcaggatggactggaaccgtgtcaagaacagacaagggccaccgaccctcctgagagcaccaggcaagacgctcccccatggggctcgggcgtagagctgacgcatttgggatcccccagcgctcaaagggaacataggcagaatacggcatcacccgggagcccagtcaacagtcacctgccagggagccccaaacaaaataggtcgacatcaactcaggttgtgttttgggcgggcattctgcaagcccagatgtgcgtactggacctggaagaggaattggagaaaaccgaagggttgaaggccggtctgaaatgctgtcttcctactccgcccgtggatttacctggcgatacgggactgcactcaagcccccccgagaatgaagattcaggggaagattcgtcggagccggagggtgaaggccaagcttggcttcgcgagggaacaccagattcctcaccccaatggggagcagaggaggaatcaatgtttttctccaatccactatttctcgcctcaccttgttccgagaatagtgcatccggagaatgctttagctggggtgccagcgattcgcacgccggcgtccgcacaggccctgaatctcctgccacactagagcctccacttcctgaggacactgtgctgtgggaactggaatccgaacctgatctgggcgatggggccgctataagtgggcactgtaccccaccatttcccgtgcccatttacaaaccacactctatttgctgggctagcgtggccgccgcagaaggggctcccgccgccccgccaggtcatggagaaagcgagggagaccgactcgggccagccccgagtgcagcaccatgcgtcgatgaagctcttacatgggagagcggctgtgtggggtctgatttagggcctgccgcccaccctgttcagccctgggcatctttaagccctgagggttggcagcgcggcggtcctttttggccccaggtcacattaaattcacaagatagagacgaacgcgagggtggtcacccgcaggaatcactgccttgcacactggcaccatgtccatggcgcagtccggcctcttcacctgaaccttcatcccccgagagcgaatccagaggacccggcccacgcccttcgccagcgtcctctcaagaaggatcccctcagctccaacaccattcgtccggaatcctccccaagtggaccctcgatgctagtcagtcgtctttattagagactgatggcgagcagccatcatccttaaagaagaaagaggctggagaagctccaaaaccaggcgaagaagtaaagagtgaaggcactgcccggccagcggagactggcgacgtgcagcctgatattcacctcacatcggcagaacacgagaacctgagaacacctatgaactcttcctggctgcccggatctcctatgcctcaggcccagagcccagaagaaggtcaaaggccccctgcaggagacaagctcgctaatggcgttaggaataacaaggttgcttggaatttagccagtaggctgtaccggttggaaggcttcaggaaatccgaggttgctgcctaccttcagaagaacaatgatttctcccgggccgtcgcagaggaatatcttagcttcttccaatttggaggccaaagtctcgaccgggccctgagaagtttcttacaggctctggttttgagtggcgagacccaggaaagagagcggattttatatcagttcagccggcggttccatcactgtaaccccggcatcttcccgtctgtggactccgtccacaccctgacctgcgccattatgctgttgaatactgacctccacggtcaaaacatcggaaagagcatgtcctgtcaggaattcatcaccaacctgaacggactgcgcgacggggggaattttcccaaggagctgctcaaagcactctactggagcattcggagtgaaaagctggaatgggccgttgacgaggaggatacggctcggccagagaaggcccaaccgagtcttccagccgggaaaatgtcaaagcccttcttacagctagcccaggatccaaccgtcccaacctacaaacagggcattctggccagaaagatgcaccaagatgccgacggaaagaaaactccttggggcaaacgcggatggaagatgttccatacccttctgagaggtatggtcctctacttcctgaaacagggtgaggatcactgcctggagggggagtccctggtgggccaaatggtggacgaaccagtgggcgtccatcatagtcttgcgactcctgctacacactacaccaagaagccccacgtgttccaattgagaacagccgattggcgcctgtacctctttcaggctcctaccgccaaggaaatgtcaagttggattgcaaggattaatctggcggctgccacccacagcgctccaccgtttcccgctgcggtgggttctcaacggcggttcgtaagacctatcctaccagttggaccagcacagagctccctcgaggaacagcatcggagtcacgagaactgtctcgatgcggcggcagatgaccttctggatttgcagcggaacctgcccgaacgtcgaggcaggggtcgcgagctggaggagcacaggctgcgaaaggaatatctggagtatgagaagactcgctatgagacgtatgttcaactgttagtggcgagactccattgcccgtctgatgccttagacctttgggaagagcagctcggtcgagaggctggaggtactagagagcctaaactgagcttaaagaagtcccacagcagcccttctttgcaccaggatgaagccccaacaactgccaaagtgaagagaaacatctctgaaaggcgaacttacaggaagatcattcctaagaggaacagaaaccaactatag

SEQ ID NO: 174642 - DNA, 5188 bp, Artificial Sequence
  derived and/or modified sequence
acattcactgggcaagccgactgtgagccaggaagtgctcttggggagcccaggccaagccatccattcttgggtcctttggagggtagatatggattcccagtttctccagcggccagtgctccccctagtccacacagtgagaccgtgaaagcagatgctccggggcactcctgggcagcttttgctcagtggatgatgggtgactacagactccctgaccacccccagcccatggaaattctcaacctgtacttgggagacagcctggagccccacccaggagagtgcccaagggaaacgtgcagccatgaggatccaccggagcctttcgaggagcaaacctgggccactgaccctcctgaacctaccagacaaaatgttcctccctggggctccggtgtggagctcacacacctggggagctgggtccatcaggacgggctggagccttgccaggagcaaacccgggccactgaccctcctgaatctaccagacaagatgctcctccctggggctccggtgtggagctcacacacctggggagcccctctgcccagagggagcacaggcagaacacagcatcaccagggtcaccagtgaacagccatctaccggggagcccaaagcagaaccggagcacgtccacacaggtagtgttctgggcaggcatcctgcaggcccagatgtgtgtcctagacctggaggaggagctggagaagacggaagggctcaaggctgggctgaaatgctgtctccccacgccccctgtggacctccccggggacacgggcctgcactccagcccacctgagaatgaagactcaggggaagacagcagtgagcctgagggagagggccaggcatggctgagagagggaaccccagactcttccccacagtggggagctgaggaggagagcatgttcttcagcaaccccctcttcctggcgagtccttgctcagagaacagtgcttctggagagtgcttttcctggggggcttcagactcccatgcaggtgtgaggactggacctgagagcccagcgactctggagcctcccctcccagaagacacagtgctgtgggagctggaaagtgagccagatttgggggacggcgctgctatcagtgggcattgtacccctccattccctgtgcccatctataaaccacactccatctgctgggcctcagtggctgccgctgagggggctcctgcagcacctcctggtcacggggagagtgagggagataggcttggtcctgctccatctgcagcaccgtgtgtggacgaagcattgacctgggaatcaggatgtgtcggatctgatcttggccctgctgcacatcctgtgcaaccttgggcctctctcagccctgagggctggcagagaggaggtcctttttggccccaggtgactcttaactcccaggacagagatgagagggagggtggacacccccaggaatctcttccctgcaccttggccccctgcccctggaggagcccagcttcttctccagagcctagcagcccagaatctgagagcagaggccctggtcccaggcccagccctgcatcgtcccaggagggcagcccgcagcttcaacaccacagctcaggcattttgcccaagtggacactagatgcttcacagtcttcactcttggagacggatggggaacagccaagttccttgaagaaaaaggaggcaggggaggccccaaaaccaggcgaggaagtaaagagtgaaggaacagccaggcctgcagagactggagacgtccagcctgacattcacctgacttctgcagaacatgagaatctgaggacaccgatgaactcttcttggcttcctgggagccctatgccccaagcacagtccccagaggaaggccagagaccaccagctggagacaagctagctaatggcgtcaggaacaacaaggtagcctggaacttggcctcacgcctctatcgcctggagggcttccggaagtctgaagtggctgcctacctgcagaagaacaatgactttagcagggctgtggctgaggagtacctgtccttcttccagtttggaggccagagtctggaccgagccctccggagcttcctccaggccttggtgctcagtggggagactcaggaacgggagcgaatcctctaccagttctccagacgcttccaccattgcaatccggggatcttcccctcagtagattctgtacacaccttgacatgtgcaatcatgctgcttaacacggacctgcatggacagaacattgggaagagcatgagctgccaggaattcataaccaacctgaatgggctgagggatggcgggaacttccccaaggagctgctgaaggccctctactggtctatccgcagcgagaagctcgagtgggccgtggatgaagaagacacagccagacctgagaaggcccagccgtccctgccagctggcaagatgagcaagcccttccttcagctggctcaggatcccacagtgcccacctacaagcagggcatcctggctcggaaaatgcatcaagatgcagacggcaagaagacgccatggggcaagcgtggctggaagatgttccacaccttactgcgagggatggttctctacttcctgaagcagggagaagaccactgtctggagggggagagcttggtggggcagatggtggatgagcccgtgggggtgcaccactcgctggccacccccgccacgcattacaccaagaagccgcacgtcttccagctgcgcacggctgactggcgcctctacctcttccaggcacccactgccaaggagatgagctcctggatcgcgcgcatcaacttggctgcggccacgcactccgcgccgcccttccccgccgctgtgggctcccagcgcagattcgtgcggcccatcctgcccgtgggccccgcccagagctccctggaggagcagcatcgatcccacgagaactgcctggacgctgccgcggacgacctgctggatctacagaggaacctgccggagcggcggggccgtggccgcgagctggaggagcaccgcctgcggaaggagtacctggagtacgagaaaacccgctacgagacctacgtgcagctgctggtggcccgcctgcactgcccctctgatgctctggacctgtgggaggagcagctggggagggaagctggaggcactcgggagcccaagctcagcctgaagaagtcccactcgagcccgtccctgcaccaggatgaggctcccaccacggccaaggtgaagcgcaacatctcagagcgcagaacctaccggaagatcatccctaagcggaaccgcaatcagctgtgaagccagcaccacctcagagacactgttccctgctccagggtagacctgagatgaacctccctggaggagacttatttcaatgagtccaccatgacggatgaggcacctcctttccctgctgaaggacaaaccttgtttccctgtggccctcattcttgtgctccctgaagctttcctaatattgctgtgctccccaccacccccatggcagtccctccgcagccccagtccctggccacgcccaagggaagagggaggtgaggacttgactttcctcccagagctcagcccatgtcaccctccaggccccagaatccagagtggcctcatttcctagacttgctgagaactcagcacttgtttgagaaccagtgcttatgtggtgtgcccttggcttctgggggagagcttggggcagcagaggcccctgggcagcccagccaggggagccacagccccaaggatggtcttgctctgggaattaggtgaccttcctggggaggccccaggagagtgaatcagggactcttgagaaattcctaaccagcctcctgtgacccagggagcagggtcgctaaggtcctgcccactgaggggacagccttctgggcagggacctcggggggcttcaagggctctgcacggctgtggggccctgtgcctttgtctccttgtgtctcctttcccccgaagtagatgaaacagtctcacatacccaactgctcatcaacagagcagagctgatggcatgagtgagggctgggcggggtggggcctccagagctttgcagggaaccctggaaccctaggaacaaggagcctttgttccaacagagcagagaaggaggttctctatgttcagaccactggagaggatagagaggtaaaaggtggcgacagtttcccttaggggtctgcctggcaggagccacagctcaggagagttgtgagggatgggacggaggctggcgaccaggcgaggcctaggccaggctcgggagacttttctgtgctcctttctacacatgccttaaaccttccttcctgtggggtgcctggaccccttccccatctctggcagctcagagggtctctgctgctctcccctgggaaatcccctcatcctgccctctggctgcctcccagctgggcttgttctctgagggaggttccggagactcatggacttggggctctgcctgtaggaaggaggctgggccggagggaccagccaccattgtctctgttcagccaagtgtgcaagtaggctgcccgccaagagggggcctctgctacccgctgctgcctgccggctgacacactgcctccccagccttcctgctaggccaccctcctcccttcccatgcttgtaaccagctctggggcttgcacctccacaaagtaaggttggcccttggaggccatgtttgggtctccggccagggcctagggctaggccatgcacccaatgggtgcacaataaataacaggtcaacaaagagggaggtgtgtcagtgtgtgaggaagggaggtcaggcagctaggaccacctgcagtgtggcaggcttcatccctctttgctccaagtgtgtatgtgtgtctgtgcatgtgtgtagtgtctgtgtctgtgtgttcatgcatatgcaggagtcacacggtcataggccatcaaagctggaggagacctcagaatcattcattcacctacttgctcatttattcattcattcattttgcagataatatgggacgctttctatgtgccagtaccaggggattcacaaatgaattaaacatgtccctgactccatgagttgacaa

SEQ ID NO: 174643 - DNA, 3171 bp, Artificial Sequence
  derived and/or modified sequence
atgatgggtgattaccgattgcctgaccaccctcagcccatggagattctcaatctgtaccttggcgacagtcttgagcctcatccaggggagtgcccacgggaaacatgcagtcacgaagacccccctgaaccattcgaggagcagacttgggcaactgatcctccggagcccacacggcagaacgttcctccatggggttccggggtggaactcacacatctgggatcttgggtgcatcaagatggccttgagccatgtcaagaacagacaagagctacagatccgcctgagtccaccagacaggatgcccctccctgggggtcaggtgtggagctgactcatttaggctccccttcagctcaaagggaacatcgccagaacaccgcctctcccggatcccccgtgaactcccatctgcccggttctcccaagcagaacaggagcacgtctacacaggttgtgttttgggccggaatcctgcaggctcagatgtgtgtgcttgacctggaggaagaactcgagaagaccgagggacttaaggcaggactgaagtgttgcctgcccactcctcccgtagacctacccggagataccggactccacagctcccctccagaaaacgaagacagcggcgaggactcctccgaacctgagggcgaggggcaggcttggctgagggaggggacccccgacagttcgccacagtggggggctgaagaagaaagcatgttcttctccaacccactgtttctggcatctccatgttcggagaacagtgcatctggggaatgcttctcctggggagccagtgacagccatgcaggagtgcgaaccgggcctgaatcacctgccacattggaacctcccctgccagaagacaccgtgttatgggaattagagtcagaaccagacttaggagacggggctgccattagtggacactgcaccccccctttcccggtgcccatatacaagccccacagtatctgctgggcatcagtggccgcagccgagggcgcacctgcagcccctcctggccatggggagagcgagggtgaccgattaggacccgctcctagtgctgctccctgcgtcgatgaggcgctcacttgggagtctggatgtgtcggctccgatctaggtcctgcagcccaccccgtacagccctgggcgagtctgagtcctgagggctggcaacgaggtggaccgttctggcctcaggtgactctcaattcccaagaccgggatgaacgtgaaggcggtcacccccaagagtcccttccctgtactctcgccccatgtccatggagatctcctgcttcaagtccggaaccttcgagccccgagtcagagagccggggtccgggaccgaggcctagccccgcatcttcccaggaaggtagcccccaactccaacatcacagcagcggaatactgcccaagtggacactggacgcctcccagagctccttgctggagacagacggggagcagccgagcagcttaaaaaagaaggaagccggagaagctccgaaacctggcgaggaggtgaagtcagaaggcactgcaagacctgccgagacaggggatgttcaaccagacatccatctgacaagtgccgaacatgaaaatctgcggacccctatgaacagcagctggctgccagggagtccaatgcctcaagcacagagccctgaagaaggacagaggccgccagcgggtgataagttggcaaacggagtgagaaataataaggtggcctggaacctggccagtaggctttaccggcttgaggggttcaggaaatcggaagtggcagcctaccttcagaaaaacaacgatttctctcgagccgttgcagaggagtatctgtccttttttcagtttgggggacaaagcctggatagggcgctcaggagctttctccaagccttggtgctttctggagagactcaggagagggagcggattctgtaccaatttagtaggaggttccaccactgcaacccgggtatctttcctagcgtggacagcgtacatactctcacctgcgcaatcatgctgttaaatacggacctgcatggccagaacattggtaagtcgatgtcttgccaagagtttatcaccaaccttaacggactcagggacggagggaactttcctaaggagctgctgaaagcactctattggagcatcaggtctgaaaagctagaatgggctgttgacgaagaggataccgcacgacctgagaaggctcagccatccttgcccgcaggaaaaatgagcaaaccgttccttcagctggctcaagacccaaccgtgccaacatacaagcaaggaatattagctcgtaaaatgcaccaggacgccgatggaaaaaaaacaccatgggggaagcgaggttggaagatgtttcataccctgttgcgaggaatggtcctatacttcctcaagcagggcgaagaccattgtctcgaaggagaatcactggtcggccagatggtggatgaacctgtgggcgtgcatcactccctggctactcccgctacacattatacaaagaagccacatgtatttcaactgaggactgcagattggcgtctgtatctgttccaggccccaacagcaaaggagatgtctagttggattgctcgaattaatctggctgcggcaacacactctgccccaccatttcctgcggctgtggggagccagaggagattcgtcaggcccatactacccgtgggccctgctcagagtagcctggaagaacagcatcggtcacacgaaaattgcttggacgctgccgcagacgacttattggacctccagaggaacttaccggaacgcaggggccgagggagagagttggaagaacaccgcctgcggaaggagtacttagagtacgagaaaacccgctacgagacctacgtgcagttgttggtggctcgactgcattgtccttctgacgctctagacctatgggaagaacagcttggccgagaggccggaggaactcgagaaccaaaactctcgctcaagaaaagtcacagtagtccaagtctccaccaagacgaagcccctacaactgccaaagtcaagcgtaatatctcagaacgcaggacataccggaaaatcatcccaaagagaaaccgaaaccagctgtag

SEQ ID NO: 174644 - DNA, 3171 bp, Artificial Sequence
  derived and/or modified sequence
atgatgggcgactacagactgcccgaccacccccagcccatggagatcctgaacctgtacctgggcgacagcctggagccccaccccggcgagtgccccagagagacctgcagccacgaggacccccccgagcccttcgaggagcagacctgggccaccgacccccccgagcccaccagacagaacgtgcccccctggggcagcggcgtggagctgacccacctgggcagctgggtgcaccaggacggcctggagccctgccaggagcagaccagagccaccgacccccccgagagcaccagacaggacgcccccccctggggcagcggcgtggagctgacccacctgggcagccccagcgcccagagagagcacagacagaacaccgccagccccggcagccccgtgaacagccacctgcccggcagccccaagcagaacagaagcaccagcacccaggtggtgttctgggccggcatcctgcaggcccagatgtgcgtgctggacctggaggaggagctggagaagaccgagggcctgaaggccggcctgaagtgctgcctgcccaccccccccgtggacctgcccggcgacaccggcctgcacagcagcccccccgagaacgaggacagcggcgaggacagcagcgagcccgagggcgagggccaggcctggctgagagagggcacccccgacagcagcccccagtggggcgccgaggaggagagcatgttcttcagcaaccccctgttcctggccagcccctgcagcgagaacagcgccagcggcgagtgcttcagctggggcgccagcgacagccacgccggcgtgagaaccggccccgagagccccgccaccctggagccccccctgcccgaggacaccgtgctgtgggagctggagagcgagcccgacctgggcgacggcgccgccatcagcggccactgcaccccccccttccccgtgcccatctacaagccccacagcatctgctgggccagcgtggccgccgccgagggcgcccccgccgccccccccggccacggcgagagcgagggcgacagactgggccccgcccccagcgccgccccctgcgtggacgaggccctgacctgggagagcggctgcgtgggcagcgacctgggccccgccgcccaccccgtgcagccctgggccagcctgagccccgagggctggcagagaggcggccccttctggccccaggtgaccctgaacagccaggacagagacgagagagagggcggccacccccaggagagcctgccctgcaccctggccccctgcccctggagaagccccgccagcagccccgagcccagcagccccgagagcgagagcagaggccccggccccagacccagccccgccagcagccaggagggcagcccccagctgcagcaccacagcagcggcatcctgcccaagtggaccctggacgccagccagagcagcctgctggagaccgacggcgagcagcccagcagcctgaagaagaaggaggccggcgaggcccccaagcccggcgaggaggtgaagagcgagggcaccgccagacccgccgagaccggcgacgtgcagcccgacatccacctgaccagcgccgagcacgagaacctgagaacccccatgaacagcagctggctgcccggcagccccatgccccaggcccagagccccgaggagggccagagaccccccgccggcgacaagctggccaacggcgtgagaaacaacaaggtggcctggaacctggccagcagactgtacagactggagggcttcagaaagagcgaggtggccgcctacctgcagaagaacaacgacttcagcagagccgtggccgaggagtacctgagcttcttccagttcggcggccagagcctggacagagccctgagaagcttcctgcaggccctggtgctgagcggcgagacccaggagagagagagaatcctgtaccagttcagcagaagattccaccactgcaaccccggcatcttccccagcgtggacagcgtgcacaccctgacctgcgccatcatgctgctgaacaccgacctgcacggccagaacatcggcaagagcatgagctgccaggagttcatcaccaacctgaacggcctgagagacggcggcaacttccccaaggagctgctgaaggccctgtactggagcatcagaagcgagaagctggagtgggccgtggacgaggaggacaccgccagacccgagaaggcccagcccagcctgcccgccggcaagatgagcaagcccttcctgcagctggcccaggaccccaccgtgcccacctacaagcagggcatcctggccagaaagatgcaccaggacgccgacggcaagaagaccccctggggcaagagaggctggaagatgttccacaccctgctgagaggcatggtgctgtacttcctgaagcagggcgaggaccactgcctggagggcgagagcctggtgggccagatggtggacgagcccgtgggcgtgcaccacagcctggccacccccgccacccactacaccaagaagccccacgtgttccagctgagaaccgccgactggagactgtacctgttccaggcccccaccgccaaggagatgagcagctggatcgccagaatcaacctggccgccgccacccacagcgccccccccttccccgccgccgtgggcagccagagaagattcgtgagacccatcctgcccgtgggccccgcccagagcagcctggaggagcagcacagaagccacgagaactgcctggacgccgccgccgacgacctgctggacctgcagagaaacctgcccgagagaagaggcagaggcagagagctggaggagcacagactgagaaaggagtacctggagtacgagaagaccagatacgagacctacgtgcagctgctggtggccagactgcactgccccagcgacgccctggacctgtgggaggagcagctgggcagagaggccggcggcaccagagagcccaagctgagcctgaagaagagccacagcagccccagcctgcaccaggacgaggcccccaccaccgccaaggtgaagagaaacatcagcgagagaagaacctacagaaagatcatccccaagagaaacagaaaccagctgtag

SEQ ID NO: 174645 - protein, 90 aa, Artificial Sequence
  derived and/or modified sequence
MDPLRAQQLAAELEVEMMADMYNRMTSACHRKCVPPHYKEAELSKGESVCLDRCVSKYLDIHERMGKKLTELSMQDEELMKRVQQSSGPA

SEQ ID NO: 174646 - DNA, 273 bp, Artificial Sequence
  derived and/or modified sequence
atggaccccctgagagcccagcagctggccgccgagctggaggtggagatgatggccgacatgtacaacagaatgaccagcgcctgccacagaaagtgcgtgcccccccactacaaggaggccgagctgagcaagggcgagagcgtgtgcctggacagatgcgtgagcaagtacctggacatccacgagagaatgggcaagaagctgaccgagctgagcatgcaggacgaggagctgatgaagagagtgcagcagagcagcggccccgcctag

SEQ ID NO: 174647 - DNA, 273 bp, Artificial Sequence
  derived and/or modified sequence
atggaccctctgagagcccagcagctcgccgccgagttagaggtcgaaatgatggctgatatgtacaaccgaatgacctccgcctgccacaggaagtgtgtacctccccactacaaggaagctgaactgtccaaaggcgagagcgtttgcctggatcggtgtgtgtccaagtacctcgacatacacgagaggatgggaaagaaacttaccgaactttccatgcaagatgaagaattgatgaaaagggtgcagcagtctagtggccctgcttag

SEQ ID NO: 174648 - DNA, 273 bp, Artificial Sequence
  derived and/or modified sequence
atggaccccctgcgcgcccagcaactcgcggccgagctggaggtcgaaatgatggctgacatgtataaccgaatgaccagcgcatgtcaccgtaagtgcgtgcccccccactataaggaggcggagctgagtaaaggggaatccgtatgtttggacaggtgcgtgagcaagtatttggacatccatgaaaggatggggaaaaagctcacagaattgtccatgcaggatgaggagctgatgaagcgcgttcaacaatctagcggccccgcgtag

SEQ ID NO: 174649 - DNA, 273 bp, Artificial Sequence
  derived and/or modified sequence
atggatcctttgagagcgcagcaattggccgcagaactggaggtggagatgatggctgatatgtacaatcgtatgacttcagcttgtcatcgcaagtgcgtgcctccccactacaaagaggccgagctgagcaagggagagagtgtgtgtttggatagatgcgtgtcaaagtatctcgatatccatgagcggatgggaaaaaaactcaccgaattgagtatgcaggatgaggaactgatgaagagagtccaacagtcatccgggcccgcctag

SEQ ID NO: 174650 - DNA, 273 bp, Artificial Sequence
  derived and/or modified sequence
atggaccccctgcgggcccagcagctggccgctgagctggaggtggagatgatggctgacatgtacaacaggatgaccagcgcctgccacaggaaatgtgtgcccccccactacaaggaggccgagctgagcaaaggagagagcgtgtgcctggacagatgtgtgtccaagtacctggacatccacgagaggatgggcaagaagctgacagagctgtccatgcaggatgaggagctgatgaagagggtgcagcagagcagcggccctgcctag

SEQ ID NO: 174651 - DNA, 273 bp, Artificial Sequence
  derived and/or modified sequence
atggaccccctgcgggcccagcagctggccgccgagctggaggtggaaatgatggctgatatgtacaaccggatgacttcagcgtgtcaccgaaaatgcgtccccccacactataaggaggccgagctctcaaaaggggaaagtgtgtgccttgaccggtgtgtatcaaagtatctcgatattcatgagaggatgggaaaaaagctgaccgagttgagcatgcaggacgaagagctgatgaaaagggtacagcagtccagtggccctgcttag

SEQ ID NO: 174652 - DNA, 273 bp, Artificial Sequence
  derived and/or modified sequence
atggaccccctgcgggcccagcagctggccgccgagctggaggtggagatgatggccgatatgtataataggatgacatctgcttgtcaccgtaaatgcgtccccccgcattataaggaggcagaactatctaagggagagtcagtctgtttggatcggtgcgtgagcaaatatttagatatacacgagcgtatgggaaaaaaacttactgaactaagcatgcaggatgaggagttgatgaagcgagtgcaacagtcatcagggcctgcttag

SEQ ID NO: 174653 - DNA, 273 bp, Artificial Sequence
  derived and/or modified sequence
atggaccccctgcgggcccagcagctggccgccgagctggaggtggaaatgatggctgacatgtacaatcgaatgacatctgcctgccatcggaagtgtgtcccccctcactataaggaggctgagctgagcaaaggcgaatcggtgtgcttagaccgctgtgtgtcgaagtatctggatattcatgaacggatgggaaaaaagctcactgagctttccatgcaggacgaagagctgatgaaacgcgttcagcagtctagtgggcctgcatag

SEQ ID NO: 174654 - DNA, 273 bp, Artificial Sequence
  derived and/or modified sequence
atggacccattgcgagctcaacaactcgcagctgagctcgaggtagaaatgatggccgacatgtataataggatgacctcagcctgccaccgcaaatgtgtgccacctcattacaaggaggccgaactttctaagggggaatccgtttgcctagacagatgtgtgagtaagtatctcgacattcatgagaggatgggaaagaagctgaccgagctgtctatgcaggatgaggaactcatgaaaagggtgcagcagtcctcaggccctgcgtag

SEQ ID NO: 174655 - DNA, 273 bp, Artificial Sequence
  derived and/or modified sequence
atggatccactgcgcgcacagcagcttgctgctgagcttgaagtcgagatgatggccgatatgtacaaccggatgacttctgcctgccaccggaagtgtgtacccccacattacaaagaagccgagttgagcaaaggggaaagtgtctgccttgaccggtgcgtaagtaaatacctggacatccacgagcgcatgggcaagaaactgacagaactgtccatgcaagatgaggagctcatgaaacgggtgcaacagtcatccggccctgcctag

SEQ ID NO: 174656 - DNA, 273 bp, Artificial Sequence
  derived and/or modified sequence
atggaccccctgcgtgcgcagcaacttgccgcagaactcgaggtggagatgatggccgatatgtacaatcgtatgaccagtgcgtgtcaccggaagtgcgtacccccacactacaaagaagccgagctctctaagggggaatcagtttgtctggaccgctgcgtgtccaaatacctggatatccacgagcgcatgggtaagaaactcacggagttgtctatgcaggatgaagaactgatgaaacgagtgcagcaaagctccggacccgcatag

SEQ ID NO: 174657 - DNA, 680 bp, Artificial Sequence
  derived and/or modified sequence
ggaagtaacccacgtgcttccgctggagcctctcgggaggcgggtaacgttatagtatttgtcagaagttggggtctccgtgggcattgtgatccgtcccaggcagtggattaggaggccagaaggagatcccttccacggtgctaggctgagatggatcctctcagggcccaacagctggctgcggagctggaggtggagatgatggccgatatgtacaacagaatgaccagtgcctgccaccggaagtgtgtgcctcctcactacaaggaagcagagctctccaagggcgagtctgtgtgcctggaccgatgtgtctctaagtacctggacatccatgagcggatgggcaaaaagttgacagagttgtctatgcaggatgaagagctgatgaagagggtgcagcagagctctgggcctgcatgaggtccctgtcagtatacaccctggggtgtaccccaccccttcccactttaataaacgtgctccctgttgggtgtcatctgtgaagactgccaggcctaggctctctgtagagagtcttcaagatcccggagtggtagcgctgtctcctggtgaaggagtatttgtcacactggaatgtgactgtgtgtgtatgtatgtgtatatatatatatatatatatatatatatatataaacaagtttgttgacacctac

SEQ ID NO: 174658 - DNA, 530 bp, Artificial Sequence
  derived and/or modified sequence
ctcgggaggcgggtaacgttatagtatttgtcagaagttggggtctccgtgggcattgtgatccgtcccaggcagtgccccaggggtaggagagtgaacggcggcggtgggtgctgatggtgatgtctgctcccaggattaggaggccagaaggagatcccttccacggtgctaggctgagatggatcctctcagggcccaacagctggctgcggagctggaggtggagatgatggccgatatgtacaacagaatgaccagtgcctgccaccggaagtgtgtgcctcctcactacaaggaagcagagctctccaagggcgagtctgtgtgcctggaccgatgtgtctctaagtacctggacatccatgagcggatgggcaaaaagttgacagagttgtctatgcaggatgaagagctgatgaagagggtgcagcagagctctgggcctgcatgaggtccctgtcagtatacaccctggggtgtaccccaccccttcccactttaataaacgtgctccctgttgggtgtca

SEQ ID NO: 174659 - DNA, 486 bp, Artificial Sequence
  derived and/or modified sequence
gcgagtttgaatcaaagaagaggcgggactttcctcccggaagtaacccacgtgcttccgctggagcctctcgggaggattaggaggccagaaggagatcccttccacggtgctaggctgagatggatcctctcagggcccaacagctggctgcggagctggaggtggagatgatggccgatatgtacaacagaatgaccagtgcctgccaccggaagtgtgtgcctcctcactacaaggaagcagagctctccaagggcgagtctgtgtgcctggaccgatgtgtctctaagtacctggacatccatgagcggatgggcaaaaagttgacagagttgtctatgcaggatgaagagctgatgaagagggtgcagcagagctctgggcctgcatgaggtccctgtcagtatacaccctggggtgtaccccaccccttcccactttaataaacgtgctccctgttgggtgtcatctgtgaagactgcc

SEQ ID NO: 174660 - protein, 83 aa, Artificial Sequence
  derived and/or modified sequence
MAELGEADEAELQRLVAAEQQKAQFTAQVHHFMELCWDKCVEKPGNRLDSRTENCLSSCVDRFIDTTLAITSRFAQIVQKGGQ

SEQ ID NO: 174661 - protein, 98 aa, Artificial Sequence
  derived and/or modified sequence
MRKHSCRKVASLRRTMAELGEADEAELQRLVAAEQQKAQFTAQVHHFMELCWDKCVEKPGNRLDSRTENCLSSCVDRFIDTTLAITSRFAQIVQKGGQ

SEQ ID NO: 174662 - DNA, 252 bp, Artificial Sequence
  derived and/or modified sequence
atggccgagctgggcgaggccgacgaggccgagctgcagagactggtggccgccgagcagcagaaggcccagttcaccgcccaggtgcaccacttcatggagctgtgctgggacaagtgcgtggagaagcccggcaacagactggacagcagaaccgagaactgcctgagcagctgcgtggacagattcatcgacaccaccctggccatcaccagcagattcgcccagatcgtgcagaagggcggccagtag

SEQ ID NO: 174663 - DNA, 297 bp, Artificial Sequence
  derived and/or modified sequence
atgagaaagcacagctgcagaaaggtggccagcctgagaagaaccatggccgagctgggcgaggccgacgaggccgagctgcagagactggtggccgccgagcagcagaaggcccagttcaccgcccaggtgcaccacttcatggagctgtgctgggacaagtgcgtggagaagcccggcaacagactggacagcagaaccgagaactgcctgagcagctgcgtggacagattcatcgacaccaccctggccatcaccagcagattcgcccagatcgtgcagaagggcggccagtag

SEQ ID NO: 174664 - DNA, 252 bp, Artificial Sequence
  derived and/or modified sequence
atggctgagctgggggaagccgacgaggctgagctgcagagactggtcgcagccgagcaacagaaggcccagtttactgcccaggtgcaccattttatggaactgtgttgggataagtgcgtggagaagccgggcaaccggctggattcacgaactgaaaattgcttgagttcatgcgtagatcgttttatagatacgaccctcgccattaccagcagattcgctcagattgtccaaaaaggcggtcagtag

SEQ ID NO: 174665 - DNA, 297 bp, Artificial Sequence
  derived and/or modified sequence
atgcgcaagcatagctgtaggaaggtggcaagcctacggcgtaccatggccgaacttggcgaggccgatgaggcagaactgcagaggctcgtggcggccgaacagcagaaagcgcagtttaccgctcaagtgcaccacttcatggagttatgttgggataagtgtgtcgagaaacccggaaatcggctggactcacgcacagagaactgtctcagctcgtgcgtcgatcgtttcattgacacaactctcgcaatcacctcaagattcgcgcaaattgtgcagaaaggggggcaatag

SEQ ID NO: 174666 - DNA, 252 bp, Artificial Sequence
  derived and/or modified sequence
atggccgagctgggggaggctgatgaggccgagctgcagaggctggtggccgctgagcagcagaaggcccagttcaccgcccaggtgcaccacttcatggagctgtgctgggacaagtgtgtggagaagccaggcaaccggctggacagcaggacagagaactgcctgagcagctgtgtggaccgcttcatcgacaccaccctggccatcaccagcagatttgcccagatcgtgcagaagggcggccagtag

SEQ ID NO: 174667 - DNA, 297 bp, Artificial Sequence
  derived and/or modified sequence
atgaggaagcacagctgcaggaaggtggccagcctgcggaggaccatggccgagctgggggaggctgatgaagctgagctgcagaggctggtggccgctgagcagcagaaggcccagttcaccgcccaggtgcaccacttcatggagctgtgctgggacaagtgtgtggagaagccaggcaaccggctggacagcaggacagagaactgcctgagcagctgtgtggaccgcttcatcgacaccaccctggccatcaccagcagatttgcccagatcgtgcagaagggcggccagtag

SEQ ID NO: 174668 - DNA, 252 bp, Artificial Sequence
  derived and/or modified sequence
atggccgagctgggcgaggccgacgaggccgagctgcagcggctggtggcggctgagcaacagaaggctcaattcacagcccaggtccatcattttatggagctgtgttgggataagtgtgtcgaaaaacctggaaacagactggactcaagaacggaaaactgcttgtcttcctgtgtggatcggtttattgatactacgctggccatcacctccaggtttgcacagatagtccaaaaaggtggacagtag

SEQ ID NO: 174669 - DNA, 297 bp, Artificial Sequence
  derived and/or modified sequence
atgcggaagcacagctgccggaaggtggccagcctgcggcggaccatggccgagctcggggaggcagatgaagctgagttgcagaggcttgtggctgccgagcaacagaaagcccagttcacagcccaggtccatcatttcatggaactttgctgggataagtgtgtcgagaagccagggaatcgactggattcgcgcacagaaaattgtctttccagctgtgtcgatcggttcatagatactacactcgctattacttcccgattcgcccagatagtgcaaaagggcggccagtag

SEQ ID NO: 174670 - DNA, 252 bp, Artificial Sequence
  derived and/or modified sequence
atggctgaactgggagaggcggacgaggccgagctgcagcgcctggtggccgcagagcagcagaaagcacaatttactgcccaggttcatcattttatggagctctgttgggataaatgcgtagagaagcccggaaaccggctggactcacgtactgaaaactgcttgtccagctgcgttgatcgcttcatcgacacaactcttgccatcacctccagatttgcccaaatcgttcagaagggagggcagtag

SEQ ID NO: 174671 - DNA, 297 bp, Artificial Sequence
  derived and/or modified sequence
atgagaaaacattcatgcaggaaggttgccagcctcagacggaccatggccgaactgggtgaagctgatgaggcggaactgcagcgcctcgtcgccgctgaacaacagaaagcacagtttaccgctcaggttcatcactttatggaactgtgctgggacaagtgcgtggaaaaacctggcaatcggctcgacagtaggacggagaactgtctgtcgagctgcgtggaccggttcattgataccactctggctataaccagcagatttgcacaaatcgtacagaagggtggccagtag

SEQ ID NO: 174672 - DNA, 819 bp, Artificial Sequence
  derived and/or modified sequence
tcgagaggcggtgcacacccgtcgcgcatgcgcaaacacagctgtcggaaggtggcgagcctgaggcgaacaatggcggagctgggcgaagccgatgaagcggagttgcagcgcctggtggccgccgagcagcagaaggcgcagtttactgcacaggtgcatcacttcatggagttatgttgggataaatgtgtggagaagccagggaatcgcctagactctcgcactgaaaattgtctctccagctgtgtagaccgcttcattgacaccactcttgccatcaccagtcggtttgcccagattgtacagaaaggagggcagtaggccatcccccaggagaatgacagaagcaaaggacttgttactaagcagatttaagggtcagtgggggaaggctatcaacccattgtcagatcagcatcaggctgttatcaagtctgttggtgctaaaaagtaaaagatgaaatgttcaaagagtgaaatttatttatttggaattcagaaattccaggttgtatgacatcagttactcaataagtgtgaattctccaactcttcttttaatcccattttagaatttaatatagagatctctgattggcaggaacactagaaataaatgttccatggccagtagtgcaaatgggggattgtaggttttgaaaaaccaccctaagccatattaagggggttggaagaaccatcgaagcctaaggcatagaagaaaatttggggttaagaaagatgaagaacaaaaaacagctttattgcttatacatgaccaagaaaaggaaaacatggcaaaaaaaaaaaaaaaaa

SEQ ID NO: 174673 - DNA, 805 bp, Artificial Sequence
  derived and/or modified sequence
aagtcgagaggcggtgcacacccgtcgcgcatgcgcaaacacagctgtcggaaggtggcgagcctgaggcgaacaatggcggagctgggcgaagccgatgaagcggagttgcagcgcctggtggccgccgagcagcagaaggcgcagtttactgcacaggtgcatcacttcatggagttatgttgggataaatgtgtggagaagccagggaatcgcctagactctcgcactgaaaattgtctctccagctgtgtagaccgcttcattgacaccactcttgccatcaccagtcggtttgcccagattgtacagaaaggagggcagtaggccatcccccaggagaatgacagaagcaaaggacttgttactaagcagatttaagggtcagtgggggaaggctatcaacccattgtcagatcagcatcaggctgttatcaagtctgttggtgctaaaaagtaaaagatgaaatgttcaaagagtgaaatttatttatttggaattcagaaattccaggttgtatgacatcagttactcaataagtgtgaattctccaactcttcttttaatcccattttagaatttaatatagagatctctgattggcaggaacactagaaataaatgttccatggccagtagtgcaaatgggggattgtaggttttgaaaaaccaccctaagccatattaagggggttggaagaaccatcgaagcctaaggcatagaagaaaatttggggttaagaaagatgaagaacaaaaaacagctttattgcttatacatgaccaagaaaaggaaaacatggc

SEQ ID NO: 174674 - protein, 354 aa, Artificial Sequence
  derived and/or modified sequence
MATPLVAGPAALRFAAAASWQVVRGRCVEHFPRVLEFLRSLRAVAPGLVRYRHHERLCMGLKAKVVVELILQGRPWAQVLKALNHHFPESGPIVRDPKATKQDLRKILEAQETFYQQVKQLSEAPVDLASKLQELEQEYGEPFLAAMEKLLFEYLCQLEKALPTPQAQQLQDVLSWMQPGVSITSSLAWRQYGVDMGWLLPECSVTDSVNLAEPMEQNPPQQQRLALHNPLPKAKPGTHLPQGPSSRTHPEPLAGRHFNLAPLGRRRVQSQWASTRGGHKERPTVMLFPFRNLGSPTQVISKPESKEEHAIYTADLAMGTRAASTGKSKSPCQTLGGRALKENPVDLPATEQKE

SEQ ID NO: 174675 - DNA, 1065 bp, Artificial Sequence
  derived and/or modified sequence
atggccacccccctggtggccggccccgccgccctgagattcgccgccgccgccagctggcaggtggtgagaggcagatgcgtggagcacttccccagagtgctggagttcctgagaagcctgagagccgtggcccccggcctggtgagatacagacaccacgagagactgtgcatgggcctgaaggccaaggtggtggtggagctgatcctgcagggcagaccctgggcccaggtgctgaaggccctgaaccaccacttccccgagagcggccccatcgtgagagaccccaaggccaccaagcaggacctgagaaagatcctggaggcccaggagaccttctaccagcaggtgaagcagctgagcgaggcccccgtggacctggccagcaagctgcaggagctggagcaggagtacggcgagcccttcctggccgccatggagaagctgctgttcgagtacctgtgccagctggagaaggccctgcccaccccccaggcccagcagctgcaggacgtgctgagctggatgcagcccggcgtgagcatcaccagcagcctggcctggagacagtacggcgtggacatgggctggctgctgcccgagtgcagcgtgaccgacagcgtgaacctggccgagcccatggagcagaaccccccccagcagcagagactggccctgcacaaccccctgcccaaggccaagcccggcacccacctgccccagggccccagcagcagaacccaccccgagcccctggccggcagacacttcaacctggcccccctgggcagaagaagagtgcagagccagtgggccagcaccagaggcggccacaaggagagacccaccgtgatgctgttccccttcagaaacctgggcagccccacccaggtgatcagcaagcccgagagcaaggaggagcacgccatctacaccgccgacctggccatgggcaccagagccgccagcaccggcaagagcaagagcccctgccagaccctgggcggcagagccctgaaggagaaccccgtggacctgcccgccaccgagcagaaggagtag

SEQ ID NO: 174676 - DNA, 423 bp, Artificial Sequence
  derived and/or modified sequence
atggagcagaaccccccccagcagcagagactggccctgcacaaccccctgcccaaggccaagcccggcacccacctgccccagggccccagcagcagaacccaccccgagcccctggccggcagacacttcaacctggcccccctgggcagaagaagagtgcagagccagtgggccagcaccagaggcggccacaaggagagacccaccgtgatgctgttccccttcagaaacctgggcagccccacccaggtgatcagcaagcccgagagcaaggaggagcacgccatctacaccgccgacctggccatgggcaccagagccgccagcaccggcaagagcaagagcccctgccagaccctgggcggcagagccctgaaggagaaccccgtggacctgcccgccaccgagcagaaggagtag

SEQ ID NO: 174677 - DNA, 1065 bp, Artificial Sequence
  derived and/or modified sequence
atggctacacctctggtggctgggcccgcagctctgagattcgccgccgcagcatcctggcaggtggtgagaggccgttgtgtcgagcatttcccacgtgtcttagagttcttgaggtctcttcgggctgtggcgcccggccttgttcggtatcgacaccatgagagattatgcatggggctgaaggcaaaggtagtcgtcgaacttattttgcagggtaggccatgggcacaggttctgaaggcccttaatcatcactttccagagagcggcccaatagttcgagaccccaaggccacaaaacaagacctaaggaagatcttggaggcacaggagacgttctaccagcaggttaagcagctgagtgaggcacctgtggaccttgcttcgaagttgcaggaactggagcaggaatacggagagcccttcctggcagccatggaaaagctgctcttcgagtacttgtgccaactcgaaaaggcactgcctacaccccaggcacagcagttgcaggacgttctgtcatggatgcagcctggggtgtccatcactagctcgttagcttggaggcagtacggggtcgacatgggatggctgcttcctgagtgctccgttactgacagtgtcaatctggcagagccgatggaacagaaccccccccaacagcagcggcttgcgttacataacccattgcctaaggccaaacctggtacccatttgccacagggcccctcttcccgcacccaccccgaaccgctggctggacggcacttcaacctggcccccctgggcagaaggcgtgtacaatcacagtgggcaagcactcgggggggtcacaaagagcgcccgaccgtaatgctgtttccctttagaaacctcggctcaccaacacaggtaatctcaaagccggaaagcaaagaggaacacgcaatatataccgccgatctggctatgggcacaagagccgctagtaccgggaaatctaagagcccctgccagacgctcgggggtcgcgcactgaaggagaacccagtagatcttcctgctaccgaacaaaaagagtag

SEQ ID NO: 174678 - DNA, 423 bp, Artificial Sequence
  derived and/or modified sequence
atggaacaaaaccccccgcaacagcagagactcgcgcttcataatcccctcccgaaggcaaagccaggaactcatttgccacagggtccaagtagccgtacgcaccccgaaccactcgcaggcaggcactttaacctggcaccattgggacggcggcgcgtgcagtcccaatgggcaagcaccagggggggacacaaggagcggcccactgtaatgctctttcctttcaggaacctcggaagtccaacacaggtaatcagcaagccagagtctaaggaggagcacgctatctacacagccgacctggcaatgggtacaagggccgcatctacggggaaatctaagtccccttgccagacactcggcggacgcgccctgaaggaaaatccagttgacctacccgcaacagaacagaaggagtag

SEQ ID NO: 174679 - DNA, 1065 bp, Artificial Sequence
  derived and/or modified sequence
atggccacccccctggtggccggccctgctgccctgcgctttgctgctgctgcctcctggcaggtggtgcggggccgctgtgtggagcacttcccccgggtgctggagttcctgcggagcctgcgggctgtggcccctggcctggtgcgctaccgccaccacgagcggctgtgcatgggcctgaaggccaaggtggtggtggagctgatcctgcagggccggccctgggcccaggtgctgaaggccctgaaccaccacttccctgagagcggccccatcgtgcgggaccccaaggccaccaagcaggacctgaggaagatcctggaggcccaggagaccttctaccagcaggtgaagcagctgtctgaggcccctgtggacctggccagcaagctgcaggagctggagcaggagtatggagagcccttcctggccgccatggagaagctgctgtttgagtacctgtgccagctggagaaggccctgcccaccccccaggcccagcagctgcaggatgtgctgtcctggatgcagcccggggtgtccatcaccagcagcctggcctggaggcagtatggagtggacatgggctggctgctgcctgagtgcagcgtgacagacagcgtgaacctggccgagcccatggagcagaaccccccccagcagcagaggctggccctgcacaaccccctgcccaaggccaagccaggcacccacctgccccagggccccagcagcaggacccaccctgagcccctggccggccgccacttcaacctggcccccctgggcagaagaagagtgcagagccagtgggccagcacccggggcggccacaaggagcggcccaccgtgatgctgttccccttcaggaacctgggcagccccacccaggtgatcagcaagccagagagcaaggaggagcacgccatctacacagctgacctggccatgggcacccgggccgccagcacaggcaagagcaagagcccctgccagaccctgggcggccgggccctgaaggagaaccctgtggacctgcctgccacagagcagaaggagtag

SEQ ID NO: 174680 - DNA, 423 bp, Artificial Sequence
  derived and/or modified sequence
atggagcagaaccccccccagcagcagaggctggccctgcacaaccccctgcccaaggccaagccaggcacccacctgccccagggccccagcagcaggacccaccctgagcccctggccggccgccacttcaacctggcccccctgggcagaagaagagtgcagagccagtgggccagcacccggggcggccacaaggagcggcccaccgtgatgctgttccccttcaggaacctgggcagccccacccaggtgatcagcaagccagagagcaaggaggagcacgccatctacacagctgacctggccatgggcacccgggccgccagcacaggcaagagcaagagcccctgccagaccctgggcggccgggccctgaaggagaaccctgtggacctgcctgccacagagcagaaggagtag

SEQ ID NO: 174681 - DNA, 1065 bp, Artificial Sequence
  derived and/or modified sequence
atggccacccccctggtggccggccccgccgccctgcggttcgccgccgccgcgagctggcaggttgttagaggaagatgcgttgagcattttcctagagtcttggaatttcttcgttctttacgcgccgtggcccccggacttgttagatataggcatcacgaacgcctgtgcatgggcctgaaagccaaggtggtggtcgagttgatacttcagggtaggccctgggcacaggtcctcaaagctcttaaccatcatttcccggagtcaggacctatcgtgagagatccaaaggcaaccaagcaagacctacggaagatcttggaggcccaagagaccttttatcagcaggtcaagcagcttagtgaagctccagtggacctggctagcaaactgcaggagcttgagcaggagtatggcgagccattccttgccgccatggagaagctgctgtttgaatacctctgtcagctggagaaagcactgcccactccccaggcccagcagttacaggacgtcctttcatggatgcagccaggggtgagtattacctcaagcctggcctggaggcagtacggtgtcgacatgggatggttgttgcccgaatgctcagtgaccgattccgtgaacctggctgaacccatggagcagaaccctccacagcaacagaggcttgctctccataaccccttacctaaagccaagcctggtacccatctgccacagggaccctcctcccgcacacatcccgaacccctggctgggaggcactttaaccttgccccattggggcgccgccgcgttcagagccagtgggcctcaactagagggggccataaggagagacccaccgtaatgttatttcccttccgaaacttaggttcccccactcaggttatcagtaagcccgaaagcaaggaggagcatgccatctatacagctgatctggcaatgggcacaagagcggcttccacaggtaaatctaaaagtccttgccagacactgggtggcagagcactgaaggaaaacccggtggacctgccagccactgaacagaaggagtag

SEQ ID NO: 174682 - DNA, 423 bp, Artificial Sequence
  derived and/or modified sequence
atggagcagaaccccccccagcagcagcggctggccctgcacaaccctttacctaaggccaaaccagggactcacctacctcagggccccagctctaggacccacccagagccactggccggtcgccatttcaacctggctcccttaggtagacgcagggtgcagagccagtgggcttccaccaggggaggtcacaaagagcggcctaccgtgatgttgtttccattcaggaacttaggaagtcctacacaggtaatcagtaagcccgaaagcaaagaagagcacgctatctacactgccgaccttgctatgggcacacgcgcggcctcaacaggcaaatcaaaatccccctgccagactctagggggccgagccttgaaggaaaatcccgttgatctgccagccaccgaacagaaggaatag

SEQ ID NO: 174683 - DNA, 1065 bp, Artificial Sequence
  derived and/or modified sequence
atggctactcctctggtggctggccctgccgcactacgcttcgcagccgctgcatcatggcaggtggtcaggggccgttgcgtggagcattttcctcgagtccttgagtttcttagatctcttcgagcagtcgcaccagggcttgtgcgctacagacaccacgagcggttgtgcatggggctgaaagctaaagtggtggtcgagctgatccttcagggcaggccctgggcccaagtacttaaagcactcaaccaccactttcctgagtcagggcctatagtgagagaccctaaggccacaaagcaagatttgaggaaaattctagaagctcaagagaccttctatcagcaagttaaacagcttagcgaggcaccagtggaccttgcctccaaattgcaggagctcgagcaggagtatggtgagccattcctagcggctatggagaaattactgtttgagtatctgtgtcaacttgagaaggcccttccaaccccccaggctcaacagctccaagatgtgctgtcttggatgcaacctggagtctcaatcactagcagcttagcctggcgacagtatggtgtcgacatgggctggctgttgcctgagtgcagtgttaccgacagcgtcaatctggcggagcccatggagcagaacccaccacagcagcagcggctggctcttcacaaccctctaccaaaggcaaagcccggaacgcacctaccacaagggcctagctcaaggactcatccagagcccctggcaggacgccactttaacctggcccctcttgggcgacggcgagtgcagtcccagtgggctagcacaagaggcggacataaagaaaggccaacagtcatgctgtttcctttcagaaacctgggctctcccacccaagtcatcagcaaaccagaatccaaggaggaacatgctatctataccgccgacctggctatggggacacgggcagctagtacagggaaaagcaagtcaccctgtcagacactcgggggtagagccctaaaggaaaaccctgtggatctgccagccactgagcagaaagaatag

SEQ ID NO: 174684 - DNA, 423 bp, Artificial Sequence
  derived and/or modified sequence
atggagcaaaaccccccacagcagcagaggctggcactgcataacccactaccaaaggccaaacctggcactcacctcccacaaggcccttcatctaggactcaccctgagccactggctgggcgacacttcaacctggctccgctgggacggcgtcgcgttcaatctcaatgggcatcaactagaggcggacacaaggaaaggccaaccgtcatgttattcccctttcggaacctggggagccccacccaggttatttccaagccagagagcaaagaggagcatgccatatacactgctgacctggccatgggaacgagagccgctagcacaggcaaaagtaaatctccatgccaaacactcggcggaagagcactgaaggaaaatccggttgacttaccagcaacggaacaaaaggaatag

SEQ ID NO: 174685 - protein, 856 aa, Artificial Sequence
  derived and/or modified sequence
MGSLFRSETMCLAQLFLQSGTAYECLSALGEKGLVQFRDLNQNVSSFQRKFVGEVKRCEELERILVYLVQEINRADIPLPEGEASPPAPPLKQVLEMQEQLQKLEVELREVTKNKEKLRKNLLELIEYTHMLRVTKTFVKRNVEFEPTYEEFPSLESDSLLDYSCMQRLGAKLGFVSGLINQGKVEAFEKMLWRVCKGYTIVSYAELDESLEDPETGEVIKWYVFLISFWGEQIGHKVKKICDCYHCHVYPYPNTAEERREIQEGLNTRIQDLYTVLHKTEDYLRQVLCKAAESVYSRVIQVKKMKAIYHMLNMCSFDVTNKCLIAEVWCPEADLQDLRRALEEGSRESGATIPSFMNIIPTKETPPTRIRTNKFTEGFQNIVDAYGVGSYREVNPALFTIITFPFLFAVMFGDFGHGFVMFLFALLLVLNENHPRLNQSQEIMRMFFNGRYILLLMGLFSVYTGLIYNDCFSKSVNLFGSGWNVSAMYSSSHPPAEHKKMVLWNDSVVRHNSILQLDPSIPGVFRGPYPLGIDPIWNLATNRLTFLNSFKMKMSVILGIIHMTFGVILGIFNHLHFRKKFNIYLVSIPELLFMLCIFGYLIFMIFYKWLVFSAETSRVAPSILIEFINMFLFPASKTSGLYTGQEYVQRVLLVVTALSVPVLFLGKPLFLLWLHNGRSCFGVNRSGYTLIRKDSEEEVSLLGSQDIEEGNHQVEDGCREMACEEFNFGEILMTQVIHSIEYCLGCISNTASYLRLWALSLAHAQLSDVLWAMLMRVGLRVDTTYGVLLLLPVIALFAVLTIFILLIMEGLSAFLHAIRLHWVEFQNKFYVGAGTKFVPFSFSLLSSKFNNDDSVA

SEQ ID NO: 174686 - DNA, 2571 bp, Artificial Sequence
  derived and/or modified sequence
atggggtctctgttccggagtgaaacaatgtgccttgcgcagctgttcctgcagtctgggaccgcctatgagtgcctgtctgcccttggggaaaaaggactggttcaattcagagacttaaatcagaacgtctcttccttccagaggaaatttgttggcgaagtgaaacggtgcgaagagctggaacgcatcttagtgtatctggtgcaggagatcaaccgcgccgacattcccctacctgagggggaggcctctcccccagccccacctctcaagcaggtcttggagatgcaggagcagcttcagaaactagaggtggaactcagggaagtgaccaaaaataaggagaaactgcggaagaatctgctggagttgatagagtatacccacatgctgcgggttacaaagacgttcgtgaagagaaacgtggagtttgagccgacttacgaggagtttccctccttagagagcgattctttacttgattacagctgcatgcagagattaggcgcaaagctcggtttcgtgagcggtctcattaaccagggaaaggtggaggccttcgagaagatgctgtggagggtttgcaagggctacaccatcgtctcctacgcagaacttgatgaaagcctcgaagatccagagactggagaggttatcaaatggtacgtcttcctaatctctttttggggagagcagatagggcacaaagtcaaaaaaatttgcgactgctaccattgccacgtgtatccctatccaaatacggccgaagaacgcagggagatccaggaggggcttaatactcgaatccaagatctctataccgtattgcacaagacggaagactaccttcgtcaggtactgtgcaaggccgctgaaagcgtttatagtagagttatacaagtaaagaagatgaaggccatctaccacatgttaaatatgtgttccttcgatgtcacaaacaaatgtttgatcgctgaagtttggtgtcctgaagccgatctgcaggatcttagaagggcgctggaggagggatccagagagtccggcgcgacaatccctagcttcatgaatatcatccccaccaaagagacacccccaactagaataagaacgaacaagttcaccgaaggatttcagaatatagttgatgcctatggagtcggttcttaccgagaagtcaatccagccttgtttactatcattacttttcccttcctgtttgccgtgatgtttggtgattttgggcacggttttgtgatgtttctgttcgctttattactggtgcttaatgagaaccaccctcgtttgaatcaaagtcaggagatcatgaggatgttctttaacgggcgttatatcctgttgctcatggggctgttttccgtgtataccggactgatttacaatgactgcttcagcaagtcagtgaacctcttcgggagcgggtggaacgttagcgctatgtacagcagtagtcaccccccggccgagcacaaaaaaatggtgctgtggaatgactcagtggttcggcataactccatcctccagctggaccctagtatacccggagtgttcaggggcccatatccgttagggatcgaccccatctggaacctcgcaacaaaccgcttgaccttcctcaatagcttcaaaatgaagatgagcgtgatactgggcatcatacatatgacttttggggtgattctgggcatttttaaccatctccactttagaaaaaagtttaacatttacctagtgagcatccctgagctcctttttatgctgtgcatttttgggtacctgattttcatgatattttacaaatggcttgtcttttctgctgagacgtcaagagttgcgcctagcatcctgatagagtttattaatatgtttctctttcccgcgagtaaaacgagcgggctttacacaggtcaggaatacgtgcagagagtgctgctggtggtcactgctctgtctgtgcctgtgctttttctcggaaagcccctgtttttgttgtggctgcataatggtcgaagctgctttggcgtgaatagaagcggctacacgcttatccggaaggacagcgaggaggaagttagtctgttgggatcccaggacatagaagaggggaaccaccaggtagaagatggctgtcgggaaatggcctgtgaggaattcaatttcggggagatccttatgacgcaagtgatccattccatcgagtactgtctgggctgtatctcaaacacagcttcttatctccgcctgtgggcactgtcattggctcacgcgcagctgtccgacgtactgtgggcaatgctcatgcgcgttggcctcagggttgacactacgtatggagtgctactgctgctcccagtgattgccctatttgctgtgctcaccatttttatcctgctgatcatggaaggcttgtcggctttcctgcatgccattcgcctccattgggtagaattccagaataaattctacgtaggggcaggcactaaatttgtgccatttagcttttccttactgagttccaagtttaacaacgacgattctgttgcttag

SEQ ID NO: 174687 - DNA, 2571 bp, Artificial Sequence
  derived and/or modified sequence
atgggcagcctcttccgctctgagaccatgtgcctggcccagctgttcctgcagagcggcacagcctatgagtgcctgagcgccctgggggagaagggcctggtgcagttccgggacctgaaccagaatgtgagcagcttccagaggaagtttgtgggggaggtgaagagatgtgaggagctggagcgcatcctggtgtacctggtgcaggagatcaacagagctgacatccccctgcctgagggggaggccagccccccagccccacccctgaagcaggtgctggagatgcaggagcagctgcagaagctggaggtggagctgcgggaggtgaccaagaacaaggagaagctgaggaagaacctgctggagctgattgagtacacccacatgctgcgggtgaccaagacctttgtgaagagaaatgtggagtttgagcccacctatgaggagttccccagcctggagagtgacagcctgctggactacagctgcatgcagaggctgggcgccaagctgggctttgtgtctggcctcatcaaccagggcaaggtggaggcctttgagaagatgctgtggagggtgtgcaagggctacaccatcgtgtcctatgcagagctggatgagagcctggaggaccctgagaccggggaggtgatcaagtggtacgtgttcctgatctccttctggggcgagcagatcggccacaaggtgaagaagatctgtgactgctaccactgccacgtgtacccctaccccaacacagctgaggagcggcgggagatccaggagggcctgaacacccgcatccaggacctgtacacagtgctgcacaagacagaggactacctgcggcaggtgctgtgcaaggctgctgagagcgtgtacagcagggtcatccaggtgaagaagatgaaggccatctaccacatgctgaacatgtgcagctttgatgtgaccaacaagtgcctgattgctgaggtgtggtgcccagaggccgacctgcaggacctgcggcgggccctggaggagggcagccgggagagcggggccaccatccccagcttcatgaacatcatccccaccaaggagaccccacccacccgcatccgcaccaacaagttcacagagggcttccagaacatcgtggatgcctacggcgtgggcagctaccgggaggtgaacccagccctcttcaccatcatcaccttccccttcctgtttgctgtgatgtttggagactttggacatggctttgtgatgttcctgtttgccctgctgctggtgctgaatgaaaaccacccccggctgaaccagagccaggagatcatgaggatgttcttcaacggccgctacatcctgctgctgatgggcctcttctctgtgtacacaggcctcatctacaatgactgcttcagcaagtctgtgaacctgtttggaagtggctggaatgtgtctgccatgtacagcagcagccaccccccagctgagcacaagaagatggtgctgtggaatgattctgtggtgcgccacaacagcatcctgcagctggaccccagcatccctggggtcttccggggcccctaccccctgggcatcgaccccatctggaacctggccaccaaccggctgaccttcctgaacagcttcaagatgaagatgtctgtcatcctgggcatcatccacatgacctttggagtcatcctgggcatcttcaaccacctgcacttcaggaagaagttcaacatctacctggtgtccatccctgagctgctcttcatgctgtgcatcttcggctacctgatcttcatgatcttctacaagtggctggtgttttctgctgagaccagccgggtggcccccagcatcctgattgagttcatcaacatgttcctgtttcctgccagcaagaccagcggcctgtacacaggccaggagtatgtgcagagggtgctgctggtggtgacagccctgtctgtgcctgtgctcttcctgggcaagcccctcttcctgctgtggctgcacaacggccgcagctgctttggagtgaacagaagtggctacaccctcatcaggaaggacagcgaggaggaggtgtccctgctgggcagccaggacatcgaggagggcaaccaccaggtggaggatggctgccgggagatggcctgtgaggagttcaactttggagagatcctgatgacccaggtgatccacagcattgagtactgcctgggctgcatcagcaacacagccagctacctgcggctgtgggccctgagcctggcccacgcccagctgagtgatgtgctgtgggccatgctgatgagggtgggcctgcgggtggacaccacctatggagtgctgctgctgctgcccgtcatcgccctgtttgctgtgctgaccatcttcatcctgctgatcatggagggcctgagcgccttcctgcacgccatccggctgcactgggtggagttccagaacaagttctacgtgggcgccggcaccaagtttgtgcccttctccttcagcctgctgagcagcaagttcaacaatgatgacagcgtggcctag

SEQ ID NO: 174688 - DNA, 2571 bp, Artificial Sequence
  derived and/or modified sequence
atgggcagcctgttccggagcgagaccatgtgcctggcccagctgttcttgcaatctggtacagcttatgagtgtttgtctgccttgggtgagaaaggcctggtgcagttccgtgatttgaatcagaatgtttcatccttccagaggaaatttgttggggaggtcaagcggtgcgaagagttggaaaggatattggtgtacctcgtgcaggaaatcaatcgtgctgacatacctctgccagaaggagaggcctccccaccagcccccccccttaagcaagtgctggagatgcaggagcaattgcagaaacttgaggtggaactcagagaggtgacaaaaaataaggaaaaactccggaaaaaccttcttgaactcatcgagtatacccatatgctgagggtcactaagaccttcgtgaaacgaaacgtcgaatttgagccaacctacgaagagtttccctcactggagtccgatagcctgttggattacagctgtatgcagaggctgggcgctaagttaggattcgtgtccgggctgataaatcaaggcaaggtggaggcattcgagaaaatgctgtggcgtgtatgcaagggatacactatcgtgtcctacgctgagctcgacgagagtctggaggaccctgagacgggggaggtcataaagtggtacgtattcctgatctccttctggggggaacaaatcggacataaggtcaagaagatctgcgactgctaccattgtcacgtttatccatatcccaatactgctgaagagcggagggagatccaggagggattaaatactaggatccaggatctgtacaccgtcctgcacaaaactgaggactacctgagacaagtgctttgtaaagccgcagagagcgtctacagcagggtaatccaggtcaaaaaaatgaaagccatctaccacatgctgaatatgtgttcgttcgacgtcacgaacaagtgtctcatcgccgaagtctggtgtcccgaggccgacctacaggacttacggcgggctcttgaggagggcagtcgggagagcggggccacaataccatcctttatgaatataattcccacgaaggagaccccacctacaaggattagaacgaataaattcaccgaagggtttcagaatatcgttgacgcttacggagtgggctcctatcgcgaagttaaccccgcactgttcactatcatcacctttccctttctctttgccgtgatgtttggtgacttcggccatggcttcgtgatgtttttatttgcgctgctgctggttcttaatgaaaaccaccctcgactgaaccaatctcaggagattatgagaatgtttttcaatggacgctatattctcctgctgatgggcttgttcagtgtctacacaggcctgatatataatgactgcttcagtaagagcgtgaacctctttggttcaggctggaacgtgagcgccatgtattcctcatctcatcctcctgctgagcataagaagatggtgttatggaatgattccgtcgtacgccataactccatactccagctggatccctctattcctggcgtgtttcgaggaccatatcctcttggaatagacccaatctggaacctggccacaaatagactgacctttctgaacagcttcaagatgaagatgagcgtcattctggggatcattcatatgaccttcggcgttatattaggaatctttaatcacctgcactttaggaaaaagtttaacatctacctggtttctattcctgaattactgtttatgttatgcatctttggatatctcattttcatgattttttataaatggctggtttttagtgcggagacgagccgcgtggcaccttccattctcattgagtttataaacatgtttctattcccagcatctaaaacatctgggctctataccgggcaggaatacgtgcaacgcgttcttctggtggtgactgcgctaagcgtgccagtgctatttctggggaaaccactgtttctgttgtggctccacaacggtcgcagctgcttcggggtcaatcggtccggctacaccttgatcaggaaagacagtgaagaagaggtgtcactgctcggaagccaagacatagaagaaggcaaccatcaggtggaggacggctgccgggaaatggcatgcgaagagttcaatttcggcgaaattctcatgacccaggtgatccactcaattgaatactgcctgggatgcatcagcaatacagctagttacctgaggctgtgggccctgtcattggcacacgctcaactgtccgacgtgctttgggctatgctgatgagggttggccttcgcgttgacactacctacggcgttttgctcttgttaccagttatcgctctgtttgctgttcttactattttcattctactgattatggagggcctctcggcctttctgcatgcgatccgactccactgggtggaattccagaacaaattttacgtcggcgcaggtaccaaattcgtgcccttttctttcagcctgctgagttcaaaatttaataatgacgattcagtggcatag

SEQ ID NO: 174689 - DNA, 2571 bp, Artificial Sequence
  derived and/or modified sequence
atggggagcctgttcaggtctgagaccatgtgcttggcacagctcttcctgcagtcagggacggcttatgagtgtctgtccgcattgggcgaaaaagggctggtgcaattccgtgatctgaatcaaaacgtgtcctctttccagaggaaatttgtgggagaggttaagagatgcgaagagctagagcgcatcctcgtgtacttagtgcaggagatcaaccgcgcagatatcccgctgcccgagggggaggcctcccctcccgcaccacctctgaagcaggtacttgagatgcaggagcaactgcagaagctggaggtagaactgcgggaggtgacaaagaataaggaaaaattgcgaaagaatcttctggagctcatcgaatacacacacatgctaagggtcacaaagacctttgtcaagaggaatgtggagttcgaaccgacctatgaggagttcccatctctcgaaagtgactcactcctggattactcctgtatgcagcgtttgggggctaaactgggtttcgtcagtgggctaatcaaccaagggaaagtcgaggccttcgaaaaaatgctttggagggtttgtaagggatatacgattgtttcgtacgccgaacttgatgagagccttgaggatcccgaaactggcgaagtcataaaatggtatgtgtttttgatctcattttggggagaacagatcggacacaaagtcaagaaaatctgcgattgttaccactgccacgtttatccttatcccaacacggcagaagaaagaagggaaatccaagagggactcaatacgcggattcaagatctgtacactgtgctgcacaagacagaggattaccttcggcaggtcctttgcaaggctgctgaatctgtgtactcccgggtgattcaggtaaaaaaaatgaaggctatataccacatgctgaacatgtgctccttcgatgtgactaacaagtgtcttattgccgaggtttggtgccccgaggcagatttgcaagatctgcgaagggcgctggaagaaggcagccgcgaatctggcgctactatcccttccttcatgaacataattcccacgaaagagaccccgccaactcggatacgtaccaataagttcactgaaggtttccagaatatcgtggatgcctacggggtgggttcatacagagaggtgaaccccgcactgttcactattattacattcccattcctgtttgccgtgatgtttggggacttcggacacgggtttgtgatgtttctattcgccttgcttctagtactgaacgagaaccatccacgcttgaaccagtcccaagaaattatgcggatgtttttcaacggaagatacattctgctcctgatgggcttgttttcagtatatacaggactgatatacaatgactgcttttcgaagtctgtgaatctgttcggcagcggatggaacgtgtcggcaatgtacagcagttctcaccctcccgcagaacataagaaaatggtactgtggaatgactctgttgtacgacacaatagcattttacagcttgatccaagtattcccggagtgttcaggggaccttatccactcgggatagatccaatctggaatttggccaccaaccgcttgacgttcctgaatagcttcaagatgaagatgtcagttattctgggaataatccatatgacctttggagtgattctgggtattttcaaccacctccactttcgtaagaagtttaacatttatcttgtttcaatacccgagcttctctttatgctatgtatcttcgggtacctgatcttcatgatcttttataagtggctggttttctccgcagagacctcgcgcgttgcaccaagcatcctaatagagtttatcaatatgttcctcttccctgctagcaagactagtggactttatactggacaagaatatgtgcagcgagtcctcctagtcgtgacagcactttctgtacccgtcttattcctgggaaaaccattatttctgttatggcttcacaacgggagatcgtgctttggggtgaaccgcagcggttacacgctgattagaaaggattcagaggaagaagtgtctctcctcggctcgcaagacatagaagagggcaaccaccaagtggaggacggctgtcgcgaaatggcctgtgaggagttcaactttggggagatcctgatgactcaggtgatccattcaatcgagtattgtcttggatgcataagtaacactgcttcctacctgcggctctgggccctgagtctggcccacgcgcagctgtctgacgtcctctgggccatgcttatgcgggtgggcttgcgggtcgacaccacatacggtgtcctgctgctgttacccgtcatcgcgctgtttgcagtcttgactatctttattctcctcatcatggaaggccttagtgcttttttgcacgcaataaggctgcattgggtggaatttcagaataagttctatgtgggggctggcactaagtttgtgccgttttcatttagcttgctctctagtaagttcaataatgatgattcagtcgcatag

SEQ ID NO: 174690 - DNA, 5789 bp, Artificial Sequence
  derived and/or modified sequence
gggggcggaaccggaaccggcagtggcttgggggcgggacctcgcggactgctgtggcggcagctggagcggcggccgcggtggcagaaccgggggcggccgctgcagtctggagccccatagtgcggggccgcggccaggccacaggaagagctcgaggcccgggccgcaccggctgagtgtgcgggcccgcgcggctcggagccgccgccgcccatcgagcccctccgggcgcgggtcggcccgccatggggtccctgttccggagcgagaccatgtgcctggcgcagctcttcctgcagtcgggcacggcctacgagtgcctcagcgccctgggcgagaaaggcctggtccagttccgagacctcaaccagaacgtaagttctttccaaagaaaatttgttggtgaggtgaagaggtgtgaagagctagagcgaatattggtgtatttggtacaggaaattaatagagctgatattccccttcctgaaggagaggccagccctcctgcgccacccctgaaacaggttctagaaatgcaggagcagttgcagaagctcgaggttgaactgagagaagtcactaagaacaaggagaaactgaggaaaaacttgctggaactgatagagtacactcacatgctgagagtgacaaagacctttgtgaaacgcaatgttgagtttgaacccacttatgaagaattcccttccttagagagtgattctttgttggattacagctgtatgcagaggctgggagcaaaactgggatttgtgtctggcctaattaaccaaggaaaagtggaagcatttgaaaaaatgttgtggagagtctgcaaagggtacaccatcgtgtcctatgcagaactggatgaatcccttgaagaccctgaaacaggggaagtcataaaatggtatgtctttttaatatccttttggggagagcagattggccacaaggttaagaagatatgtgattgctaccactgccacgtgtacccctatccaaacacagccgaggagcggagggagatccaggaggggctgaacacccgcatccaggatctctacactgtactgcacaaaaccgaggactatttgaggcaagtgctatgtaaagccgccgagtctgtctacagccgtgtgatccaggtgaagaaaatgaaggccatctatcacatgctgaacatgtgcagctttgacgtgaccaacaagtgcctcattgctgaggtctggtgtcccgaggcggatctgcaggacctgcgccgggcactggaggagggctcgagagagagtggtgctacaatcccctcattcatgaatataatccccacaaaagaaacaccccccactcggatccgcaccaacaaattcaccgagggatttcagaacatcgtggatgcttatggagtcggaagctacagagaagtcaatccagctctctttaccatcatcaccttcccgtttttatttgctgtgatgtttggagacttcggacatggctttgtgatgtttttatttgccctcttgttggtgttaaatgaaaatcatcccagactaaatcagtcacaagagatcatgaggatgttttttaatggccggtacatcctcctgctgatggggctgttctcagtgtacactggcctcatctacaacgactgcttttcaaagtcagtcaacctgttcggctctgggtggaacgtgtcggccatgtacagctccagccacccacccgcagagcataagaagatggtgctttggaatgacagcgtcgttagacacaacagcattttgcagctggatccaagcattcctggagtgttccgaggcccttatccccttggcattgatcctatttggaacttggccacaaatcgcctcacttttctaaactctttcaaaatgaaaatgtccgtgattttaggaatcattcatatgacttttggagtcattctgggaatatttaaccacttgcacttcaggaagaagttcaacatttacctggtttccatcccggaacttctcttcatgctctgtatctttggataccttatatttatgattttctacaagtggctggttttttcagcagaaacctccagagttgctcccagcattctgattgaatttattaacatgtttttattcccagccagtaaaacaagtggcctttacacagggcaggagtatgtccagagagtgctgctggttgtcacagcattgtctgtccctgtcctcttcttgggaaagccactgtttttgttgtggcttcacaatgggcgtagttgcttcggggtgaaccggagtggctacacacttataaggaaagatagtgaggaagaagtttcattgctgggaagccaagatatagaagagggaaatcaccaggtggaagatggatgtagagaaatggcgtgtgaagagtttaattttggagaaatattaatgacccaagtaatccattccatcgagtactgtctgggatgcatctccaacaccgcctcctacctgaggctctgggcgcttagcctggctcacgcacagttgtctgatgtcctgtgggccatgctgatgcgcgtgggcctccgcgttgacaccacctatggcgtcttgctactgctcccggttatcgcgctctttgcagttttgaccattttcatccttctgatcatggaagggctttctgcgtttcttcacgccatacgcctccactgggtagaatttcagaacaaattctacgttggtgcaggcaccaaatttgttcctttctcattcagtctactttcatcaaagttcaataacgacgacagtgtggcatgatcatattgctgtaaccaacaagctttcagatttatggagaatgaccatgttatagactttcacttatgtcagatttatgataggaaaaattccatcttcattactgccttatgacatagccaaataattctgtaagatatacctcttcctcatatgttaaatattttgtaaagtttaccaatttgagatataaaaatttcttttggttttttatgatgagcaaatataagttaatgccaaacgttatgttaaagttattttttcaaatacaggatttggggagagaagccaattttgcatggctagttgaaaatggtattagatacttatttcctttaaactttatttaaaacaaacaacagagttaatctgtcacctgaagttgccagataatattttccaacagctgaagtagggatagttttttaaaaaatttaatgatgggtaatcaaaacattcacatttattctgctggatttaaaaatatgtactttttttttttttttgagatgaagtcttgctgtgtcacgtaggctggagtgcaatggcacgatcgtgtctcattgcaacttccgcctcctggattcaggtgattctcctgtctcagcctcccgagtaactgggattacaggcatgcgccaccgtgaccagctaatttttttgtatttttgtagagatggggtttcaccatgttggccaggctggtctcgaacttctgacctcaagtgatccacctgcctcggcctccctaagtgctgggattacaggcgtgagccaccatgcctggccaaaatatgcaaatattttttatcctgtgctacctagaattacaagtagaggattgtttttacaattttgtcttgttttagtaattggggacaatgggataaaatgacatacaacaaatggttatcccacttgtatatttttttaaagactcttatcctgttacccttacataaaaccagttatgataattgtatgtttggaagataaattgtatgctgagccttaaaacccagtgtgactgtagaagatataatgcggacatgatttgaatttagtgacagcttggctgatgtcactgaaccagaagggtttatactgagtgaaggaaaggtaaaaagtagtattttgtatatttttgtaacaaaatataaatgaagatattttaccatgaagagattgcacttatccttgagaacagtctaaatataaatgaagatattttaccatgaagagattgcacttatccttgagaacagtctaatgatactttttttactttcagactgtttctagctaaagttctgataaaagtattgagttaatttaaactttcaaacactgtttagatcagttgaaaactaattcttaatagccattgttttataatctttagtttaaattcatctgtttgacatttggttttttgtgaacttgagtcagtcctattgaacattttgacctatattcttgcaaattatgttaatttttcatattttagtttgattttagacaattattttcaaaaagaaacctgactttttttcaccttcttgacattgtgagtgatacacgttaaaaggctatttgcccgcatcctcctctatcctgtttcgaggtagagagcttggcacttctgttacaagctgagagtctggaggtgctgagtttaacgtggctgtgcagctgatttcaaggcatgagctgaacagcgttgacacagccgtgacttacaattaaaccctttcaattacagtacagattctgtgtgctacttgatgagatgttacccaaggccagtttggacttactgctttttgtccctcatattaaattatcaaatgatgccgatgaaatgcttgaaaatgattctgctctcaaagttatgcttccctagaaaggtgtcatgtcgggcacttgtgttgggtgactatgacatcccagcagtgctggtcaggtctcagagttgctttcacctagagctgatgcttccacaaggggacatttgtgttactttgctccaggggtctgtcataaaaacaatggtaactacttcatccctaggaagcccaagacttcagggcactgttagctgattggtaaataagggacacgatattcacgggaattgtttactgctccccactagtaattctcatggggccacttttttaactctttctaattaacacctcttctcagcatagagcagaggatgcagtcatttctctgttgaaatctatgtagtatttatgtagaatgtcattatatgaaaagcgaattcagaatcctaactctgggaaagcgctctctggaaatgtagtttgataatagtgtcttataggggccacgggaatttgtttctctataaagcgatgggctccagtgtcatgttaccagagttatcgctcagttttgtttgttaaggcttttgctagaacctattatgtatccagtttttaaaacatacttcattcccttgatagcagagatccagagcacagatggcaagttgtgtggatgatactgaatatgtttattttcctaaagataaatgtcacgacacgacatttctcagtttttatttagatgtttattaccatgtgttaacagaatcttaaaacccaagggatttcttcagtaaactagactttgattcaacctgctgggctggagactgtaattgccgtggtcagttaaggagtgcaaagggtgttctgtctgataggatctgggtgagccctgcggactttccagcagcgaaaggacttggaactcctctttcgctgaatgctgctctgtttctggaatggatattttataacaacattctggtgtcagcatcccctcagcagttgtttatttaaaaatttttttattttttttgagacagtgtctcactctgtcacctaggctgaagtgcagtggtgcagtctcggctcactgcaacctctgcctcctggg

SEQ ID NO: 174691 - DNA, 2571 bp, Artificial Sequence
  derived and/or modified sequence
atgggcagcctgttcagaagcgagaccatgtgcctggcccagctgttcctgcagagcggcaccgcctacgagtgcctgagcgccctgggcgagaagggcctggtgcagttcagagacctgaaccagaacgtgagcagcttccagagaaagttcgtgggcgaggtgaagagatgcgaggagctggagagaatcctggtgtacctggtgcaggagatcaacagagccgacatccccctgcccgagggcgaggccagcccccccgccccccccctgaagcaggtgctggagatgcaggagcagctgcagaagctggaggtggagctgagagaggtgaccaagaacaaggagaagctgagaaagaacctgctggagctgatcgagtacacccacatgctgagagtgaccaagaccttcgtgaagagaaacgtggagttcgagcccacctacgaggagttccccagcctggagagcgacagcctgctggactacagctgcatgcagagactgggcgccaagctgggcttcgtgagcggcctgatcaaccagggcaaggtggaggccttcgagaagatgctgtggagagtgtgcaagggctacaccatcgtgagctacgccgagctggacgagagcctggaggaccccgagaccggcgaggtgatcaagtggtacgtgttcctgatcagcttctggggcgagcagatcggccacaaggtgaagaagatctgcgactgctaccactgccacgtgtacccctaccccaacaccgccgaggagagaagagagatccaggagggcctgaacaccagaatccaggacctgtacaccgtgctgcacaagaccgaggactacctgagacaggtgctgtgcaaggccgccgagagcgtgtacagcagagtgatccaggtgaagaagatgaaggccatctaccacatgctgaacatgtgcagcttcgacgtgaccaacaagtgcctgatcgccgaggtgtggtgccccgaggccgacctgcaggacctgagaagagccctggaggagggcagcagagagagcggcgccaccatccccagcttcatgaacatcatccccaccaaggagaccccccccaccagaatcagaaccaacaagttcaccgagggcttccagaacatcgtggacgcctacggcgtgggcagctacagagaggtgaaccccgccctgttcaccatcatcaccttccccttcctgttcgccgtgatgttcggcgacttcggccacggcttcgtgatgttcctgttcgccctgctgctggtgctgaacgagaaccaccccagactgaaccagagccaggagatcatgagaatgttcttcaacggcagatacatcctgctgctgatgggcctgttcagcgtgtacaccggcctgatctacaacgactgcttcagcaagagcgtgaacctgttcggcagcggctggaacgtgagcgccatgtacagcagcagccacccccccgccgagcacaagaagatggtgctgtggaacgacagcgtggtgagacacaacagcatcctgcagctggaccccagcatccccggcgtgttcagaggcccctaccccctgggcatcgaccccatctggaacctggccaccaacagactgaccttcctgaacagcttcaagatgaagatgagcgtgatcctgggcatcatccacatgaccttcggcgtgatcctgggcatcttcaaccacctgcacttcagaaagaagttcaacatctacctggtgagcatccccgagctgctgttcatgctgtgcatcttcggctacctgatcttcatgatcttctacaagtggctggtgttcagcgccgagaccagcagagtggcccccagcatcctgatcgagttcatcaacatgttcctgttccccgccagcaagaccagcggcctgtacaccggccaggagtacgtgcagagagtgctgctggtggtgaccgccctgagcgtgcccgtgctgttcctgggcaagcccctgttcctgctgtggctgcacaacggcagaagctgcttcggcgtgaacagaagcggctacaccctgatcagaaaggacagcgaggaggaggtgagcctgctgggcagccaggacatcgaggagggcaaccaccaggtggaggacggctgcagagagatggcctgcgaggagttcaacttcggcgagatcctgatgacccaggtgatccacagcatcgagtactgcctgggctgcatcagcaacaccgccagctacctgagactgtgggccctgagcctggcccacgcccagctgagcgacgtgctgtgggccatgctgatgagagtgggcctgagagtggacaccacctacggcgtgctgctgctgctgcccgtgatcgccctgttcgccgtgctgaccatcttcatcctgctgatcatggagggcctgagcgccttcctgcacgccatcagactgcactgggtggagttccagaacaagttctacgtgggcgccggcaccaagttcgtgcccttcagcttcagcctgctgagcagcaagttcaacaacgacgacagcgtggcctag

SEQ ID NO: 174692 - protein, 1013 aa, Artificial Sequence
  derived and/or modified sequence
MGLGTLSPRMLVWLVASGIVFYGELWVCAGLDYDYTFDGNEEDKTETIDYKDPCKAAVFWGDIALDDEDLNIFQIDRTIDLTQNPFGNLGHTTGGLGDHAMSKKRGALYQLIDRIRRIGFGLEQNNTVKGKVPLQFSGQNEKNRVPRAATSRTERIWPGGVIPYVIGGNFTGSQRAMFKQAMRHWEKHTCVTFIERSDEESYIVFTYRPCGCCSYVGRRGNGPQAISIGKNCDKFGIVVHELGHVIGFWHEHTRPDRDNHVTIIRENIQPGQEYNFLKMEPGEVNSLGERYDFDSIMHYARNTFSRGMFLDTILPSRDDNGIRPAIGQRTRLSKGDIAQARKLYRCPACGETLQESNGNLSSPGFPNGYPSYTHCIWRVSVTPGEKIVLNFTTMDLYKSSLCWYDYIEVRDGYWRKSPLLGRFCGDKLPEVLTSTDSRMWIEFRSSSNWVGKGFAAVYEAICGGEIRKNEGQIQSPNYPDDYRPMKECVWKITVSESYHVGLTFQSFEIERHDNCAYDYLEVRDGTSENSPLIGRFCGYDKPEDIRSTSNTLWMKFVSDGTVNKAGFAANFFKEEDECAKPDRGGCEQRCLNTLGSYQCACEPGYELGPDRRSCEAACGGLLTKLNGTITTPGWPKEYPPNKNCVWQVVAPTQYRISVKFEFFELEGNEVCKYDYVEIWSGLSSESKLHGKFCGAEVPEVITSQFNNMRIEFKSDNTVSKKGFKAHFFSDKDECSKDNGGCQHECVNTMGSYMCQCRNGFVLHDNKHDCKEAECEQKIHSPSGLITSPNWPDKYPSRKECTWEISATPGHRIKLAFSEFEIEQHQECAYDHLEVFDGETEKSPILGRLCGNKIPDPLVATGNKMFVRFVSDASVQRKGFQATHSTECGGRLKAESKPRDLYSHAQFGDNNYPGQVDCEWLLVSERGSRLELSFQTFEVEEEADCGYDYVELFDGLDSTAVGLGRFCGSGPPEEIYSIGDSVLIHFHTDDTINKKGFHIRYKSIRYPDTTHTKK

SEQ ID NO: 174693 - DNA, 3042 bp, Artificial Sequence
  derived and/or modified sequence
atgggcctgggcaccctgagccccagaatgctggtgtggctggtggccagcggcatcgtgttctacggcgagctgtgggtgtgcgccggcctggactacgactacaccttcgacggcaacgaggaggacaagaccgagaccatcgactacaaggacccctgcaaggccgccgtgttctggggcgacatcgccctggacgacgaggacctgaacatcttccagatcgacagaaccatcgacctgacccagaaccccttcggcaacctgggccacaccaccggcggcctgggcgaccacgccatgagcaagaagagaggcgccctgtaccagctgatcgacagaatcagaagaatcggcttcggcctggagcagaacaacaccgtgaagggcaaggtgcccctgcagttcagcggccagaacgagaagaacagagtgcccagagccgccaccagcagaaccgagagaatctggcccggcggcgtgatcccctacgtgatcggcggcaacttcaccggcagccagagagccatgttcaagcaggccatgagacactgggagaagcacacctgcgtgaccttcatcgagagaagcgacgaggagagctacatcgtgttcacctacagaccctgcggctgctgcagctacgtgggcagaagaggcaacggcccccaggccatcagcatcggcaagaactgcgacaagttcggcatcgtggtgcacgagctgggccacgtgatcggcttctggcacgagcacaccagacccgacagagacaaccacgtgaccatcatcagagagaacatccagcccggccaggagtacaacttcctgaagatggagcccggcgaggtgaacagcctgggcgagagatacgacttcgacagcatcatgcactacgccagaaacaccttcagcagaggcatgttcctggacaccatcctgcccagcagagacgacaacggcatcagacccgccatcggccagagaaccagactgagcaagggcgacatcgcccaggccagaaagctgtacagatgccccgcctgcggcgagaccctgcaggagagcaacggcaacctgagcagccccggcttccccaacggctaccccagctacacccactgcatctggagagtgagcgtgacccccggcgagaagatcgtgctgaacttcaccaccatggacctgtacaagagcagcctgtgctggtacgactacatcgaggtgagagacggctactggagaaagagccccctgctgggcagattctgcggcgacaagctgcccgaggtgctgaccagcaccgacagcagaatgtggatcgagttcagaagcagcagcaactgggtgggcaagggcttcgccgccgtgtacgaggccatctgcggcggcgagatcagaaagaacgagggccagatccagagccccaactaccccgacgactacagacccatgaaggagtgcgtgtggaagatcaccgtgagcgagagctaccacgtgggcctgaccttccagagcttcgagatcgagagacacgacaactgcgcctacgactacctggaggtgagagacggcaccagcgagaacagccccctgatcggcagattctgcggctacgacaagcccgaggacatcagaagcaccagcaacaccctgtggatgaagttcgtgagcgacggcaccgtgaacaaggccggcttcgccgccaacttcttcaaggaggaggacgagtgcgccaagcccgacagaggcggctgcgagcagagatgcctgaacaccctgggcagctaccagtgcgcctgcgagcccggctacgagctgggccccgacagaagaagctgcgaggccgcctgcggcggcctgctgaccaagctgaacggcaccatcaccacccccggctggcccaaggagtacccccccaacaagaactgcgtgtggcaggtggtggcccccacccagtacagaatcagcgtgaagttcgagttcttcgagctggagggcaacgaggtgtgcaagtacgactacgtggagatctggagcggcctgagcagcgagagcaagctgcacggcaagttctgcggcgccgaggtgcccgaggtgatcaccagccagttcaacaacatgagaatcgagttcaagagcgacaacaccgtgagcaagaagggcttcaaggcccacttcttcagcgacaaggacgagtgcagcaaggacaacggcggctgccagcacgagtgcgtgaacaccatgggcagctacatgtgccagtgcagaaacggcttcgtgctgcacgacaacaagcacgactgcaaggaggccgagtgcgagcagaagatccacagccccagcggcctgatcaccagccccaactggcccgacaagtaccccagcagaaaggagtgcacctgggagatcagcgccacccccggccacagaatcaagctggccttcagcgagttcgagatcgagcagcaccaggagtgcgcctacgaccacctggaggtgttcgacggcgagaccgagaagagccccatcctgggcagactgtgcggcaacaagatccccgaccccctggtggccaccggcaacaagatgttcgtgagattcgtgagcgacgccagcgtgcagagaaagggcttccaggccacccacagcaccgagtgcggcggcagactgaaggccgagagcaagcccagagacctgtacagccacgcccagttcggcgacaacaactaccccggccaggtggactgcgagtggctgctggtgagcgagagaggcagcagactggagctgagcttccagaccttcgaggtggaggaggaggccgactgcggctacgactacgtggagctgttcgacggcctggacagcaccgccgtgggcctgggcagattctgcggcagcggcccccccgaggagatctacagcatcggcgacagcgtgctgatccacttccacaccgacgacaccatcaacaagaagggcttccacatcagatacaagagcatcagataccccgacaccacccacaccaagaagtag

SEQ ID NO: 174694 - DNA, 3042 bp, Artificial Sequence
  derived and/or modified sequence
atgggtctgggaactctgtctcctaggatgctcgtgtggctcgtcgcttctgggattgttttttacggagagttatgggtctgtgccggacttgactacgactatactttcgacggcaatgaagaagataaaaccgagaccatcgactacaaagatccatgcaaggccgccgttttttggggtgacattgccttggacgatgaggatctgaatatcttccagattgaccgtaccattgacctgacacagaatccattcgggaacctgggacatacaacaggcggtttgggcgaccacgccatgtccaaaaagaggggcgcgctctaccagttgattgatcgcatcaggagaatcggttttggtctggaacagaataacaccgtgaagggcaaggtgcccctgcagtttagcgggcaaaatgaaaaaaaccgagttcctcgggcggccacgtcccgcactgagcggatttggcctggcggagtcatcccctatgtaatcggcgggaactttactggatcacagagagcgatgtttaagcaggcgatgcggcactgggagaaacacacctgtgtcacattcattgagcggagtgacgaagaatcatatattgtcttcacctaccgcccatgcgggtgttgctcatacgttggcaggcggggaaatggaccacaagccatcagtatcggcaagaactgcgataagtttggcatagtagtccacgagctgggacacgttatcggattctggcacgaacacactaggcccgacagggataaccacgtcacaattatccgcgagaatatccaaccgggacaggagtataatttcttgaaaatggagccaggcgaagtaaattccctcggtgagcggtatgacttcgatagcattatgcactacgccagaaataccttctcacggggaatgtttctggacaccatcctaccatcccgggatgacaatggtattaggccggcaattggacaacgaacaagattgtccaagggtgatatcgcacaagctcgcaagctctaccggtgccccgcctgtggagagaccttgcaagagtcaaacggcaacctaagcagtcccgggttcccaaatggctatcctagttacacccattgtatctggcgggtatctgtgacaccaggggagaagatagtattaaattttactacgatggatctgtataaatccagcctctgctggtacgattacatcgaagtgagggacggctactggagaaaaagcccccttctgggacgtttttgtggggacaaactccctgaagtcctgacatctaccgattcacggatgtggatcgagttcagaagctctagcaactgggttggaaaaggattcgcagctgtttacgaggccatttgtgggggcgagataaggaaaaacgaagggcaaattcagtcaccaaattatccagacgactatcgccccatgaaggagtgcgtgtggaagatcaccgtgagcgagagctatcatgtggggctcacgtttcaatccttcgagatcgaacgccatgacaactgtgcatacgattatctcgaggtgcgagacggtacatctgagaactccccactcatcgggaggttttgcgggtacgataaaccagaagacattaggtctacatccaatacactgtggatgaaattcgtgagtgacggcaccgtcaacaaggccgggttcgccgctaacttttttaaggaagaggatgaatgtgcaaaacccgatcggggcggatgtgaacagaggtgcctgaatactttaggcagctaccaatgtgcttgtgaacctggttatgaactcgggcccgaccgacgatcttgcgaggctgcctgcggagggctgctcacaaagttaaatggcacaattactacccctggatggccaaaggaataccctcctaacaagaactgtgtttggcaggtcgttgcgcccactcagtatcgtatatccgtaaaattcgagttttttgaactggaaggcaatgaggtttgtaaatacgactacgtagagatctggagcggcttatcgagcgagtccaagctgcatggtaaattttgtggcgctgaggtgccagaggtgatcacttcacagtttaataatatgcggattgagttcaagtcagacaatacagtgtccaagaaggggttcaaggcacatttctttagtgataaagacgagtgcagcaaggacaacggagggtgtcagcatgagtgcgttaacacaatgggttcgtatatgtgtcagtgtaggaatggattcgtgttgcatgacaacaagcacgactgtaaagaagcagaatgtgagcagaagatccactcgcctagcggactgattacatctcctaactggcctgacaaatacccaagccgtaaagaatgcacttgggaaatctccgcaaccccgggtcacaggataaaactggcattcagcgaattcgaaatagagcagcatcaggagtgtgcttacgatcatcttgaggtcttcgacggcgagacagaaaagagcccgatcttggggaggctgtgcggaaacaaaatccctgatcccctcgtggcaaccggcaacaaaatgttcgtaagatttgtcagcgacgcctccgttcaacgcaagggattccaagctactcacagcactgagtgcggcggccggctgaaggctgagtccaaaccacgcgatctgtacagccacgcacagttcggagataataactatccgggacaggtcgactgtgaatggcttctcgtgagcgagaggggcagtaggcttgagctcagcttccagacttttgaggtggaggaggaagccgattgtggatacgattatgtggagttgttcgatggactggattctaccgctgtgggactgggacgcttttgcgggtctggacctccagaggaaatatacagcattggggactccgtcctcattcactttcacaccgatgatactatcaacaagaaaggctttcatattaggtataagagtatccgctatccagataccactcatacaaaaaaatag

SEQ ID NO: 174695 - DNA, 3042 bp, Artificial Sequence
  derived and/or modified sequence
atgggcctgggcaccctgagccccaggatgctggtgtggctggtggccagcggcatcgtgttctacggggagctgtgggtgtgtgccggcctggactatgactacacctttgatggaaatgaggaggacaagacagagaccatcgactacaaggacccctgcaaggctgctgtgttctggggagacatcgccctggatgatgaggacctgaacatcttccagattgacaggaccatcgacctgacccagaaccccttcggcaacctgggccacaccactggaggcctgggggaccacgccatgagcaagaagagaggagccctgtaccagctgattgaccgcatccgccgcatcggcttcggcctggagcagaacaacacagtgaagggcaaggtgcccctgcagttcagcggccagaatgagaagaacagagtgccccgggccgccaccagcaggacagagcgcatctggccaggcggcgtcatcccctacgtgattggaggcaacttcaccggcagccagagggccatgttcaagcaggccatgaggcactgggagaagcacacctgtgtgaccttcatcgagaggagtgatgaggagagctacatcgtgttcacctaccggccctgtggctgctgcagctatgtgggcagaagaggaaatggcccccaggccatcagcatcggcaagaactgtgacaagtttggaattgtggtgcatgagctgggccacgtgattggcttctggcatgagcacaccaggccagaccgggacaaccacgtgaccatcatccgggagaacatccagcccggccaggagtacaacttcctgaagatggagcctggagaggtgaacagcctgggggagagatatgactttgacagcatcatgcactacgccaggaacaccttcagccggggcatgttcctggacaccatcctgcccagcagagatgacaatggcatccggcctgccatcggccagaggacccggctgagcaagggggacatcgcccaggccaggaagctgtaccgctgcccagcctgtggggagaccctgcaggagagcaatggaaacctgagcagccctggcttccccaacggctaccccagctacacccactgcatctggagggtgtctgtgaccccaggagagaagatcgtgctgaacttcaccaccatggacctgtacaagagcagcctgtgctggtatgactacatcgaggtgagagatggctactggaggaagagccccctgctgggccgcttctgtggggacaagctgcctgaggtgctgaccagcacagacagcaggatgtggattgagttccgcagcagcagcaactgggtgggcaagggctttgctgctgtgtatgaggccatctgtggcggggagatcaggaagaatgaaggccagatccagagccccaactacccagatgactaccggcccatgaaggaatgtgtgtggaagatcaccgtgtctgagagctaccacgtgggcctgaccttccagagctttgaaattgaaagacatgacaactgtgcctatgactacctggaggtgagagatggcaccagcgagaacagccccctgattggccgcttctgtggctatgacaagccagaggacatccgcagcaccagcaacaccctgtggatgaagtttgtgtctgatggcaccgtgaacaaggccggctttgctgccaacttcttcaaggaggaggatgaatgtgccaagccagaccggggcggctgtgagcagcgctgcctgaacaccctgggcagctaccagtgtgcctgtgagcccggctatgagctgggccctgacagaagaagctgtgaggccgcctgtggcggcctgctgaccaagctgaatggcaccatcaccaccccaggctggcccaaggagtacccacccaacaagaactgtgtgtggcaggtggtggcccccacccagtaccgcatctctgtgaagtttgagttctttgagctggagggcaatgaggtgtgcaagtatgactatgtggagatctggagcggcctgagcagcgagagcaagctgcacggcaagttctgtggggctgaggtgcctgaggtgatcaccagccagttcaacaacatgagaattgagttcaagagtgacaacacagtgtccaagaagggcttcaaggcccacttcttcagtgacaaggatgaatgttccaaggacaatggaggctgccagcatgaatgtgtgaacaccatgggcagctacatgtgccagtgcagaaatggatttgtgctgcatgacaacaagcatgactgcaaggaggctgaatgtgagcagaagatccacagccccagcggcctcatcaccagccccaactggccagacaagtaccccagcaggaaagaatgtacctgggagatcagcgccaccccaggccaccgcatcaagctggccttcagcgagtttgaaattgagcagcaccaggagtgtgcctatgaccacctggaggtgtttgatggagaaacagagaagagccccatcctgggccgcctgtgtggcaacaagatcccagaccccctggtggccaccggcaacaagatgtttgtgcgctttgtgtctgatgcctctgtgcagaggaagggcttccaggccacccacagcacagaatgtggcggccgcctgaaggccgagagcaagccccgggacctgtacagccacgcccagtttggagacaacaactacccaggccaggtggactgtgagtggctgctggtgtctgagcggggcagccggctggagctgtccttccagacctttgaggtggaggaggaggccgactgtggctatgactatgtggagctgtttgatggcctggacagcacagctgtgggcctgggccgcttctgtggcagcggccccccagaggagatctacagcattggagacagcgtgctgatccacttccacacagatgacaccatcaacaagaagggcttccacatccgctacaagagcatccgctacccagacaccacccacaccaagaagtag

SEQ ID NO: 174696 - DNA, 3042 bp, Artificial Sequence
  derived and/or modified sequence
atgggcctgggcaccctgagcccccggatgctggtgtggctggtggctagtggaatcgttttttacggcgagctctgggtctgcgccggtctagactacgactatacctttgatggtaacgaggaggacaaaactgaaaccatagactataaagacccatgtaaagcggcggtattctggggggatattgctttagatgatgaggacctgaacatttttcaaatcgaccgcaccattgatctgacccagaaccccttcggtaatctcgggcacactaccggaggcctaggagaccacgccatgtctaaaaagcgcggagccctgtaccagctcatcgaccgcatccggcgcattggattcggactcgaacaaaataatacggtcaaaggaaaggttcctcttcagttctcaggacagaatgagaaaaacagggtgccgcgcgcggcgacatctagaacagagcgcatctggccaggcggagttatcccctatgtcatcggcgggaacttcactggttcccagcgcgctatgtttaaacaggccatgaggcactgggagaagcacacgtgtgtgacattcatcgagagaagtgacgaagaaagttacattgtctttacttatcggccctgcgggtgctgttcctacgtgggcaggaggggcaacggtccccaggccatctcgatcggcaagaactgtgataaattcggaatagtggtgcacgagctcggccacgtcatcggcttttggcatgagcacacgagacctgatagggataatcacgtcaccattatacgagaaaatatacagcccgggcaagagtacaatttcttgaaaatggagcctggagaggttaatagtctcggcgagcggtacgactttgactctataatgcactacgcgagaaacaccttttctagggggatgtttctggacaccatactcccctcacgcgatgacaacggcatcaggccggcgatcggccagcgcaccaggctgagcaagggcgacatcgctcaggcccgaaaactatacaggtgtcctgcttgcggggagacccttcaggagtccaatgggaatttgagtagccctggattccccaatggatacccgtcttacactcattgtatttggcgggtgtcggtgaccccgggggagaagattgttctcaattttaccaccatggatctgtacaaaagcagcttatgctggtatgactatattgaggtgagggacgggtattggcgcaagtctccattgttgggccggttctgtggggataagcttcccgaggttctgaccagtaccgattccaggatgtggatcgagttccgcagcagtagcaattgggtggggaagggctttgcggctgtctacgaggcaatttgtggcggggaaataaggaagaatgaaggccaaatccaaagcccaaactaccccgacgactaccgtcccatgaaagagtgcgtgtggaaaattaccgtgagtgagtcctaccatgttggcttaacgtttcagagtttcgagatcgagcgtcacgacaactgcgcgtacgactacctggaagtgcgcgacgggaccagtgagaactcccctttgattggacgcttctgcggctacgataagccagaggacataagaagtacatctaacacactgtggatgaaattcgtgtctgatggaaccgtcaacaaggcgggcttcgcagcaaacttttttaaagaggaagatgagtgtgctaagccggaccggggaggctgcgagcaacgatgtctgaatacactgggatcgtatcagtgcgcatgtgagcccggttacgaactcggccccgatcggagaagctgtgaggcagcatgtggcggactcctgaccaaattaaacggtactatcaccacccccggatggcccaaggagtaccccccaaacaaaaactgtgtatggcaggtggtcgctccaacgcagtataggatctctgtgaagttcgaatttttcgagttggagggcaatgaggtatgcaaatatgattacgttgagatatggtcaggcctctcatctgaatcaaagttgcatggcaagttttgtggcgccgaagtgcctgaggttatcactagccagttcaacaacatgcggatcgaattcaagagtgacaacacagtatctaagaaaggttttaaggctcacttttttagcgataaggacgagtgtagcaaagacaatggaggttgccagcatgagtgcgtgaacaccatgggttcctatatgtgtcagtgccggaacgggttcgttctacacgataacaagcacgattgtaaggaggctgaatgcgaacagaagatccactcaccttccgggttaatcacgtcaccaaattggccagataaatatccttcaaggaaagagtgcacttgggaaatttctgccactccaggacacagaatcaagctggctttttctgagtttgagattgagcagcatcaagagtgtgcctacgaccacctcgaggtcttcgatggggagaccgagaagagccccatcctcggtcggctgtgtggcaacaaaattcctgatcctcttgtcgctactgggaataaaatgttcgtgcgcttcgtctctgatgcatccgtccagaggaaaggatttcaagcaactcactccactgaatgtgggggccggctgaaggccgagtccaagccccgcgacctgtactctcacgcccagtttggcgataacaactaccctggacaagtagattgtgagtggctcctcgtgtccgagagggggagcaggctagagctgtcattccagacctttgaagtggaggaggaggccgattgcgggtatgattacgtggagctctttgacggcttggatagtacggctgtagggctgggccgattctgcggttcggggccccccgaggagatttattctattggggatagcgttttaattcactttcacaccgacgacaccattaataaaaaaggcttccacatcagatacaagagcattcgttacccagacaccacgcatacgaaaaagtag

SEQ ID NO: 174697 - DNA, 3042 bp, Artificial Sequence
  derived and/or modified sequence
atggggctgggaaccctgtcgcctcgaatgctggtgtggctggtcgcatccggcatagtgttctacggcgaactttgggtgtgcgctggtttagactatgattatacattcgatggcaatgaggaagataagaccgagactatcgactacaaggacccgtgtaaagcagcggtcttctggggagacattgctctcgacgatgaagatctgaacatattccagattgacaggacaattgatctgacacagaaccctttcggcaatcttggccatacaaccggtggactgggcgaccacgcaatgtcaaagaagcggggagcgctgtatcagctgattgacagaatccgacggatcggattcggccttgagcagaataacaccgttaaaggaaaagtgccattgcaattctcaggtcagaacgagaagaatagggttcctcgagctgccacatcacgtacagaacgaatctggcccggtggcgtcattccttacgtgatagggggaaattttacgggtagtcagagagcaatgttcaaacaagcaatgcgacactgggagaagcatacttgcgtaaccttcattgagcggtccgatgaagaaagttacatcgtgttcacctatcgcccttgcggttgctgttcatacgtggggagaagaggtaacggaccccaggctatttcaatcgggaaaaactgtgacaagttcggaatcgttgtccacgagttagggcacgtcatcgggttctggcacgaacacacaagaccggaccgggacaaccacgttacaattattcgggagaatatccagccagggcaagagtataattttctgaagatggagcctggcgaagttaacagcctgggagagaggtatgattttgacagcatcatgcattacgcacggaatacttttagtagaggtatgtttttggataccatcctgccctctagagacgacaacggcattagaccggctattggccaaagaacgcgcctcagtaaaggtgacattgcccaggcacggaagctctaccgatgtcccgcatgtggagagaccctgcaggagtcgaacggaaatctatctagccccggattccccaatggctaccctagctatactcactgcatatggagggtatccgttactccgggtgaaaagattgtccttaacttcactaccatggatctttacaagtcctctctttgctggtacgattacatcgaggtgagggatggctattggcgaaagtccccactgctaggcaggttttgtggagataagttaccagaagtcctgacctccacagacagtcggatgtggatcgagtttaggagctcgtccaactgggtgggcaagggatttgcggcagtgtacgaagcaatctgcggtggcgagattcggaagaatgaggggcaaattcaatcaccaaattatcctgacgattaccgtccgatgaaggagtgcgtttggaaaattactgtctctgaaagctatcacgtgggtttaaccttccagagttttgagatcgagcggcatgacaactgtgcatacgattatctcgaggtgagggatggaaccagtgagaattctcccctgatcggtcgcttctgtgggtacgacaagcccgaggatattaggagcaccagcaatacactatggatgaaattcgtcagcgacggaacagttaacaaggcagggtttgccgcaaatttctttaaggaagaagatgagtgcgccaagcccgatagaggtggctgcgagcagcgctgcctaaacactcttggaagttaccaatgtgcctgtgaaccaggctatgaactcgggcctgaccgtcgcagctgtgaagcagcctgtggcggtctcctgacaaagcttaatggtacaatcactacaccgggatggccaaaagagtaccccccaaataagaattgtgtgtggcaggtcgtagcaccgacacaatataggatttcggtaaaatttgaattttttgagcttgagggcaatgaggtatgtaaatacgattacgtggaaatctggtcaggcctgtcgtcagagtcaaaactgcacggcaaattctgcggcgctgaggtccctgaagtcatcacctctcagtttaacaacatgagaattgaatttaaaagtgacaacactgtgagtaaaaaaggattcaaggcacacttcttctctgacaaggacgagtgcagtaaagataatggaggatgccaacatgaatgcgtaaacaccatgggctcatacatgtgccagtgtcggaacggattcgtactccatgataataaacacgattgcaaagaggctgaatgcgagcagaaaatacacagcccatctggactgattaccagccccaactggcctgacaagtacccctctcggaaagagtgcacctgggagatctctgcaacccctggacaccggattaaactggcgttcagcgaattcgagatcgagcagcaccaggagtgcgcgtacgatcacttagaggtctttgacggcgaaaccgagaagtcgccaatcctcggacggttatgcggaaacaagataccggacccactggtggcaacgggcaacaagatgttcgtccgattcgtaagcgacgcctccgtccaacggaagggtttccaggcaactcactcaacggagtgcgggggtcggttgaaggccgagtctaagcctcgtgatctatactcacacgcccagttcggagacaataactacccaggccaggtggactgcgagtggctattggttagtgaaagagggtccaggctcgaactgagcttccagaccttcgaagtggaagaggaggccgactgcgggtacgactatgtcgagctgttcgatggacttgatagcactgcagtgggtctcggcaggttctgcggttctggtccacctgaggaaatatattccattggcgattcagtcctcatccacttccatactgacgataccatcaataagaaaggatttcatattcgctacaagtctatcagatatcccgatacgactcacacaaaaaaatag

SEQ ID NO: 174698 - DNA, 3042 bp, Artificial Sequence
  derived and/or modified sequence
atgggactgggtaccttgagtccaaggatgctggtatggctcgtggcaagcggtatcgtgttctacggcgaattgtgggtctgcgccggtctggattacgattacactttcgacggtaacgaggaagataagactgagacgatcgattacaaggatccatgcaaggcagcagttttctggggggatattgccttagatgacgaggatctgaatatctttcagatcgatagaaccatagacctgacacaaaacccgttcggaaacctgggacacactacgggagggctaggtgatcacgctatgtccaagaagaggggcgccctttaccagctcatcgacagaatccgcagaatcgggtttggactagaacagaataacaccgtcaaaggaaaggttcccttacaattttcaggccagaatgagaagaatagagtgccccgggcagccacatcccgtacagaacggatctggcctggaggtgtgattccatacgtgatcggcggaaattttactggctcccagcgggccatgttcaaacaggccatgagacactgggaaaaacacacttgcgttaccttcattgagcgctccgacgaggaaagctacatcgtttttacgtaccgcccctgtggatgctgctcttatgtcggaagaagagggaatgggccccaagccatttctatcggtaaaaattgcgacaagttcgggattgtggtccatgagctcggacatgtgatcgggttctggcacgagcacactagacccgaccgggataatcatgtgaccatcatcagagaaaatattcagccgggtcaggaatataattttctgaagatggaaccaggcgaggtgaacagtttgggggaacgctacgacttcgactccatcatgcactacgcccgtaataccttctcacgtggcatgtttctggacacaatcctaccctccagggacgataatggtatcagacctgccattggccagcgcactcgactctcgaaaggcgatattgctcaggctaggaagttgtatcggtgccccgcatgcggcgaaactctgcaggagtccaacggaaacctgagctccccaggctttcctaatggttatcctagttacacacattgcatttggagagtgtccgttacacctggagagaaaatcgtgctcaacttcactaccatggatttgtacaagtcttcattgtgttggtatgattatattgaagtgcgagatggatattggagaaagagtccacttttgggacgtttttgtggggataagctgccagaggtcctgaccagcacagacagccgtatgtggattgaatttcggagcagttctaactgggtgggcaaaggtttcgccgctgtgtacgaggctatatgtggcggagaaattagaaagaacgaagggcagattcaaagtcccaactatcctgacgactataggcctatgaaagaatgcgtgtggaaaataactgtgtcagagagttaccacgtcggcctcacctttcagtcctttgagatcgagaggcacgacaattgtgcctacgattatctggaggtgagagacggaacttccgagaacagcccactgattggacgtttctgtggatatgataagcccgaagatattcgatcaaccagcaacaccttgtggatgaaattcgtctcagatggcacagttaataaagcaggcttcgccgcaaacttctttaaggaggaggatgaatgtgccaaaccagacaggggaggctgcgaacaaaggtgcctaaataccctcggatcttatcagtgtgcatgtgagccaggctacgagctcggtcctgataggcgcagctgcgaggctgcatgtggcggcctgcttaccaagctcaacggtacaataactactcctgggtggccaaaagaataccctccaaacaagaattgcgtatggcaggtggtggctccgactcaatatagaatttccgtgaagttcgagtttttcgaactcgaggggaacgaggtgtgtaaatacgactatgtggagatatggtccggcttgtcatccgagtccaagctgcacggaaagttttgcggcgcagaagtcccggaagtcatcacaagtcaattcaacaatatgcgaatcgagtttaaatccgacaacactgtgtctaagaaagggttcaaagcccactttttcagtgataaggacgaatgtagcaaagacaatggtggctgccagcacgagtgcgtgaacaccatggggagctacatgtgtcagtgccgaaatgggttcgtgttgcacgataataagcacgactgtaaggaagccgagtgtgaacagaagattcattctccgtcaggcctgataacgagccccaactggccagacaagtacccctccagaaaagaatgcacgtgggaaatctccgctacaccaggacatcgcattaaactagccttctctgaattcgagattgaacagcaccaggagtgcgcctacgaccacctggaagtattcgatggtgaaacagaaaagagcccaattctaggacgcctctgtgggaataagataccagacccgttggttgctaccggcaataaaatgttcgtgcggtttgtgtcagatgcgagcgtgcagagaaaggggtttcaagccacccactctacagagtgtgggggacggctgaaggctgaatcaaagcctcgggacttatactctcacgctcagttcggggataataactatccaggtcaagttgactgtgaatggctgctcgtttctgaaagaggatcacgccttgaactgtcttttcaaacctttgaagtggaagaggaagcagactgtgggtacgattatgtggaactctttgacggactcgattctacagctgttggactggggcggttctgtggttcaggacccccagaggagatttattctattggcgatagtgtgttgatccatttccacaccgatgataccattaacaagaaggggttccacatccggtataagtctattcgatatcctgacaccacgcacactaaaaaatag

SEQ ID NO: 174699 - DNA, 3042 bp, Artificial Sequence
  derived and/or modified sequence
atgggactcggcactctgtctccaagaatgctggtttggcttgtggctagtggcatcgttttttatggagagctctgggtttgcgccggacttgactacgattacacattcgatgggaacgaggaggacaagacagaaacgatcgattataaggatccctgtaaggcagccgtgttttggggcgacattgctctcgatgacgaggatttaaatatctttcaaatagatagaactattgatctgactcagaaccccttcggaaatctgggacatacaaccggaggcctgggtgatcatgcgatgagtaagaagaggggggctttataccaactaattgataggatccgcagaatcgggtttgggcttgagcagaacaacaccgtcaagggcaaagtgcctctgcagtttagcggacaaaacgaaaaaaaccgggttcctagagctgctacatccagaacagagcggatatggcccggtggagtgataccttacgtgattggggggaattttaccggaagccagcgtgcaatgtttaaacaagctatgcgtcactgggaaaaacatacgtgcgtgacattcatagaacggagtgacgaagaatcctacatcgtgtttacatatagaccatgcggatgttgtagttatgtcggtaggaggggaaatggcccgcaggcaataagcatcggaaaaaactgcgacaagttcggtatcgtcgtccacgagctgggacatgtcatcggattttggcacgagcacacaaggccagatcgagataatcacgtcacaatcatcagagaaaatatccagccaggacaagagtacaatttcttgaaaatggagcccggagaagtcaactccctgggcgagcgctatgactttgattccatcatgcactatgcgagaaataccttctcacggggcatgttcctagacaccattctgccgtccagagatgataatggaatccgtcccgccatcggacagcggacgaggttgtcaaaaggagacattgctcaagccagaaagctctaccgatgtccagcatgcggagaaacattgcaggaatcgaatggtaatctatctagccccggcttcccaaatgggtacccgagctacacgcattgtatatggcgcgtctctgtaaccccaggcgagaaaattgtgctgaatttcactaccatggacctctataaatccagcttgtgttggtatgattatattgaagtgcgagatggatattggagaaagagtccacttttgggacgtttttgtggggataagctgccagaggtcctgaccagcacagacagccgtatgtggattgaatttcggagcagttctaactgggtgggcaaaggtttcgccgctgtgtacgaggctatatgtggcggagaaattagaaagaacgaagggcagattcaaagtcccaactatcctgacgactataggcctatgaaagaatgcgtgtggaaaataactgtgtcagagagttaccacgtcggcctgactttccagtcctttgaaatagagcgccacgacaattgtgcttacgattacctggaagttcgagatggcaccagcgaaaacagcccgctcatcggacgcttttgcgggtatgacaagcccgaagacatccgatctacttctaatactctctggatgaaattcgtttccgacggaaccgtgaataaggccggatttgcagcaaactttttcaaagaggaagatgagtgtgccaaacctgacaggggtgggtgtgaacaacgttgtttgaatactctgggctcctaccagtgcgcgtgtgaacccggctacgaactcggccctgaccgccggtcctgtgaagccgcatgtggcgggctcttgacaaagctgaatggaaccataacgaccccaggctggcctaaagaatatccccccaacaagaattgtgtctggcaggtggtggccccaacccagtatcggatcagtgtaaagttcgaattttttgagcttgaaggaaatgaggtatgtaagtatgattacgtcgaaatttggtccggcttgtcctccgagagtaagctgcacggaaaattctgtggcgccgaggtgcctgaagtgattacctcccagtttaacaacatgaggatcgaatttaaatccgataacacagtgtcaaaaaagggtttcaaggctcactttttcagcgataaagatgaatgctctaaggataacggagggtgccagcatgaatgcgtcaatacaatgggttcttacatgtgccagtgccgaaatggatttgtgctccatgacaataaacatgactgcaaagaggctgagtgcgaacagaagatccactctccatcaggactgattacgtctccaaactggccagacaaataccccagtagaaaagagtgtacgtgggagatttcagccacgccaggccatcgaatcaagctggcgttttctgagtttgaaattgaacagcaccaagaatgcgcttacgaccatttagaagtgttcgacggcgaaacagaaaaaagtccaatcctcggccgcctctgtggcaacaagattccggatcctctggttgctaccggcaataagatgtttgtgcgctttgtatccgatgcttctgtgcaaagaaagggcttccaagccacacactccacagaatgcggcgggcggcttaaggcagagtcaaaacccagagacctgtattcacacgcccaattcggagataacaactaccccggacaggtggactgtgagtggttactggttagcgagagaggtagtagactcgagcttagctttcagaccttcgaagttgaggaggaagccgattgtggctacgactacgtcgagttgtttgatgggctcgatagcacggccgtgggacttggaaggttttgtggcagtggccctcccgaggaaatctattctattggagactcagtccttatccactttcatactgacgacactattaataagaaagggtttcacataagatataagagcatccgttatcccgataccacacacaccaagaagtag

SEQ ID NO: 174700 - DNA, 6708 bp, Artificial Sequence
  derived and/or modified sequence
ctcacacttttgctctcttgcagtcagttgctttgctggcttctgcaggcttttaaggtctcgcggcgtagaaatgcctggcccccacccccttcctcggtctcccctttcaattcagatgtgctgatgtgcagaccggattcatcttctcggagctgcggcggcggctttgggctcaggcggcggcggctcgcgctcggccgcggagtcctggcagcagcggggacgcggcgcgggagtccgagctctggtggcagctgagcccgcggggcgccgctcgccgagccgcggccgcgggaagttcggcagccagaaggacgacctggcaggctgcgagcgccagcgccgccagagccgagtttgcctgcgccctccccgcctccgagtgcagagttccttacctgccctccgcccacccgtgggcccctagccaacttctccctgcgactgggggtaacaggcagtgcttgccctctctactgtcccggcggcatccacatgtttccggacacctgagcaccccggtcccgccgaggagcctccgggtggggagaagagcaccggtgcccctagccccgcacatcagcgcggaccgcggctgcctaacctctgggtcccgtcccctccttttcctccgggggaggaggatggggttgggaacgctttccccgaggatgctcgtgtggctggtggcctcggggattgttttctacggggagctatgggtctgcgctggcctcgattatgattacacttttgatgggaacgaagaggataaaacagagactatagattacaaggacccgtgtaaagccgctgtattttggggcgatattgccttagatgatgaagacttaaatatctttcaaatagataggacaattgaccttacgcagaacccctttggaaaccttggacataccacaggtggacttggagaccatgctatgtcaaagaagcgaggggccctctaccaacttatagacaggataagaagaattggctttggcttggagcaaaacaacacagttaagggaaaagtacctctacaattctcagggcaaaatgagaaaaatcgagttcccagagccgctacatcaagaacggaaagaatatggcctggaggcgttattccttatgttataggaggaaacttcactggcagccagagagccatgttcaagcaggccatgaggcactgggaaaagcacacatgtgtgactttcatagaaagaagtgatgaagagagttacattgtattcacctataggccttgtggatgctgctcctatgtaggtcggcgaggaaatggacctcaggcaatctctatcggcaagaactgtgataaatttgggattgttgttcatgaattgggtcatgtgataggcttttggcatgaacacacaagaccagatcgagataaccacgtaactatcataagagaaaacatccagccaggtcaagagtacaattttctgaagatggagcctggagaagtaaactcacttggagaaagatatgatttcgacagtatcatgcactatgccaggaacaccttctcaagggggatgtttctggataccattctcccctcccgtgatgataatggcatacgtcctgcaattggtcagcgaacccgtctaagcaaaggagatatcgcacaggcaagaaagctgtatagatgtccagcatgtggagaaactctacaagaatccaatggcaacctttcctctccaggatttcccaatggctacccttcttacacacactgcatctggagagtttctgtgaccccaggggagaagattgttttaaattttacaacgatggatctatacaagagtagtttgtgctggtatgactatattgaagtaagagacgggtactggagaaaatcacctctccttggtagattctgtggggacaaattgcctgaagttcttacttctacagacagcagaatgtggattgagtttcgtagcagcagtaattgggtaggaaaaggctttgcagctgtctatgaagcgatctgtggaggtgagatacgtaaaaatgaaggacagattcagtctcccaattatcctgatgactatcgcccgatgaaagaatgtgtgtggaaaataacagtgtctgagagctaccacgtcgggctgacctttcagtcctttgagattgaaagacatgacaattgtgcttatgactacctggaagttagagatggaaccagtgaaaatagccctttgatagggcgtttctgtggttatgacaaacctgaagacataagatctacctccaatactttgtggatgaagtttgtttctgacggaactgtgaacaaagcagggtttgctgctaacttttttaaagaggaagatgagtgtgccaaacctgaccgtggaggctgtgagcagcgatgtctgaacactctgggcagttaccagtgtgcctgtgagcctggctatgagctgggcccagacagaaggagctgtgaagctgcttgtggtggacttcttaccaaacttaacggcaccataaccacccctggctggcccaaggagtaccctcctaataagaactgtgtgtggcaagtggttgcaccaacccagtacagaatttctgtgaagtttgagttttttgaattggaaggcaatgaagtttgcaaatatgattatgtggagatctggagtggtctttcctctgagtctaaactgcatggcaaattctgtggcgctgaagtgcctgaagtgatcacatcccagttcaacaatatgagaattgaattcaaatctgacaatactgtatccaagaagggcttcaaagcacattttttctcagacaaagatgaatgctctaaggataatggtggatgtcagcacgaatgtgtcaacacgatggggagctacatgtgtcaatgccgtaatggatttgtgctacatgacaataaacatgattgcaaggaagctgagtgtgaacagaagatccacagtccaagtggcctcatcaccagtcccaactggccagacaagtacccaagcaggaaagaatgcacttgggaaatcagcgccactcctggccaccgaatcaaattagcctttagtgaatttgagattgagcagcatcaagaatgtgcttatgaccacttagaagtatttgatggagaaacagaaaagtcaccgattcttggacgactgtgtggcaacaagataccagatccccttgtggctactggaaataaaatgtttgttcggtttgtttctgatgcatctgttcaaagaaaaggctttcaagctacacattctacagagtgtggcggacgattgaaagcagaatcaaaaccaagagatctgtactcacatgctcagtttggtgataacaactacccaggacaggttgactgtgaatggctattagtatcagaacggggctctcgacttgaattatccttccagacatttgaagtggaggaagaagcagactgtggctatgactatgtggagctctttgatggtcttgattcaacagctgtggggcttggtcgattctgtggatccgggccaccagaagagatttattcaattggagattcagttttaattcatttccacactgatgacacaatcaacaagaagggatttcatataagatacaaaagcataagatatccagataccacacataccaaaaaataacaccaaaacctctgtcagaacacaaaggaatgtgcataatggagagaagacatattttttttaaaactgaagatattggcacaaatgttttatacaaagagtttgaacaaaaaatccctgtaagaccagaattatctttgtactaaaagagaagtttccagcaaaaccctcatcagcattacaaggatatttgaactccatgcttgatggtattaataaagctggtgaaagggcatcatatacttcaaggaagactctacaagcttttgttcacagcttgaaatagatgcctcacaattcagacagtttaattcaggaactgtgaccctgcagtgttctttttgacaatttgtcaagatttagggacataaaatgatcttgcaggtcgtaaactggaaaacagtattttggttgtcttaggataattgctgactttgtatcttggatacagtgtaaaccagatccatataaggtgaatgtgaaatgggagtcttctgagggtgatttgtactttccatgtgtatgtgtgtgtctggtgtttggaaactgggatatttcagcttcattatttccacttgcaggccagcttaacctctgaaacacaaatgatcttgagaccactttagtgtacttacatttagatgagtttgaaatctcaatggtgtctaattattgcagttaaattctagacatcagttctttaagtctcagaaaacgcccagtgaattggtaaacttagttcttttttttggaagtgctgccttttcacaccaaatccaagaagcctgtgatgtcttatgaaccttatgagaaaactccgaagaggtgtgagcaggattcttctgaatgactgtctggatggttcattactcaagttactgctgctgctattgtctttcctttgttgtcgatctgttattgttgtattattattgttgatgttgtcatggttaatctattttttaaaattgaaatgaagcagaagtaggccttgtgagaactgaaaggtctctttcatttttctcttcctgggattcattttttcaaaacacaatgctggaaaaaaaagatttgtttctgaaagacttcttatggtgctattccataaactttttttcaaacaagtttttgacctttgagccaacccacccgtagactacgaatgtctccctatggctggtagcatttgaagactaaagacttgtcaaatatatcaagagtatatcattgcaagggcagcacttgtcctgtggaacaactacttataatgccttagaattcctgcacatgatcaaacagatcctcctaaaacacaccttttgaaatgttgaacataatagtgtatgttaattaacagctctatgaagaaaatccatttccatgactgaagcattggatataaatatggtgtcctgctttttttgtagaaaatgtaatttgaggatgaattttctgctttaaaggcatgtgtgtttttaaaattaatgaatgtagatgtgtgattgtctgagtgagtgaaactacaagaggtaaaaaataatgggtggttgaaaagttaaaatgtatgtgccaagttctactagaattccatttgaaatagcaccttccttaggtttcatggacaaataatgggaacttctaattttgatcaatcccattaaaaaaaggctctttcctttagagaaactctattttgatgtcaatatagattactgtatgaagtagctttgtgtctgttacctgtccatgagcatacaacattgaatacaattgggtgtattctttcagttttacacaattaaagtatacacacagatgtagcttatctgtttttttcttaaattgttgccctgaaaaaatttcttgcatatgaattgtaaaatgtaaatacatttttataaccaatgttttgatcttattgaatgttactttgaaaatgtataactattgcctgcaatgtagatgagccttttagtagagctgatttattccagtaacttcttccatattttctcactaatctcccgttagccaaaatatgccagaaatgggaaagagaggagaaaaagtcattaacattaacacctatactgttctatactactcctacccgtgtgctaggaatgtgcactagctctttttaaattccatgctacactttgaggactgtcatcatgttctcgttttgtagttcagaaagtgaggctcaaagaatttatgtaaccttcccagagtcacagtgtaaagttagatgttgaaacccagtttatcttatacaaatgagcctctgcttgttctacaaaggtagtagaatcaatctcgacctatataaatagtagattttttatggtgaaactttcccacataaagtaaattttaggggtgaattagagtaaaacttacaggataagcattttgctctttttaagaacagcatgaaatttagaataccaatgatagctatctttaagaatcagaattagtactagaaatttaaaaaaccctatagtttggagttagtatgagccttttgtgaaaataaatatattaaattattttgcctgatgtggtaggggaaatgtattgctctatattaagaaatattctggatattctgattgacatcttattaggccatagtgagctatgctctgcacaactgagaaattaggtatttagaaggcatatagagatgttgtcataactaggtcttcaacgtgaaaattaatttttattgtatcatgtcaagtatcagtttaccacatattatttttatattaattcaacatttgccttaagtgtgttgttaaatgaaagtacagacagcttcattgttgtattgttaataattgttacttactgctccaggcattttattaaattaattttttaaattattttccaccctacatcagtatattggttgtgctttatatttgccaaagtcctaactgactatacatagaaaaaaaaaaaaacactgttctcacttgattttattaaattatttttaaaagtc

SEQ ID NO: 174701 - protein, 1015 aa, Artificial Sequence
  derived and/or modified sequence
MPRATALGALVSLLLLLPLPRGAGGLGERPDATADYSELDGEEGTEQQLEHYHDPCKAAVFWGDIALDEDDLKLFHIDKARDWTKQTVGATGHSTGGLEEQASESSPDTTAMDTGTKEAGKDGRENTTLLHSPGTLHAAAKTFSPRVRRATTSRTERIWPGGVIPYVIGGNFTGSQRAIFKQAMRHWEKHTCVTFIERTDEESFIVFSYRTCGCCSYVGRRGGGPQAISIGKNCDKFGIVAHELGHVVGFWHEHTRPDRDQHVTIIRENIQPGQEYNFLKMEAGEVSSLGETYDFDSIMHYARNTFSRGVFLDTILPRQDDNGVRPTIGQRVRLSQGDIAQARKLYKCPACGETLQDTTGNFSAPGFPNGYPSYSHCVWRISVTPGEKIVLNFTSMDLFKSRLCWYDYVEVRDGYWRKAPLLGRFCGDKIPEPLVSTDSRLWVEFRSSSNILGKGFFAAYEATCGGDMNKDAGQIQSPNYPDDYRPSKECVWRITVSEGFHVGLTFQAFEIERHDSCAYDYLEVRDGPTEESALIGHFCGYEKPEDVKSSSNRLWMKFVSDGSINKAGFAANFFKEVDECSWPDHGGCEHRCVNTLGSYKCACDPGYELAADKKMCEVACGGFITKLNGTITSPGWPKEYPTNKNCVWQVVAPAQYRISLQFEVFELEGNDVCKYDFVEVRSGLSPDAKLHGRFCGSETPEVITSQSNNMRVEFKSDNTVSKRGFRAHFFSDKDECAKDNGGCQHECVNTFGSYLCRCRNGYWLHENGHDCKEAGCAHKISSVEGTLASPNWPDKYPSRRECTWNISSTAGHRVKLTFNEFEIEQHQECAYDHLEMYDGPDSLAPILGRFCGSKKPDPTVASGSSMFLRFYSDASVQRKGFQAVHSTECGGRLKAEVQTKELYSHAQFGDNNYPSEARCDWVIVAEDGYGVELTFRTFEVEEEADCGYDYMEAYDGYDSSAPRLGRFCGSGPLEEIYSAGDSLMIRFRTDDTINKKGFHARYTSTKFQDALHMKK

SEQ ID NO: 174702 - DNA, 3048 bp, Artificial Sequence
  derived and/or modified sequence
atgcccagagccaccgccctgggcgccctggtgagcctgctgctgctgctgcccctgcccagaggcgccggcggcctgggcgagagacccgacgccaccgccgactacagcgagctggacggcgaggagggcaccgagcagcagctggagcactaccacgacccctgcaaggccgccgtgttctggggcgacatcgccctggacgaggacgacctgaagctgttccacatcgacaaggccagagactggaccaagcagaccgtgggcgccaccggccacagcaccggcggcctggaggagcaggccagcgagagcagccccgacaccaccgccatggacaccggcaccaaggaggccggcaaggacggcagagagaacaccaccctgctgcacagccccggcaccctgcacgccgccgccaagaccttcagccccagagtgagaagagccaccaccagcagaaccgagagaatctggcccggcggcgtgatcccctacgtgatcggcggcaacttcaccggcagccagagagccatcttcaagcaggccatgagacactgggagaagcacacctgcgtgaccttcatcgagagaaccgacgaggagagcttcatcgtgttcagctacagaacctgcggctgctgcagctacgtgggcagaagaggcggcggcccccaggccatcagcatcggcaagaactgcgacaagttcggcatcgtggcccacgagctgggccacgtggtgggcttctggcacgagcacaccagacccgacagagaccagcacgtgaccatcatcagagagaacatccagcccggccaggagtacaacttcctgaagatggaggccggcgaggtgagcagcctgggcgagacctacgacttcgacagcatcatgcactacgccagaaacaccttcagcagaggcgtgttcctggacaccatcctgcccagacaggacgacaacggcgtgagacccaccatcggccagagagtgagactgagccagggcgacatcgcccaggccagaaagctgtacaagtgccccgcctgcggcgagaccctgcaggacaccaccggcaacttcagcgcccccggcttccccaacggctaccccagctacagccactgcgtgtggagaatcagcgtgacccccggcgagaagatcgtgctgaacttcaccagcatggacctgttcaagagcagactgtgctggtacgactacgtggaggtgagagacggctactggagaaaggcccccctgctgggcagattctgcggcgacaagatccccgagcccctggtgagcaccgacagcagactgtgggtggagttcagaagcagcagcaacatcctgggcaagggcttcttcgccgcctacgaggccacctgcggcggcgacatgaacaaggacgccggccagatccagagccccaactaccccgacgactacagacccagcaaggagtgcgtgtggagaatcaccgtgagcgagggcttccacgtgggcctgaccttccaggccttcgagatcgagagacacgacagctgcgcctacgactacctggaggtgagagacggccccaccgaggagagcgccctgatcggccacttctgcggctacgagaagcccgaggacgtgaagagcagcagcaacagactgtggatgaagttcgtgagcgacggcagcatcaacaaggccggcttcgccgccaacttcttcaaggaggtggacgagtgcagctggcccgaccacggcggctgcgagcacagatgcgtgaacaccctgggcagctacaagtgcgcctgcgaccccggctacgagctggccgccgacaagaagatgtgcgaggtggcctgcggcggcttcatcaccaagctgaacggcaccatcaccagccccggctggcccaaggagtaccccaccaacaagaactgcgtgtggcaggtggtggcccccgcccagtacagaatcagcctgcagttcgaggtgttcgagctggagggcaacgacgtgtgcaagtacgacttcgtggaggtgagaagcggcctgagccccgacgccaagctgcacggcagattctgcggcagcgagacccccgaggtgatcaccagccagagcaacaacatgagagtggagttcaagagcgacaacaccgtgagcaagagaggcttcagagcccacttcttcagcgacaaggacgagtgcgccaaggacaacggcggctgccagcacgagtgcgtgaacaccttcggcagctacctgtgcagatgcagaaacggctactggctgcacgagaacggccacgactgcaaggaggccggctgcgcccacaagatcagcagcgtggagggcaccctggccagccccaactggcccgacaagtaccccagcagaagagagtgcacctggaacatcagcagcaccgccggccacagagtgaagctgaccttcaacgagttcgagatcgagcagcaccaggagtgcgcctacgaccacctggagatgtacgacggccccgacagcctggcccccatcctgggcagattctgcggcagcaagaagcccgaccccaccgtggccagcggcagcagcatgttcctgagattctacagcgacgccagcgtgcagagaaagggcttccaggccgtgcacagcaccgagtgcggcggcagactgaaggccgaggtgcagaccaaggagctgtacagccacgcccagttcggcgacaacaactaccccagcgaggccagatgcgactgggtgatcgtggccgaggacggctacggcgtggagctgaccttcagaaccttcgaggtggaggaggaggccgactgcggctacgactacatggaggcctacgacggctacgacagcagcgcccccagactgggcagattctgcggcagcggccccctggaggagatctacagcgccggcgacagcctgatgatcagattcagaaccgacgacaccatcaacaagaagggcttccacgccagatacaccagcaccaagttccaggacgccctgcacatgaagaagtag

SEQ ID NO: 174703 - DNA, 3048 bp, Artificial Sequence
  derived and/or modified sequence
atgccccgagcgacagctcttggggcactggtctccctacttctgttgctccccctgccgcgaggggcagggggactaggagagaggcccgacgcaactgcggactactccgagctggatggcgaggaaggcactgagcagcagctggagcattatcacgatccatgcaaggccgcagtgttctggggcgacatcgccctggacgaggatgacttaaaactcttccacatcgacaaggctagagattggaccaagcagaccgtcggtgccacaggacacagcaccggggggctcgaagagcaggcctctgagtctagtccagacaccacagctatggacacgggaaccaaagaggccggcaaagatggcagagaaaatacaaccctgctgcacagcccaggtacactccatgctgcagcgaagacattctccccccgggtgcggagagcaaccaccagtagaacagagcgtatatggcctgggggggtgatcccatacgtaatcggtgggaacttcactggatctcaaagggctatatttaaacaggccatgaggcactgggagaagcacacctgcgtgactttcatcgaacggacagacgaggaatccttcattgttttctcctacaggacgtgtggctgttgcagttatgtgggccgccggggaggtggtccacaagcaatcagcataggcaaaaattgtgataagtttgggatcgtcgctcacgagcttggtcacgtcgtgggattctggcatgagcacaccaggcccgacagggatcagcatgtaaccataataagggagaacatacagcccggacaggaatacaacttccttaaaatggaagcaggagaggtgagcagccttggggagacctatgactttgactcaattatgcactacgcccgaaacaccttctcccggggagtgttcctcgataccatacttcctaggcaggatgacaacggcgtccgtcccacaatcggacaaagggtgcgactctcacaaggggatattgctcaagctcgaaagctttacaagtgccccgcctgtggcgagacactgcaggataccacagggaattttagcgcaccagggttcccgaatgggtacccctcatattcccactgcgtgtggcgcatatctgttacccctggagaaaaaattgtgctcaatttcacctcaatggatctgttcaaatcccgcttgtgttggtacgattatgtcgaagtgcgggatgggtactggagaaaggccccactgctcggacgcttttgtggcgataaaatccccgagccactggtgagtaccgacagcaggctttgggtggagttccggtcgtcttctaatatcctaggaaagggattttttgccgcctacgaggccacatgcgggggcgatatgaataaagacgctggacaaatccaatcccccaattatcccgatgactaccggcccagcaaggagtgtgtttggcggattactgtgtccgaggggtttcacgtggggctgacgttccaagcttttgagatagagcgccacgattcttgtgcatatgattatctggaagtccgcgacggaccaaccgaggagtctgctctaatcggacatttttgcggatacgagaaacccgaggatgtgaagtcatctagtaatcggctgtggatgaagtttgtgtcggatggatcgatcaataaagccggcttcgctgctaacttcttcaaggaagtcgatgaatgtagttggcctgatcacggaggctgcgagcaccggtgcgtgaatacactgggatcgtacaaatgtgcttgcgaccccgggtatgagcttgctgccgacaagaagatgtgtgaggtggcctgtggaggattcatcacgaagctgaatggaacgattacctcccccgggtggcccaaagaatatccgacaaataaaaattgtgtgtggcaggtagtcgcccctgctcagtatcgtattagcctacagtttgaagtgttcgagttagagggcaatgacgtctgcaagtatgacttcgttgaagtgcgatccgggctttcccctgatgcaaaactgcatgggagattttgtgggtccgaaactcctgaggtcattacttctcagtctaataacatgcgagtcgaattcaaaagcgataatacggtctcgaagcgcggatttagagcccacttcttttctgacaaggatgagtgtgccaaggataatggcggatgccaacacgagtgcgtcaacacatttggctcatacctctgtagatgccggaatggctattggcttcacgagaatggccatgattgcaaagaggcaggctgcgctcacaaaattagctcagtagagggaacactcgcaagtccaaattggccggataagtacccctcacgcagagagtgtacatggaacatctcctccaccgcaggacacagggtgaagcttactttcaacgagttcgagattgaacaacatcaggaatgcgcctacgaccatttggaaatgtatgatggccctgactctctggctccaatcttgggacgcttctgtggaagcaaaaagcctgacccaactgtcgctagcggaagtagcatgtttttacgattctactccgacgcctcagtgcagcgcaaggggttccaggccgtacacagtaccgagtgcggaggtcggctcaaggccgaggtccagacaaaggagctgtattcacacgcgcaattcggggataataattatccttccgaagccagatgcgattgggttattgtggctgaggacggttatggtgtggagctgacctttagaacattcgaggtagaagaagaggctgattgtggctacgattatatggaggcctacgacggctacgatagtagcgctccaagacttggcaggttttgtggatccggccccctggaggaaatctacagcgctggagattccttgatgataaggttccgaaccgacgatacaataaataagaaaggattccacgctcgatacacaagtaccaaattccaggacgctttacacatgaagaagtag

SEQ ID NO: 174704 - DNA, 3048 bp, Artificial Sequence
  derived and/or modified sequence
atgccccgggccacagccctgggcgccctggtgtccctgctgctgctgctgcccctgcccagaggagctgggggcctgggggagaggccagatgccacagctgactacagcgagctggatggagaggagggcacagagcagcagctggagcactaccatgacccctgcaaggctgctgtgttctggggagacatcgccctggatgaagatgacctgaagctgttccacatcgacaaggcccgggactggaccaagcagacagtgggcgccaccggccacagcactggaggcctggaggagcaggccagcgagagcagcccagacaccacagccatggacaccggcaccaaggaggccggcaaggatggaagagagaacaccaccctgctgcacagccctggcaccctgcacgccgccgccaagaccttcagcccccgggtgcggcgggccaccaccagcaggacagagcgcatctggccaggcggcgtcatcccctacgtgattggaggcaacttcaccggcagccagagggccatcttcaagcaggccatgaggcactgggagaagcacacctgtgtgaccttcatcgagaggacagatgaggagagcttcatcgtgttctcctaccgcacctgtggctgctgcagctatgtgggccggcggggcggcggcccccaggccatcagcatcggcaagaactgtgacaagtttggaattgtggcccacgagctgggccacgtggtgggcttctggcatgagcacaccaggccagaccgggaccagcacgtgaccatcatccgggagaacatccagcccggccaggagtacaacttcctgaagatggaggccggggaggtgagcagcctgggggagacctatgactttgacagcatcatgcactacgccaggaacaccttcagcagaggagtcttcctggacaccatcctgccccggcaggatgacaacggggtgcggcccaccatcggccagagggtgcggctgagccagggcgacatcgcccaggccaggaagctgtacaagtgcccagcctgtggggagaccctgcaggacaccactggaaacttcagcgcccctggcttccccaacggctaccccagctacagccactgtgtgtggaggatctctgtgaccccaggagagaagatcgtgctgaacttcacctccatggacctcttcaagagccggctgtgctggtatgactatgtggaggtgagagatggctactggaggaaggcccccctgctgggccgcttctgtggggacaagatccctgagcccctggtgtccacagacagccggctgtgggtggagttccgcagcagcagcaacatcctgggcaagggcttctttgctgcctatgaggccacctgtggcggggacatgaacaaggatgctggccagatccagagccccaactacccagatgactaccggcccagcaaagaatgtgtgtggaggatcaccgtgtctgagggcttccacgtgggcctgaccttccaggcctttgaaattgaaagacatgacagctgtgcctatgactacctggaggtgagagatggccccacagaggagagcgccctgattggccacttctgtggctatgagaagccagaagatgtgaagagcagcagcaaccggctgtggatgaagtttgtgtctgatggcagcatcaacaaggccggctttgctgccaacttcttcaaggaggtggatgaatgttcctggccagaccatggaggctgtgagcaccgctgtgtgaacaccctgggcagctacaagtgtgcctgtgaccccggctatgagctggccgctgacaagaagatgtgtgaggtggcctgtggcggcttcatcaccaagctgaatggcaccatcaccagccctggctggcccaaggagtaccccaccaacaagaactgtgtgtggcaggtggtggccccagcccagtaccgcatcagcctgcagtttgaggtgtttgagctggagggcaatgatgtgtgcaagtatgactttgtggaggtgcgcagcggcctgagcccagatgccaagctgcacggccgcttctgtggcagcgagaccccagaggtgatcaccagccagagcaacaacatgagggtggagttcaagagtgacaacacagtgtccaagaggggcttccgggcccacttcttcagtgacaaggatgaatgtgccaaggacaatggaggctgccagcatgaatgtgtgaacaccttcggcagctacctgtgccgctgcagaaatggctactggctgcatgaaaatggacatgactgcaaggaggccggctgtgcccacaagatcagctctgtggagggcaccctggccagccccaactggccagacaagtaccccagcagaagagaatgtacctggaacatcagcagcacagctggccaccgggtgaagctgaccttcaatgaatttgaaattgagcagcaccaggagtgtgcctatgaccacctggagatgtatgatggccctgacagcctggcccccatcctgggccgcttctgtggcagcaagaagccagaccccaccgtggccagcggcagctccatgttcctgcgcttctacagtgatgcctctgtgcagaggaagggcttccaggccgtgcacagcacagaatgtggcggccgcctgaaggccgaggtgcagaccaaggagctgtacagccacgcccagtttggagacaacaactaccccagcgaggcccgctgtgactgggtgattgtggccgaggatggctatggagtggagctgaccttccgcacctttgaggtggaggaggaggccgactgtggctatgactacatggaggcctatgatggctatgacagcagcgccccccggctgggccgcttctgtggcagcggccccctggaggagatctacagcgctggggacagcctgatgatccgcttcagaacagatgacaccatcaacaagaagggcttccacgcccgctacaccagcaccaagttccaggatgccctgcacatgaagaagtag

SEQ ID NO: 174705 - DNA, 3048 bp, Artificial Sequence
  derived and/or modified sequence
atgccccgggccaccgccctgggcgccctggtgagcctgctgctgctgctgcccctgcctcgcggtgctggaggcctgggcgaacgccccgatgcaactgccgactacagcgaactggacggagaggagggtactgaacagcagctagaacattaccacgacccatgcaaagccgccgttttttggggggacattgctttagacgaggacgacttaaagctgttccatattgataaagcccgggattggaccaaacagacagtgggcgctaccggccactcgaccgggggtttggaggagcaagcctccgagtccagtccagacacaaccgccatggacacgggaactaaggaggccggaaaggacggccgcgaaaatactaccctgctccacagccccggtacccttcatgctgcagcgaaaaccttctcccctcgcgtccggcgagccaccacaagtcgtaccgagagaatctggcctggaggcgtgattccttatgtcattggaggcaattttaccggcagtcagcgggcaatctttaaacaggcaatgcgccattgggaaaagcacacatgcgttactttcatagagaggacagacgaggagtcgttcattgtattttcttatcggacctgtggttgctgttcttacgttgggaggcgagggggcggccctcaggccatctcaattgggaagaattgcgacaagttcggcattgttgcacacgagctcggccatgtagtgggcttctggcatgagcacacgagaccggaccgtgatcagcatgtgacaatcattagagagaacatccagccagggcaggagtataatttccttaagatggaggcaggagaagtctcgtctctcggcgaaacatacgactttgattcaattatgcactatgccaggaatacattctcccgcggcgtgttcctggataccatccttccaagacaagatgacaacggcgtaagaccgaccattgggcaaagggtaaggctttcacaaggggacatagctcaagcccgcaaactgtacaaatgcccagcatgtggcgaaactcttcaggacacaaccggtaacttcagcgcccctggatttcctaatggctatccatcatactcacattgtgtttggcggatctctgtaacccccggggagaagatcgtcctgaacttcaccagcatggacttgttcaaatctagactctgctggtatgactacgtggaggttcgggatggatactggcgcaaagcgcccctgctggggcgtttttgtggcgacaagattccagagccactggtcagtacagacagcagattatgggtcgagtttaggtcctcgtctaatattctcgggaagggcttttttgccgcctacgaggccacatgtggtggggacatgaacaaagatgctggccaaattcagtctccaaattatccggatgattaccgaccatccaaagagtgtgtgtggcgaatcaccgtaagtgagggcttccacgtgggccttaccttccaagcctttgagatcgaaaggcatgatagctgcgcttacgactatcttgaggtgagagacgggccaacagaagagagcgccctgatcggacatttttgcggttatgaaaagcccgaggacgtgaagtcgtcaagtaaccgtttgtggatgaagtttgtttctgacgggtcaattaataaggcagggtttgcagccaatttctttaaagaagtagatgagtgttcctggccagaccatggggggtgtgagcatcggtgcgtaaacacattgggatcctacaaatgcgcatgtgaccctggatatgagctcgccgctgacaagaaaatgtgcgaggtggcctgcggcggcttcatcaccaagctgaatggcacaatcacgagcccagggtggccaaaggagtatccgaccaacaagaattgtgtttggcaggttgtggctcctgctcagtaccggatcagcctccagtttgaggtatttgagctcgaaggcaacgatgtatgcaagtatgattttgtggaggtccggtcagggctgtctcccgatgccaagctgcatgggcgtttctgcgggagcgagactccggaggtcattacctcacagtctaacaatatgagggtcgagttcaagtcagacaataccgtgtccaaacgaggtttccgagcacacttcttttcggacaaggacgaatgtgctaaggacaacggaggttgccaacatgagtgcgtgaacacgttcggttcctacctgtgtcgatgccggaacggatactggctgcacgagaacggtcatgattgcaaggaggcgggttgtgcccataaaatcagcagtgttgagggtaccctagcgtctcccaactggcccgacaaatacccttcaagacgggagtgcacttggaacatctctagcaccgctggccaccgcgtcaaactgacattcaacgaattcgaaattgagcaacatcaggaatgtgcttatgaccacctggaaatgtacgacggacctgattccttagcccccatactcggacggttttgtggaagtaaaaaaccagaccctaccgtggcaagcggaagcagcatgtttctgcgcttctatagcgacgcctccgtgcaaagaaaagggtttcaggccgtgcactctactgagtgtggcggtcggttaaaagccgaggtccagaccaaggagctatactctcatgcacagtttggcgataataactatcctagtgaggcccgttgtgattgggtgattgtcgcagaagatggctacggagtggaattgaccttccgcacattcgaagtagaggaagaagccgattgtgggtacgactatatggaagcctacgatgggtatgatagtagcgctcccagactgggacggttttgtggatctggaccactggaggaaatttacagcgcaggggacagtttgatgattcggttccggacggatgacaccataaataaaaaaggtttccacgctcgatatacttctacaaagttccaggacgcactgcacatgaagaagtag

SEQ ID NO: 174706 - DNA, 3048 bp, Artificial Sequence
  derived and/or modified sequence
atgcccagggctaccgccttgggggctcttgtgtctcttctattactgctgccgctgcccagaggtgccggtgggctgggagaacgcccagatgccaccgccgattactctgagttagacggtgaagaaggcacagaacagcagctggaacactaccacgacccatgtaaggcagcggtgttctggggcgatatcgcgttagatgaagacgatcttaagttattccacatagataaggccagggactggaccaagcagacagtaggggctacaggacatagcacaggcggtttagaagaacaggcatccgagagctcccccgacaccactgccatggacaccgggactaaagaagcaggaaaagatgggcgagagaataccacactgctgcattcacctggaactttacacgctgcggctaaaaccttttctcccagagttagacgggcaacaaccagtcgcaccgaacggatctggcccggaggtgtgattccctacgtgataggtggcaactttactgggtcacaaagggccatattcaaacaggcgatgcgccattgggagaaacacacgtgcgtgacattcatcgaacggacagacgaagaatcctttattgtcttttcataccggacctgtgggtgttgctcctacgtgggaaggagaggaggcggaccacaagcgatcagcatcggcaagaactgcgacaagtttggcattgtggctcacgagctcggacacgtggtcggcttttggcatgaacacactcgcccagatcgcgatcaacatgtgacaatcattcgggaaaacatccagccaggtcaggaatataattttctgaaaatggaagctggtgaggttagctcactcggggaaacctatgactttgactcaattatgcattatgcgcgaaacactttctcccgtggggtgttcctagacacaatcttgcctcgccaagatgataatggcgttcgcccaacaataggtcagcgtgtccgcttgtcccagggtgacattgcccaggctcggaaactgtacaaatgccctgcctgtggggaaacccttcaggacacaactggtaattttagtgcccctggattccccaatggctatccaagttacagccactgcgtatggcgtattagtgtgacacctggagagaaaatcgtgttaaactttacgtctatggacctcttcaaatctcggttatgctggtacgactatgttgaagtgagggacggatattggcgaaaagcacctctcctcggtagattctgtggcgataaaatccctgagccccttgtttccacggactcacgcttgtgggtcgagtttaggagttcctccaacatactgggaaaaggcttttttgcagcatacgaagctacgtgtggaggagatatgaacaaggatgcgggacagatccagagccctaattacccagatgattaccgaccatccaaggagtgtgtgtggcgaattaccgtgtccgagggttttcatgtgggccttactttccaagcgttcgagattgagagacatgatagttgcgcttacgactatctggaagttcgagatggccctacagaggagtccgcgctgatcgggcatttctgcggctatgagaagcccgaagacgtgaaaagctcaagcaaccggctgtggatgaagttcgtatcagacggtagcatcaataaggccggattcgcagctaacttttttaaagaggtcgacgagtgttcctggcctgaccatggaggatgcgaacataggtgcgtgaataccctcggttcatataaatgcgcatgcgatccgggttatgagcttgctgctgacaagaaaatgtgtgaggtggcctgcgggggattcatcaccaagctcaatggcactattacctctcctggctggcctaaggagtatcccaccaacaagaattgtgtttggcaggttgtagcccctgcacagtaccgaatcagcctccagttcgaggtgttcgagcttgaaggcaacgacgtctgcaaatatgactttgtggaggtgaggagcggcctctcccctgatgccaaactgcatggccgattctgcggtagcgaaaccccggaggtgattacttcccagtcaaataacatgagggtggagtttaaatccgataacactgtctccaaaagaggattccgggcacattttttttctgacaaggacgaatgtgccaaggataacggcggatgccaacacgagtgtgtgaacactttcggtagttacctgtgccggtgcagaaacggatactggctgcatgagaatggccatgattgtaaagaggccggatgcgctcataagatctcctcagttgagggcaccttggccagtcctaactggcccgataagtatccatcccgaagagagtgtacgtggaatatatcatccacagctggtcaccgggttaaactgacgttcaatgaattcgagattgagcagcaccaggaatgtgcctacgatcacctggaaatgtacgacggaccagacagtcttgcaccgatcttgggaaggttttgcggtagcaagaagccagacccaaccgtcgccagtggttcatcgatgtttctcagattctactccgacgccagcgtgcagcggaaagggttccaggccgtccattcaacagagtgcggtggcagactgaaagccgaggtccaaaccaaggaactgtactctcacgcacaattcggggacaacaactacccatccgaggcaaggtgtgactgggtgatcgtggcagaagacggatatggcgttgagctgactttccgaacttttgaggtggaggaggaggccgattgtgggtacgattatatggaagcgtacgatggttatgatagctctgccccacggctgggtagattctgtgggtcaggtccactggaggagatttactcagccggtgacagtctaatgattcgcttcagaacagatgacactatcaataagaagggcttccacgcaaggtatacttcaacgaaatttcaggacgctttacacatgaagaagtag

SEQ ID NO: 174707 - DNA, 6756 bp, Artificial Sequence
  derived and/or modified sequence
gcagcctcggccgccgggcaagtagctccgagcggctgcttcccggttgcctcgacgaagacagggggcgccgcgctccgcttgctccgcgcctgagccatgcccagcagccctgtgtaaccaccgagtcccggccggagccgaccgacccagtgtgcgccgtctttcggccgagctgagctttcgtgcacgcaactccctctgccccagccggccccgcgccaccatgccccgggcgactgcacttggggccctggtgtcactgctgctgctgctgccgctgcctcgcggcgccgggggactcggggagcgcccggacgccaccgcagactactcagagctggacggcgaggagggcacggagcagcagctggagcattaccacgacccttgcaaagccgctgtcttttggggagacattgccttagatgaagatgacttgaagctgtttcacattgacaaagccagagactggaccaagcagacagtgggggcaacaggacacagcacaggtgggcttgaagagcaggcatctgagagcagcccagacaccacagccatggacactggcaccaaggaagctggaaaggatggccgggagaataccacactcctgcacagccctgggaccttgcatgccgcagccaagaccttctctccccgggtccgaagagccacaacctcaaggacagagaggatatggcctggaggagtcatcccctacgtcattggagggaacttcactgggagccagagggccatttttaagcaggccatgagacactgggagaagcacacctgtgtgaccttcatagaaaggacggatgaggaaagctttattgtattcagttacagaacctgtggctgttgctcctatgttgggcgccgaggaggaggcccacaggccatatccattgggaagaactgtgacaagtttggcattgtggctcacgagctgggccatgtggttgggttttggcatgaacacacccggccagacagagaccaacatgtcaccatcatcagggaaaacatccagccaggtcaggagtataatttcttaaaaatggaagctggggaagtgagctctctgggagagacatacgactttgacagcatcatgcactacgcccggaacaccttctcaagaggagttttcttagacaccatccttccccgtcaagatgacaatggcgtcaggccaaccattggccagcgcgtgcggctcagtcagggagacatagctcaagcccggaagctgtacaaatgcccagcgtgtggggagaccctgcaggacacaacgggaaacttttctgcacctggtttcccaaatgggtacccatcttactcccactgcgtctggaggatctcggtcaccccaggggaaaagatcgtattaaacttcacatccatggatttgtttaaaagccgactgtgctggtatgattacgtggaggtccgggatggttactggagaaaagccccccttttgggcaggttttgtggcgataagatcccggagcccctcgtctccacggacagccggctctgggtggagttccgcagcagcagcaacatcttgggcaagggcttctttgcagcgtacgaagctacctgcgggggagacatgaacaaagatgccggtcagattcaatctcccaactatccggatgactacagaccttccaaggaatgtgtctggaggattacggtttcagaggggtttcacgtgggacttaccttccaagcttttgagattgaaaggcacgacagctgtgcatatgactacctggaagtccgggatggccccacggaagagagtgccctgatcggccacttttgtggctatgagaagccggaggatgtgaaatcgagctccaacagactgtggatgaagtttgtgtccgatggctctatcaataaagcgggctttgcagccaattttttcaaggaggtggatgagtgttcctggccagatcacggcgggtgcgagcatcgctgtgtgaacacgctgggcagctacaagtgtgcctgtgaccctggctacgagctggccgccgataagaagatgtgtgaagtggcctgtggcggtttcattaccaagctgaatggaaccatcaccagccctgggtggccgaaggagtatcccacaaacaaaaactgtgtctggcaggtggtggcccccgctcagtaccggatctcccttcagtttgaagtgtttgaactggaaggcaatgacgtctgtaagtacgactttgtagaggtgcgcagcggcctgtcccccgacgccaagctgcacggcaggttctgcggctctgagacgccggaggtcatcacctcgcagagcaacaacatgcgcgtggagttcaagtccgacaacaccgtctccaagcgcggcttcagggcccacttcttctcagataaggacgagtgtgccaaggacaacggcgggtgtcagcatgagtgcgtcaacaccttcgggagctacctgtgcaggtgcagaaacggctactggctccacgagaatgggcatgactgcaaagaggctggctgtgcacacaagatcagcagtgtggaggggaccctggcgagccccaactggcctgacaaataccccagccggagggagtgtacctggaacatctcttcgactgcaggccacagagtgaaactcacctttaatgagtttgagatcgagcagcaccaggaatgtgcctatgaccacctggaaatgtatgacgggccggacagcctggcccccattctgggccgtttctgcggcagcaagaaaccagaccccacggtggcttccggcagcagtatgtttctcaggttttattcggatgcctcagtgcagaggaaaggcttccaggcagtgcacagcacagagtgcgggggcaggctgaaggctgaagtgcagaccaaagagctctattcccacgcccagtttggggacaacaactacccgagcgaggcccgctgtgactgggtgatcgtggcagaggacggctacggcgtggagctgacattccggacctttgaggttgaggaggaggccgactgcggctacgactacatggaagcctacgacggctacgacagctcagcgcccaggctcggccgcttctgtggctctgggccattagaagaaatctactctgcaggtgattccctgatgattcgattccgcacagatgacaccatcaacaagaaaggctttcatgcccgatacaccagcaccaagttccaggatgccctgcacatgaagaaatagtgctgatgttcttgaaagacagaaactgagaattttttttgttttgttttgtttttaacaacaatagcaccttgaaaatctgccctaaaacagtgtacagtatttttctcaaacaaaaactcagaatccagccttagaggtatatatttgaatgaaagtcttgtaagtttggccaacaaggtggagagaaaaatgttcttttgcttctgtctgcaatgttatcattcatgaactgttaaagtgttaaagattaggattgaagtcactgaccattccggctatgcttcttcataccattctccttgtcccttgctcctatgtggcaaaaggtcagccttggggttggccgttcctctaatctggacttgcttgcaaaggtgccaggctgtcttctgtccatgttgggcataagggatgaaaacttggccgagactaatgtgtggcccacagctttggctggaatcattttctttctctctgccagggacatgtcaaccaagaaacctgaaaatatggatggatgtcaggactaaaaaaaggcatcacagtgagcagtgagcacagagggagtttcgagtataagaatcattgtcatgaagttaggagaccacaaagccatttctcagagtcattcactctccttgtccctttggtttccccccctccctaattgcagtgggggctaaggcatccattatgaatacagcagaacatttgctggcgagagtcctgtctgctgagaagacaatattgtggctcgtcctgatatttttttcattcattgactttgagaagactccacctgtgcttggaattccatgggcttcaaagaacatttcttcttttagctttggaggcacttgccgtggcacacctggactccttgacatccaattcaaactgcatttgcaaaatgtgcaaagacctcttatgagggaccaattcaggtcccttatggggtgaacactgttgaagactggttaattataagttatgtaagaatcatcgccttgtggaacaagtcaatcagtgactagcttcctgtagccaatcaggttaaagagtgcgttggtaactttgctctgattaactagtattcaatcaccaacttgcaaacagaattcataacacttggcacttgttctagagaagtgtagaggatgatgtttacataattttagcacctcaaggtataatttaaacagtgaggtagttttgaatggcatttcattaaggcatctatgggcattatgagctaaaagctgtggtatgttagctttaaaagagtatttatgttggaataatttttaaataatgtttacataactgtaagtcctgtttggttgttgttggacgcagggcggcacatgagtgtttttggttagagccaagatagctcccatgcaccggaattcctttgggatgaatcagcatcattttaaacaaagtatatgtaaaaggtgaaaggttatattttttacagatcagaatgtggcaccagaggactgtgtctcattaaagtgattgctgggagcaaaaactagaatgatacaaagaaaggtcagagaaatgcatgggaatattttttccttaaaacagaaaaaaattaaagtattattaataatatatgtctgtatatatgtatgtatgtaaaagatcagctgtcaaagccttaatcaatgcagtgtggaaaatgccaacccctggtcctcgctttactgtgggccctgcaggactggctctccatttcctgcctctcctttcaccaagctctgttttggcctttctcggccctggactgaggctcagcctacacgctcatattgtgcatatggcagaccctgcccagcgtgcgctttgatacagcaaatggagcagctgacctcatggctccaatcccacctgcctgttagggtagattccatttatctgatttttgtattttctgaggttttatttggtctcatcttgtctatgagagttgaaactggaactgggaaacctaagatgggtgttatggttctttctccaaggaaataaaaattctgcagttttaacctttagaagtctaagcaagattaacaaatttcatagaaaagtgggagggagtcagaaacagagttggtgctgctcagcaggacggtgaaacaatgatacttctttttatctctttagtatgaacattttcaaaaacacacagcttcaacaattgtcaccatatggccaatttgcaacaatgggactcttatgaaaaacctttatttaggccttctgtgtgacgtatccacagaaaagagaagctctgattcagctggggctagctgggccgctcctctggaagcccacacttgtggggacttaggcatgacacaggttcttgcaaagaaactagaggctggcttcactagagagagtccattcagcagaaagtcccaggcctctgccttggtgcttccaattatcagtgacctgcctgcaagcatccccagaagcaaacagcagaggtagaagatatcactgcagcctgctttgtgctttaattgggtaccaagctttggggatgacagtgagttgcaagaatagttttagttcagagaattgtcttaggacaacaggctaatgaaggatttggggtctgggtttttagcctggctccgttctggtgtaacccggtctagcaaaagctaagcctggattgcagggcaggaaaaaatctggaattaactttagccagtggaatttcttcaaacagagaaagagaggctgttcattgatccactattccctctattttcctctaaggtaaatatttagaggtatttacctgtaaggtgaagtttcctttttatttctactttacaatttctctctaaagcaagcttgtccaacccttggcccaggacggctttgaatatggcccgacacaaattcgtaaactttttaaaaaacattgtaagattctttctgtgatttttttttttctcgtcagctatcgttagtgtattttatgtgtggcccaagataattcttcttccaatgtggcccagggaagccaaaagatgggacacccctgctgtaaagtttcatatcactcatgaattgctcagctgatttaaataatttgtaaaatcctgctaactagcaaattcacattgagattttctattgattgggtccctttgatagctttcagattggtattgttagcgttccatttgtgaacaaatgttcccttggctttagcagatgtttttaaagtttcttttgtagaccgaacttctgaagagtaataccaaatgcctaaaattttatttttaaaaaggaaaattgtttaaagtattatatgtaaacatatgggtattttttattttgtgtaattttacatttcatgaaatgatgtcagtttcaaagagaaagtggagaggacctaacatatgtctctacctagaacggatggtttcattaaagaatgtggatttatt

SEQ ID NO: 174708 - protein, 245 aa, Artificial Sequence
  derived and/or modified sequence
MAEIHTPYSSLKKLLSLLNGFVAVSGIILVGLGIGGKCGGASLTNVLGLSSAYLLHVGNLCLVMGCITVLLGCAGWYGATKESRGTLLFCILSMVIVLIMEVTAATVVLLFFPIVGDVALEHTFVTLRKNYRGYNEPDDYSTQWNLVMEKLKCCGVNNYTDFSGSSFEMTTGHTYPRSCCKSIGSVSCDGRDVSPNVIHQKGCFHKLLKITKTQSFTLSGSSLGAAVIQRWGSRYVAQAGLELLA

SEQ ID NO: 174709 - protein, 160 aa, Artificial Sequence
  derived and/or modified sequence
MAEIHTPYSSLKKLLSLLNGFVAVSGIILVGLGIGGKCGGASLTNVLGLSSAYLLHVGNLCLVMGCITVLLGCAGWYGATKESRGTLLFCILSMVIVLIMEVTAATVVLLFFPIVGDVALEHTFVTLRKNYRGYNEPDDYSTQWNLVMEKGLSKYFFSSL

SEQ ID NO: 174710 - DNA, 738 bp, Artificial Sequence
  derived and/or modified sequence
atggccgagatccacaccccctacagcagcctgaagaagctgctgagcctgctgaacggcttcgtggccgtgagcggcatcatcctggtgggcctgggcatcggcggcaagtgcggcggcgccagcctgaccaacgtgctgggcctgagcagcgcctacctgctgcacgtgggcaacctgtgcctggtgatgggctgcatcaccgtgctgctgggctgcgccggctggtacggcgccaccaaggagagcagaggcaccctgctgttctgcatcctgagcatggtgatcgtgctgatcatggaggtgaccgccgccaccgtggtgctgctgttcttccccatcgtgggcgacgtggccctggagcacaccttcgtgaccctgagaaagaactacagaggctacaacgagcccgacgactacagcacccagtggaacctggtgatggagaagctgaagtgctgcggcgtgaacaactacaccgacttcagcggcagcagcttcgagatgaccaccggccacacctaccccagaagctgctgcaagagcatcggcagcgtgagctgcgacggcagagacgtgagccccaacgtgatccaccagaagggctgcttccacaagctgctgaagatcaccaagacccagagcttcaccctgagcggcagcagcctgggcgccgccgtgatccagagatggggcagcagatacgtggcccaggccggcctggagctgctggcctag

SEQ ID NO: 174711 - DNA, 738 bp, Artificial Sequence
  derived and/or modified sequence
atggcagagatccacaccccttatagcagcctcaagaagctgctaagcctcctgaacgggttcgtggccgtgagtggaattattctagttggtttaggcataggaggaaagtgcggcggtgcgtctcttaccaatgtcctggggctgagtagcgcttatctcctgcatgtgggaaacctgtgccttgtaatgggatgcataactgtgcttcttgggtgcgcagggtggtacggcgctactaaggaatcacgggggactctgctgttctgtattctttcaatggttattgtgctgatcatggaggtgacagcagccaccgtggtcctactgtttttccctatagttggcgacgtggctctcgagcacacatttgttactctcaggaaaaactatcgcggatataatgagcccgatgattatagcacacagtggaacttggtgatggaaaagctgaagtgttgcggggtaaacaattacactgatttttccggaagtagcttcgagatgacaaccggccatacatatccgcggtcttgttgtaagagcattggcagcgtttcttgcgacggccgcgatgttagcccaaacgtaattcaccagaaagggtgcttccataagctcctcaaaataacaaagacacagagttttactctgagtgggagctccctcggcgctgctgtcatacagagatggggcagcagatacgtggctcaagccggcctggagctcctagcatag

SEQ ID NO: 174712 - DNA, 738 bp, Artificial Sequence
  derived and/or modified sequence
atggccgagatccacaccccctacagcagcctgaagaagctgctgagcctgctgaatggatttgtggccgtgtctggcatcatcctggtgggcctgggcatcggcggcaaatgtggcggggccagcctgaccaacgtgctgggcctgagcagcgcctacctgctgcacgtgggcaacctgtgcctggtgatgggctgcatcaccgtgctgctgggctgtgccggctggtatggagccaccaaggagagccggggcaccctgctcttctgcatcctgtccatggtgattgtgctgatcatggaggtgacagctgccaccgtggtgctgctcttcttccccatcgtgggagatgtggccctggagcacacctttgtgaccctgaggaagaactaccggggctacaatgaaccagatgactacagcacccagtggaacctggtgatggagaagctgaagtgctgcggcgtgaacaactacacagacttcagcggcagcagctttgagatgaccaccggccacacctaccccaggagctgctgcaagagcatcggctctgtgtcctgtgatggaagagatgtgagccccaacgtcatccaccagaagggctgcttccacaagctgctgaagatcaccaagacccagagcttcaccctgagcggcagcagcctgggcgccgccgtcatccagcgctggggcagccgctacgtggcccaggccggcctggagctgctggcctag

SEQ ID NO: 174713 - DNA, 738 bp, Artificial Sequence
  derived and/or modified sequence
atggccgagatccacaccccctacagcagcctgaagaagctgctgtcacttctcaacggatttgtggcagtgagcggcattatccttgtgggattaggtataggggggaagtgtggtggcgctagcctgactaatgtcctgggcctctcatccgcttatctgcttcacgtgggtaatctatgtcttgtaatgggatgtatcactgtcttgctgggctgcgccgggtggtatggtgccacaaaagaatctaggggtacacttttgttctgtatcttgtcgatggttatcgttctgattatggaagtgacagccgcaactgtggtgctgctgttcttcccaatcgtgggagatgtggctctcgagcatacatttgtcaccctgagaaagaattaccgcggctacaatgagcccgatgactactccacacaatggaacctggtaatggaaaagctgaagtgttgcggcgtaaacaattacaccgacttcagtgggtcttccttcgagatgactaccggacacacctacccgcgctcatgttgtaagagcatcggatccgtgtcctgcgacgggcgcgatgtttcacccaatgttattcaccagaagggatgcttccacaaattgctaaaaattacaaaaactcagagctttacgctgagcggctcttcattgggagccgctgtgattcagcgctgggggtccagatacgtggcacaggccgggctagagctcctggcctag

SEQ ID NO: 174714 - DNA, 738 bp, Artificial Sequence
  derived and/or modified sequence
atggcagaaatccataccccctactcgtcactgaaaaaactgctgtcactactgaacggctttgtcgctgtgtctggaattatcctcgtgggcctgggtatcggaggaaagtgtggaggcgcttcactgacaaatgtgctcggcctctcctccgcctacctgttgcacgtgggaaacctgtgcctggtgatggggtgcatcacagtgttgctcggatgtgcaggatggtatggcgcaaccaaagagagcagaggcaccctgctgttttgcatcctgagcatggttattgttctgattatggaggtcaccgcggctaccgtggtcctgttgttttttcccattgtgggcgacgttgccctggaacacacattcgtaacattgcgcaagaactaccggggatacaacgagcccgacgattactctacacagtggaacctggtcatggaaaagttgaaatgttgtggcgtcaataactacactgatttctcaggatcctcgtttgaaatgacaactgggcacacttaccctaggagctgttgtaagagtattggctccgtgagctgcgatggccgagacgtaagtcctaacgtgattcaccaaaaaggatgctttcacaaactcctgaagatcacaaaaactcagtctttcactttgagcggctcgagcctcggcgctgccgtgattcaaagatggggctctagatatgttgcccaggccggtctcgagttattggcctag

SEQ ID NO: 174715 - DNA, 1040 bp, Artificial Sequence
  derived and/or modified sequence
tggacaaccatcaggcagccaggacacagaggggcagagcaagtcagcattggcgccccttcctcagatccctatcatcttgggaaacagtagcccagaggttcaggaagatgttaacttaaatgttcagggtgccccagtctgttcagcatggctgaaatccacactccgtattcttccttgaagaaactgttatctttactcaatggcttcgtggctgtgtctggcatcatcctagttggcctgggcattggtggtaaatgtggaggggcctctctgacgaatgtcctcgggctgtcctccgcatacctccttcacgttggcaacctgtgcctggtgatgggatgcatcacggtactgcttggctgtgccgggtggtatggagcgactaaagagagcagaggcacgctcttgttttgcatcctgtcaatggttattgtcctcatcatggaagttacagctgccacagtggtccttcttttctttccaattgttggagatgtggccttggaacacaccttcgtgaccctgaggaagaattacagaggttacaacgagccagacgactattctacacagtggaacttggtcatggagaagctaaagtgctgtggggtgaataactacacagatttttctggctcttccttcgaaatgacaacgggccacacctaccccaggagttgctgtaaatccatcggaagtgtgtcctgtgacggacgcgatgtgtctccaaacgtcatccaccagaagggctgtttccataaactcctaaaaatcaccaagactcagagcttcaccctgagtgggagctctctgggagctgcagtgatacagaggtgggggtctcgctatgttgcgcaggctggtcttgaactgctggcctaaagcgatccccccgcctaggcctcccaaagtgctgggtttaccagcgtgagccaccacgctgggcttcctgcatccttttaaggttcctgagggtctgcctgagaggagctgtccctgaatctccatgcagccccacctgccacatcaccaag

SEQ ID NO: 174716 - protein, 321 aa, Artificial Sequence
  derived and/or modified sequence
MALGACGLLLLLAVPGVSLRTLQPGCGRPQVSDAGGRIVGGHAAPAGAWPWQASLRLRRVHVCGGSLLSPQWVLTAAHCFSGSLNSSDYQVHLGELEITLSPHFSTVRQIILHSSPSGQPGTSGDIALVELSVPVTLSSRILPVCLPEASDDFCPGIRCWVTGWGYTREGEPLPPPYSLREVKVSVVDTETCRRDYPGPGGSILQPDMLCARGPGDACQDDSGGPLVCQVNGAWVQAGTVSWGEGCGRPNRPGVYTRVPAYVNWIRRHITASGGSESGYPRLPLLAGFFLPGLFLLLVSCVLLAKCLLHPSADGTPFPAPD

SEQ ID NO: 174717 - DNA, 966 bp, Artificial Sequence
  derived and/or modified sequence
atggccctgggcgcctgcggcctgctgctgctgctggccgtgcccggcgtgagcctgagaaccctgcagcccggctgcggcagaccccaggtgagcgacgccggcggcagaatcgtgggcggccacgccgcccccgccggcgcctggccctggcaggccagcctgagactgagaagagtgcacgtgtgcggcggcagcctgctgagcccccagtgggtgctgaccgccgcccactgcttcagcggcagcctgaacagcagcgactaccaggtgcacctgggcgagctggagatcaccctgagcccccacttcagcaccgtgagacagatcatcctgcacagcagccccagcggccagcccggcaccagcggcgacatcgccctggtggagctgagcgtgcccgtgaccctgagcagcagaatcctgcccgtgtgcctgcccgaggccagcgacgacttctgccccggcatcagatgctgggtgaccggctggggctacaccagagagggcgagcccctgccccccccctacagcctgagagaggtgaaggtgagcgtggtggacaccgagacctgcagaagagactaccccggccccggcggcagcatcctgcagcccgacatgctgtgcgccagaggccccggcgacgcctgccaggacgacagcggcggccccctggtgtgccaggtgaacggcgcctgggtgcaggccggcaccgtgagctggggcgagggctgcggcagacccaacagacccggcgtgtacaccagagtgcccgcctacgtgaactggatcagaagacacatcaccgccagcggcggcagcgagagcggctaccccagactgcccctgctggccggcttcttcctgcccggcctgttcctgctgctggtgagctgcgtgctgctggccaagtgcctgctgcaccccagcgccgacggcacccccttccccgcccccgactag

SEQ ID NO: 174718 - DNA, 966 bp, Artificial Sequence
  derived and/or modified sequence
atggccctcggggcatgcggactactcctacttctggccgtcccaggtgtgagccttcggacacttcaaccaggatgcggacgacctcaggtcagcgatgccgggggaagaatcgtaggcggccatgccgctccggcaggcgcctggccctggcaggcttccctgcggttacggcgtgtgcatgtatgcggcggaagccttttgagcccccagtgggtcctgactgccgcccattgctttagcggctccctgaattcttcagactaccaggttcacctcggcgaactggagatcaccctgagcccgcacttctcaacagtccggcagatcatcctgcacagctcacccagcggacagccggggactagcggcgatatcgcacttgtcgagctcagtgtgccggtcactctgtcctcacgaatcttaccagtctgtctccccgaagcctctgatgatttttgtcccggcattcgctgctgggtgactggctggggatatactagagaaggcgagccattacctccaccctacagccttagggaggtcaaagtcagtgtggtggacacagagacctgcagacgcgattatccgggcccaggaggctctatacttcaaccagatatgttatgcgcaaggggacctggagacgcctgccaggatgattctggaggcccactggtgtgccaagtaaacggtgcatgggtacaagccggaacagtgtcctggggcgaaggctgcggtcggcctaatagacccggggtttacacgagggttccagcctatgtaaactggattcgccgccatatcaccgcgtctggcggctcagagtctggttatccgagactgcctttgctggcgggtttctttctaccaggactgttccttctgctggtgagttgcgtgcttctggccaagtgccttcttcaccctagtgctgacggcacccccttccctgctcctgactag

SEQ ID NO: 174719 - DNA, 966 bp, Artificial Sequence
  derived and/or modified sequence
atggccctgggcgcctgtggcctgctgctgctgctggccgtgcctggggtgtccctgcggaccctgcagcccggctgcggccggccccaggtgtctgatgctgggggccgcatcgtgggcggccatgctgccccagctggggcctggccctggcaggccagcctgcggctgcggcgggtgcacgtgtgtggcggcagcctgctgagcccccagtgggtgctgacagctgcccactgcttcagcggcagcctgaacagcagtgactaccaggtgcacctgggggagctggagatcaccctgagcccccacttcagcacagtgcggcagatcatcctgcacagcagccccagcggccagcccggcaccagcggggacatcgccctggtggagctgtctgtgcctgtgaccctgagcagccgcatcctgcctgtgtgcctgcctgaggccagtgatgacttctgccccggcatccgctgctgggtgacaggctggggctacacccgggagggggagcccctgcccccaccctacagcctgcgggaggtgaaggtgtctgtggtggacacagagacctgcagaagagactacccaggccctgggggcagcatcctgcagcctgacatgctgtgtgcccggggccctggagatgcctgccaggatgacagcggcggccccctggtgtgccaggtgaatggagcctgggtgcaggccggcaccgtgtcctggggcgagggctgcggccggcccaacagacctggggtgtacaccagggtgcctgcctacgtgaactggatccgccgccacatcacagccagcggcggcagcgagagcggctacccccggctgcccctgctggccggcttcttcctgcccggcctcttcctgctgctggtgtcctgtgtgctgctggccaagtgcctgctgcaccccagcgcagatggcacccccttccctgccccagactag

SEQ ID NO: 174720 - DNA, 966 bp, Artificial Sequence
  derived and/or modified sequence
atggccctgggcgcctgcggcctgctgctgctgctggccgtgcccggtgtcagcctcagaacgcttcagcccggctgcggacggccgcaagtgtcagacgccggaggacgaatcgttggtgggcatgcggctcccgccggcgcctggccttggcaagcctccctccggttaagacgggtccacgtctgcggtggatcccttttgagcccgcagtgggtgttaacggctgcccactgtttctctggatcactcaactccagcgattatcaggtacacctaggcgaactggaaatcaccctcagccctcatttctcaaccgtgaggcaaatcatcttgcacagttcgccaagtgggcagccaggaacctccggagacattgctcttgtggagctgtcagtgccggtgaccctcagttcaagaatcttgcccgtgtgcttacccgaggcttcagacgatttctgcccaggcatacgctgttgggtgaccggatggggttatacccgggaaggagagcccttaccacccccttattcccttcgagaggttaaggtgtccgtcgtggatacagagacctgccggagggattaccctggtcccggaggcagtatattgcagccagatatgctgtgtgcccgagggccaggcgatgcctgccaggacgatagtggtgggcctcttgtttgccaggttaatggggcttgggtgcaagccgggaccgtctcctggggggagggctgcgggaggcctaacagacccggtgtctatacccgtgtgcctgcatacgttaactggattcgcaggcacatcaccgcctctggcggctcggagtccggataccccaggctcccgttactcgcgggcttttttctccccggactttttttgttgttggtttcatgcgtgctgctggcgaagtgcctcctgcacccttcagcggacggaaccccttttcccgctcctgactag

SEQ ID NO: 174721 - DNA, 966 bp, Artificial Sequence
  derived and/or modified sequence
atggctttgggagcatgcgggctacttctcctgctcgctgtgcctggagtgagcctgcgcaccctgcagcccggatgtgggaggccacaagtgtctgatgccggtggcagaatcgtcggaggccatgctgcacctgccggtgcctggccgtggcaggcatcgctgagactgcggagagtgcatgtctgcggcggaagtctgctcagtcctcagtgggttttaacagcagctcattgcttcagtgggtctcttaacagctccgactaccaggtccatctcggagagttggagattaccctctcaccgcacttctccacagttcgccagataatcctccattcatccccgtcagggcagcctggtacttcgggcgacatagccctcgtcgaactcagtgtccccgttaccttgagttcccggatcctgccggtgtgtttgccggaggcgagtgatgacttttgccccggaattcgctgttgggtcaccggctggggttacacccgcgagggtgagcctctgcccccaccttattcactccgggaggttaaagtcagcgtggtcgacaccgagacctgccgcagagactatcccggaccaggcggatccattctgcagcccgacatgctgtgtgctagaggtccaggcgatgcttgtcaggacgactcaggcggacccctagtgtgtcaggtgaatggcgcatgggtgcaagctggcactgtgtcctggggtgagggttgcggcagacccaatcgaccaggagtctataccagagtgcctgcgtacgttaactggataaggcggcacatcacagctagtgggggaagcgaaagtggttaccccagactgccattgctggcaggcttctttctgcccggacttttcctacttctggtaagctgtgtgctgctggcaaagtgccttctgcaccctagcgccgacggcacccccttccccgcaccggattag

SEQ ID NO: 174722 - DNA, 1105 bp, Artificial Sequence
  derived and/or modified sequence
ccatggcccttggggcctgtggcctcctgctgctcctggctgtgcccggtgtgtccctcaggactttgcagccagggtgtggccggccgcaggtttcggatgcaggcggccggatcgtggggggtcacgctgccccggccggcgcatggccatggcaggccagcctccgcctgcggagggtgcacgtgtgcggcgggtcactgctcagcccccagtgggtgctcacagctgcccactgcttctccgggtccctgaactcatccgactaccaggtgcacctgggggaactggagatcactctgtctccccacttctccaccgtgaggcagatcatcctgcactccagcccctcaggacagccggggaccagcggggacatcgccctggtggagctcagtgtccccgtgaccctctccagccggatcctgcccgtctgcctcccggaggcctcagatgacttctgccctgggatccggtgctgggtgaccggctggggctatacgcgggagggagagcctctgccacccccgtacagcctgcgggaggtgaaagtctccgtggtggacacagagacctgccgccgggactatcccggccccgggggcagcatccttcagcccgacatgctgtgtgcccggggccccggggatgcctgccaggacgactccggggggcctctggtctgccaggtgaacggtgcctgggtgcaggctggcactgtgagctggggtgagggctgcggccgccccaacaggccgggagtctacactcgtgtccctgcctacgtgaactggatccgccgccacatcacagcatcagggggctcagagtctgggtaccccaggctccccctcctggctggcttcttcctccccggcctcttccttctgctagtctcctgtgtcctgctggccaagtgcctgctgcacccatctgcggatggtactcccttccccgcccctgactgatggcaggaatccaagtgcatttcttaaataagttactatttattccgctccgccccctccctctcccttgagaagctgagtcttctgcatcagattattgcaacatttaacctgaatttaaaagcacacgaaacaaa

SEQ ID NO: 174723 - protein, 941 aa, Artificial Sequence
  derived and/or modified sequence
MNKKKKPFLGMPAPLGYVPGLGRGATGFTTRSDIGPARDANDPVDDRHAPPGKRTVGDQMKKNQAADDDDEDLNDTNYDEFNGYAGSLFSSGPYEKDDEEADAIYAALDKRMDERRKERREQREKEEIEKYRMERPKIQQQFSDLKRKLAEVTEEEWLSIPEVGDARNKRQRNPRYEKLTPVPDSFFAKHLQTGENHTSVDPRQTQFGGLNTPYPGGLNTPYPGGMTPGLMTPGTGELDMRKIGQARNTLMDMRLSQVSDSVSGQTVVDPKGYLTDLNSMIPTHGGDINDIKKARLLLKSVRETNPHHPPAWIASARLEEVTGKLQVARNLIMKGTEMCPKSEDVWLEAARLQPGDTAKAVVAQAVRHLPQSVRIYIRAAELETDIRAKKRVLRKALEHVPNSVRLWKAAVELEEPEDARIMLSRAVECCPTSVELWLALARLETYENARKVLNKARENIPTDRHIWITAAKLEEANGNTQMVEKIIDRAITSLRANGVEINREQWIQDAEECDRAGSVATCQAVMRAVIGIGIEEEDRKHTWMEDADSCVAHNALECARAIYAYALQVFPSKKSVWLRAAYFEKNHGTRESLEALLQRAVAHCPKAEVLWLMGAKSKWLAGDVPAARSILALAFQANPNSEEIWLAAVKLESENDEYERARRLLAKARSSAPTARVFMKSVKLEWVQDNIRAAQDLCEEALRHYEDFPKLWMMKGQIEEQKEMMEKAREAYNQGLKKCPHSTPLWLLLSRLEEKIGQLTRARAILEKSRLKNPKNPGLWLESVRLEYRAGLKNIANTLMAKALQECPNSGILWSEAIFLEARPQRRTKSVDALKKCEHDPHVLLAVAKLFWSQRKITKAREWFHRTVKIDSDLGDAWAFFYKFELQHGTEEQQEEVRKRCESAEPRHGELWCAVSKDIANWQKKIGDILRLVAGRIKNTF

SEQ ID NO: 174724 - protein, 901 aa, Artificial Sequence
  derived and/or modified sequence
MNKKKKPFLGMPAPLGYVPGLGRGATGFTTRSDIGPARDANDPVDDRHAPPGKRTVGDQMKKNQAADDDDEDLNDTNYDEFNGYAGSLFSSGPYEKDDEEADAIYAALDKRMDERRKERREQREKEEIEKYRMERPKIQQQFSDLKRKLAEVTEEEWLSIPEVGDARNKRQRNPRYEKLTPVPDSFFAKHLQTGENHTSVDPRQTQFGGLNTPYPGGLNTPYPGGMTPGLMTPGTGELDMRKIGQARNTLMDMRLSQVSDSVSGQTVVDPKGYLTDLNSMIPTHGGDINDIKKARLLLKSVRETNPHHPPAWIASARLEEVTGKLQVARNLIMKGTEMCPKSEDVWLEAARLQPGDTAKAVVAQAVRHLPQSVRIYIRAAELETDIRAKKRVLRKALEHVPNSVRLWKAAVELEEPEDARIMLSRAVECCPTSVELWLALARLETYENARKVLNKARENIPTDRHIWITAAKLEEANGNTQMVEKIIDRAITSLRANGVEINREQWIQDAEECDRAGSVATCQAVMRAVIGIGIEEEDRKHTWMEDADSCVAHNALECARAIYAYALQVFPSKKSVWLRAAYFEKNHGTRESLEALLQRAVAHCPKAEVLWLMGAKSKWLAGDVPAARSILALAFQVFMKSVKLEWVQDNIRAAQDLCEEALRHYEDFPKLWMMKGQIEEQKEMMEKAREAYNQGLKKCPHSTPLWLLLSRLEEKIGQLTRARAILEKSRLKNPKNPGLWLESVRLEYRAGLKNIANTLMAKALQECPNSGILWSEAIFLEARPQRRTKSVDALKKCEHDPHVLLAVAKLFWSQRKITKAREWFHRTVKIDSDLGDAWAFFYKFELQHGTEEQQEEVRKRCESAEPRHGELWCAVSKDIANWQKKIGDILRLVAGRIKNTF

SEQ ID NO: 174725 - DNA, 2826 bp, Artificial Sequence
  derived and/or modified sequence
atgaataaaaaaaaaaaaccctttctaggaatgcctgctccgctagggtatgtgccaggacttgggagaggtgctacagggttcactacgagaagtgacattgggccagctcgagatgctaatgacccagtggacgaccggcacgccccccccggcaaacggaccgtcggtgaccagatgaaaaagaatcaagccgcagacgatgatgacgaagatctgaacgacacaaactacgatgaattcaacggatatgccggctccctcttctcaagcggaccttacgagaaggacgacgaggaggccgatgccatttatgccgccctcgataagagaatggacgaaaggcgcaaggagaggagagagcagagagaaaaggaagaaatagaaaaatacagaatggaaagaccaaagatccagcaacagttctccgaccttaaacgaaagctcgcggaggtgacagaggaggagtggttatcaatacccgaggtcggagacgcccgcaacaagaggcagcgcaacccccggtacgagaagctcactcccgtgcctgacagcttctttgcgaaacatctccagactggcgagaatcatacaagcgtggaccctcggcagacccagttcgggggactgaacacaccatacccaggaggactgaataccccctatcccggcgggatgacccctggattgatgacaccaggcacgggagaactcgatatgagaaagatcggccaggccagaaacaccttgatggatatgaggttaagccaagtatccgactcagtttccggccagaccgtggtggatccgaaaggatacctaaccgacttaaatagcatgatacccacacatggaggggacattaatgacataaagaaagcaagattgttacttaaatccgtccgagaaaccaacccccaccatcccccagcatggatagcctcagcacgcctggaggaagtgactgggaagctgcaggttgctcgaaacctcatcatgaaaggaacggagatgtgtcctaagagcgaggatgtgtggttggaagccgccaggctgcaaccaggggatactgccaaggctgttgtcgcccaggcagtgagacacctgccacagtctgtccgcatctacatccgtgcggctgagctggagactgacattcgagccaagaaaagagttctgagaaaggcgctagagcacgtgcccaattctgtacgtttatggaaagcggcggtggagctggaggagcccgaggacgcaagaatcatgctgtctagggccgtcgaatgctgccccacttccgttgagttgtggctggcccttgcccggctggagacttacgaaaatgcccggaaggtcctaaataaggcgagagaaaacattccaacagaccgccacatttggatcaccgcagccaaattggaggaggccaatgggaatacccagatggttgagaaaatcattgaccgagctattacatcattgagagctaacggagtcgagattaatagggaacagtggattcaggatgcagaagagtgcgatagggcaggttcagtagccacctgccaggccgtgatgagggctgtcatcggcattgggattgaagaggaagacaggaaacatacttggatggaggatgctgactcctgcgtcgcgcacaacgctctggaatgcgctcgggcaatatacgcctatgcgttgcaggtttttccttcaaaaaagagcgtatggctcagagcggcatactttgaaaagaatcacggcacgcgcgaaagcttagaggctctcctgcaacgcgctgtggcccactgtcctaaagcggaggttctctggttgatgggcgcgaaaagtaaatggcttgcaggggacgttccagcagcacggagtattctggcactcgccttccaggctaatcccaacagtgaggagatttggctcgcagccgttaaactggagagcgagaatgacgagtacgaacgggcccggcggctgttggctaaagcccgcagtagtgcaccaaccgctcgtgtgttcatgaaaagtgtcaagctggaatgggtgcaggacaacataagggccgctcaagatttatgtgaagaagccttgaggcactacgaagacttccccaagctctggatgatgaagggtcaaatcgaagagcaaaaagagatgatggagaaggcccgtgaggcttataatcagggtctcaaaaagtgcccacatagtacaccgctatggctgttgctatctaggctggaggagaaaattggacagttgacgcgggccagggcgatcttagagaaatcccgactgaagaaccctaagaaccctggtttgtggctcgagagtgttaggcttgagtatagagccgggcttaagaacatcgctaataccttgatggccaaagccctgcaggagtgccccaacagtggcatcctttggtcagaggcaatctttcttgaagcccgccctcagcgccgaaccaagtctgttgacgctttaaaaaaatgcgaacatgacccacacgtgttgctcgctgtggcgaagcttttttggagccaacgcaaaatcacgaaagctagggagtggttccataggacagtgaagattgactcagacctcggagatgcctgggcctttttctataaattcgagttgcagcacggtacagaggaacagcaagaggaggtgcgtaaacgatgtgaaagcgctgaaccgaggcacggagaactgtggtgcgccgtgtcaaaggacatagccaactggcaaaaaaagattggagacatcctgcgccttgtagcgggccgaatcaaaaataccttttag

SEQ ID NO: 174726 - DNA, 2706 bp, Artificial Sequence
  derived and/or modified sequence
atgaataaaaagaaaaaaccctttctcggcatgcctgctcccctcgggtatgtccctggccttggtaggggcgcaacggggttcactacccgatcagatattggccccgcaagagatgctaacgaccccgtcgatgacaggcatgcacctccaggtaagcgaaccgtaggagaccagatgaaaaagaaccaggccgccgacgatgatgatgaggatctcaatgacacaaactacgacgagtttaacggatatgcggggtcgctgtttagttccggcccttatgagaaagatgacgaagaagcagacgcgatctacgctgcactggataagcgtatggatgagcgccgcaaggagcgcagagagcaacgagagaaggaggaaatagagaagtaccgaatggagcgcccgaagatacaacagcagttcagcgacctgaaacgaaagctggcagaagtgaccgaagaggagtggctcagtattcccgaggtcggggatgcacgcaacaaacgacagcgcaaccctcgttacgagaaactaacacctgtgcccgattctttttttgccaagcacctacagactggggaaaaccacaccagtgttgaccctagacagacacaattcgggggcctcaatactccatatcctggggggctgaacactccttatcccgggggcatgactcctggactcatgactcctggcactggcgaacttgatatgcgtaaaataggccaagcacgcaatacactcatggacatgaggctgagtcaagtcagcgactccgtgtctggtcaaaccgtcgtggatccaaaaggatacctcacagaccttaacagcatgattccaacccacggaggcgacattaacgatattaaaaaggctagactgctcctgaaatccgtaagagagacaaacccccatcatccaccagcctggattgcatcagctcgactggaggaggtcacaggtaaactgcaagtggcccgaaacctgatcatgaaagggacagagatgtgccccaaatcggaagacgtgtggctcgaggccgcacggttacaaccaggcgatacggccaaggccgtagtggcccaagctgtccgacacctgccacagtcagtgagaatttatataagagcagctgagctagagacggatatccgagccaagaagcgggtcctccgtaaagcccttgagcacgttccaaattcagtgagactgtggaaggccgcggtggagctggaggaaccagaagatgcgcgcatcatgctgagcagagccgtcgagtgttgccctacatcagtcgaactgtggttagcactcgcaaggttggagacgtatgagaacgcgcgcaaggtcctcaataaagcccgggagaatattcccacagaccgacatatctggataacggcggccaaattggaggaggctaatggtaacacacagatggtagaaaagattattgaccgggcaattacatctctacgggccaacggggttgagattaatagggaacagtggattcaggatgccgaggagtgtgatagggcaggatccgtcgctacatgtcaagccgtgatgagagccgttatcgggattggcatagaagaggaggatcgcaaacatacttggatggaggacgcagattcatgtgtggctcacaatgccctggagtgtgcccgggccatctacgcctatgctctccaggtgttccctagtaagaaatcagtgtggctgcgggccgcctatttcgaaaagaaccacggaacaagggagtccctggaagcacttctccagagagctgtggcacactgccctaaggctgaagtgctctggctgatgggcgcgaagtcaaaatggctagccggcgatgttccggcagctaggtccatcctggcactggcttttcaggttttcatgaagtctgtgaaacttgagtgggtgcaagataatataagggctgcccaggacctttgtgaggaggccctgcggcattacgaggactttccaaagttgtggatgatgaagggacagatcgaagagcagaaagagatgatggaaaaggccagggaagcctacaaccagggactcaagaagtgtccacacagcacgcctctgtggctcctgctgagtagactggaggagaaaataggccagctgacccgcgccagggccatcttagagaagtcccgtctgaagaacccaaaaaaccctggcctgtggcttgaatccgtcagactcgagtaccgggctgggttgaaaaacatcgcaaatacattaatggctaaggccctgcaggaatgcccaaacagtgggatcctctggagcgaagcaatcttcctggaggcgcgtccacagcgtcggacgaagtctgttgatgcattaaaaaagtgtgagcacgacccacatgtactgctcgcagtggccaagctcttctggagccaacgtaaaataacaaaggcacgtgagtggttccacaggacagtaaaaatagatagcgatctgggtgacgcgtgggcctttttctataaatttgagctgcagcatggaacggaggaacagcaggaggaagtcagaaagcgttgcgagagcgcagagccgcggcatggtgagctctggtgtgctgtgtccaaagacatagcaaactggcagaagaaaatcggcgacatcctgaggctggtggctggacgcattaagaacactttctag

SEQ ID NO: 174727 - DNA, 2826 bp, Artificial Sequence
  derived and/or modified sequence
atgaacaagaagaagaagcccttcctgggcatgcctgcccccctgggctacgtgcccggcctgggccgcggggccaccggcttcaccaccaggagtgacatcggccctgccagagatgccaatgaccctgtggatgacagacatgcccctcctgggaagaggacagtgggggaccagatgaagaagaaccaggccgcagatgatgatgatgaggacctgaatgacaccaactatgatgagttcaacggctacgccggcagcctcttcagcagcggcccctatgagaaggatgatgaggaggctgatgccatctatgctgccctggacaagaggatggatgaaagaaggaaggagcggcgggagcagcgggagaaggaggagattgagaagtacaggatggagcggcccaagatccagcagcagttcagtgacctgaagaggaagctggccgaggtgacagaggaggagtggctgagcatccctgaggtgggagatgccaggaacaagaggcagaggaaccccaggtatgagaagctgacccctgtgcctgacagcttctttgccaagcacctgcagacaggagagaaccacacctctgtggacccccggcagacccagtttggaggcctgaacaccccctacccaggcggcctgaacaccccctacccaggcggcatgaccccaggcctgatgaccccaggcactggagagctggacatgaggaagattggccaggccaggaacaccctgatggacatgaggctgagccaggtgtctgattctgtgtctggccagacagtggtggaccccaagggctacctgacagacctgaacagcatgatccccacccacggcggggacatcaatgacatcaagaaggcccggctgctgctgaagtctgtgcgggagaccaacccccaccaccccccagcctggatcgccagcgcccggctggaggaggtgacaggcaagctgcaggtggccaggaacctgatcatgaagggcacagagatgtgccccaagtcagaagatgtgtggctggaggccgcccggctgcagcccggggacacagccaaggctgtggtggcccaggccgtgcgccacctgccccagagcgtgcgcatctacatccgggctgctgagctggagacagacatccgggccaagaagagggtgctgaggaaggccctggagcacgtgcccaacagcgtgcggctgtggaaggctgctgtggagctggaggagccagaagatgcccgcatcatgctgagcagagctgtggagtgctgccccacctctgtggagctgtggctggccctggcccggctggagacctatgaaaatgccaggaaggtgctgaacaaggcccgggagaacatccccacagacagacacatctggatcacagctgccaagctggaggaggccaatggaaacacccagatggtggagaagatcatcgaccgggccatcaccagcctgcgggccaatggagtggagatcaaccgggagcagtggatccaggatgctgaggagtgtgaccgggccggctctgtggccacctgccaggccgtgatgagagctgtgattggcatcggcatcgaggaggaggacaggaagcacacctggatggaggatgctgacagctgtgtggcccacaatgccctggagtgtgcccgggccatctatgcctatgccctgcaggtgttccccagcaagaagtctgtgtggctgcgggccgcctactttgagaagaaccacggcacccgggagagcctggaggccctgctgcagagagctgtggcccactgccccaaggccgaggtgctgtggctgatgggcgccaagagcaagtggctggccggagatgtgcctgctgcccggagcatcctggccctggccttccaggccaaccccaacagcgaggagatctggctggccgctgtgaagctggagagtgaaaatgatgaatatgaaagagcccggcggctgctggccaaggcccggagcagcgcccccacagcccgggtcttcatgaagtctgtgaagctggagtgggtgcaggacaacatccgggccgcccaggacctgtgtgaggaggccctgcggcactatgaggacttccccaagctgtggatgatgaagggccagatcgaggagcagaaggagatgatggagaaggcccgggaggcctacaaccagggcctgaagaagtgcccccacagcacccccctgtggctgctgctgagccggctggaggagaagattggccagctgacccgggcccgggccatcctggagaagagccggctgaagaaccccaagaaccctggcctgtggctggagagcgtgcggctggagtaccgggccggcctgaagaacatcgccaacaccctgatggccaaggccctgcaggagtgccccaacagcggcatcctgtggagcgaggccatcttcctggaggcccggccccagaggaggaccaagtctgtggatgccctgaagaagtgtgaacatgacccccacgtgctgctggccgtggccaagctgttctggagccagaggaagatcaccaaggcccgggagtggttccacaggacagtgaagattgacagcgacctgggagatgcctgggccttcttctacaagtttgagctgcagcacggcacagaggagcagcaggaggaggtgaggaagagatgtgagagcgctgagcccaggcatggagagctgtggtgtgctgtgtccaaggacatcgccaactggcagaagaagatcggggacatcctgcggctggtggccggccgcatcaagaacaccttctag

SEQ ID NO: 174728 - DNA, 2706 bp, Artificial Sequence
  derived and/or modified sequence
atgaacaagaagaagaagcccttcctgggcatgcctgcccccctgggctacgtgcccggcctgggccgcggggccaccggcttcaccaccaggagtgacatcggccctgccagagatgccaatgaccctgtggatgacagacatgcccctcctgggaagaggacagtgggggaccagatgaagaagaaccaggccgcagatgatgatgatgaggacctgaatgacaccaactatgatgagttcaacggctacgccggcagcctcttcagcagcggcccctatgagaaggatgatgaggaggctgatgccatctatgctgccctggacaagaggatggatgaaagaaggaaggagcggcgggagcagcgggagaaggaggagattgagaagtacaggatggagcggcccaagatccagcagcagttcagtgacctgaagaggaagctggccgaggtgacagaggaggagtggctgagcatccctgaggtgggagatgccaggaacaagaggcagaggaaccccaggtatgagaagctgacccctgtgcctgacagcttctttgccaagcacctgcagacaggagagaaccacacctctgtggacccccggcagacccagtttggaggcctgaacaccccctacccaggcggcctgaacaccccctacccaggcggcatgaccccaggcctgatgaccccaggcactggagagctggacatgaggaagattggccaggccaggaacaccctgatggacatgaggctgagccaggtgtctgattctgtgtctggccagacagtggtggaccccaagggctacctgacagacctgaacagcatgatccccacccacggcggggacatcaatgacatcaagaaggcccggctgctgctgaagtctgtgcgggagaccaacccccaccaccccccagcctggatcgccagcgcccggctggaggaggtgacaggcaagctgcaggtggccaggaacctgatcatgaagggcacagagatgtgccccaagtcagaagatgtgtggctggaggccgcccggctgcagcccggggacacagccaaggctgtggtggcccaggccgtgcgccacctgccccagagcgtgcgcatctacatccgggctgctgagctggagacagacatccgggccaagaagagggtgctgaggaaggccctggagcacgtgcccaacagcgtgcggctgtggaaggctgctgtggagctggaggagccagaagatgcccgcatcatgctgagcagagctgtggagtgctgccccacctctgtggagctgtggctggccctggcccggctggagacctatgaaaatgccaggaaggtgctgaacaaggcccgggagaacatccccacagacagacacatctggatcacagctgccaagctggaggaggccaatggaaacacccagatggtggagaagatcatcgaccgggccatcaccagcctgcgggccaatggagtggagatcaaccgggagcagtggatccaggatgctgaggagtgtgaccgggccggctctgtggccacctgccaggccgtgatgagagctgtgattggcatcggcatcgaggaggaggacaggaagcacacctggatggaggatgctgacagctgtgtggcccacaatgccctggagtgtgcccgggccatctatgcctatgccctgcaggtgttccccagcaagaagtctgtgtggctgcgggccgcctactttgagaagaaccacggcacccgggagagcctggaggccctgctgcagagagctgtggcccactgccccaaggccgaggtgctgtggctgatgggcgccaagagcaagtggctggccggagatgtgcctgctgcccggagcatcctggccctggccttccaggtgttcatgaagtctgtgaagctggagtgggtgcaggacaacatccgggccgcccaggacctgtgtgaggaggccctgcggcactatgaggacttccccaagctgtggatgatgaagggccagatcgaggagcagaaggagatgatggagaaggcccgggaggcctacaaccagggcctgaagaagtgcccccacagcacccccctgtggctgctgctgagccggctggaggagaagattggccagctgacccgggcccgggccatcctggagaagagccggctgaagaaccccaagaaccctggcctgtggctggagagcgtgcggctggagtaccgggccggcctgaagaacatcgccaacaccctgatggccaaggccctgcaggagtgccccaacagcggcatcctgtggagcgaggccatcttcctggaggcccggccccagaggaggaccaagtctgtggatgccctgaagaagtgtgaacatgacccccacgtgctgctggccgtggccaagctgttctggagccagaggaagatcaccaaggcccgggagtggttccacaggacagtgaagattgacagcgacctgggagatgcctgggccttcttctacaagtttgagctgcagcacggcacagaggagcagcaggaggaggtgaggaagagatgtgagagcgctgagcccaggcatggagagctgtggtgtgctgtgtccaaggacatcgccaactggcagaagaagatcggggacatcctgcggctggtggccggccgcatcaagaacaccttctag

SEQ ID NO: 174729 - DNA, 2826 bp, Artificial Sequence
  derived and/or modified sequence
atgaacaagaagaagaagcccttcctgggcatgcccgcccccctggggtacgttcccggtctcggtagaggggcaacaggattcacgactcggtcagatatcggtccagcccgagatgcaaatgatcccgtggatgaccgccatgctcctccggggaagagaactgttggagaccagatgaaaaagaatcaagctgcagatgacgacgatgaggatctcaatgatacgaattatgacgagttcaacggctacgccggctcgctgttctcgtccggaccctatgagaaagacgatgaggaggctgacgctatatacgccgcactggacaagagaatggacgaaaggagaaaagagcgacgcgagcagcgcgaaaaagaagagatcgaaaaataccggatggagaggcccaagatccagcagcagttctcagatctgaaacgcaaactggccgaggtgacggaggaggaatggctgtccattcccgaagtgggggacgcgaggaacaagaggcagagaaaccctagatacgaaaagttgacacccgtgcctgatagcttttttgctaaacacctgcagacaggcgaaaaccacacctctgtagatccgcgtcagactcaatttggtggactcaacactccttaccctggaggactgaacaccccatatcccggaggcatgacaccaggtttgatgactcctggaacaggcgagctggacatgcggaagatcgggcaggctagaaatactctcatggacatgaggctctcacaggtatccgacagcgtatccggccagaccgtggtggaccccaagggctacctcaccgatctcaactcaatgatccccacccacgggggcgacatcaatgacattaagaaggcacgtttactgctgaagagtgtgcgagagaccaatccacaccaccccccggcctggattgcgtcagctcgtcttgaggaggtgacagggaaactgcaagtggcccgcaacttaataatgaaggggacagagatgtgccctaagtccgaagatgtctggttggaagccgctcgcctgcagcctggcgacactgcaaaggccgttgttgctcaggccgtccgacatttgccccagtccgtgcgtatctatatccgggctgccgaactagaaaccgacatccgcgcaaagaagagagtgctgcggaaagcccttgaacacgttcccaattctgtccgtctctggaaggcagccgtcgagctcgaggagcccgaggatgcaagaataatgctcagccgcgctgtcgaatgctgtccgacttccgttgagttatggctggcactggctcgtttggaaacctacgagaatgcacgaaaagtactcaacaaggctagggaaaacattccgactgacagacatatttggatcacagccgcaaaactggaggaagctaatgggaatacacagatggtcgagaagattatagaccgcgccataacctcactccgcgcaaacggtgttgagattaatagagaacagtggatccaggacgccgaagagtgtgatcgcgccgggtctgttgcaacctgccaagcggttatgcgcgccgtgatcggcataggcatcgaagaagaggatagaaaacacacatggatggaggacgctgattcatgtgttgcccataacgccctcgaatgtgcccgcgctatatatgcatatgccctgcaagtttttccctccaagaaatctgtgtggcttcgggcagcatactttgagaaaaaccacgggactcgcgaatcactggaggcactgcttcagcgcgccgtggcccactgtccaaaggcagaagtgttgtggcttatgggcgcgaagtcgaagtggctcgcaggagacgtacctgccgctcgctccattctggccctggccttccaggccaacccaaactccgaagagatctggctggcagcagtcaaactggaatctgaaaacgatgaatatgagcgcgctaggcggctactagccaaagccagatccagcgcacccacagccagagtgtttatgaaatccgtcaagctagagtgggtgcaggataacatcagagcagctcaggacctttgcgaggaagcattgagacattatgaagacttccctaagctgtggatgatgaagggtcagatcgaagaacagaaggaaatgatggaaaaggcccgcgaggcctacaaccagggcctgaagaaatgcccccattctacacccctatggctcctgttgagcaggctggaagaaaaaattggacaactgactcgggcccgcgcaatactcgaaaaatcgagactcaaaaatcctaagaaccctggcctgtggctcgagagtgtgcggctggagtaccgcgccgggctcaagaacattgcaaacacattgatggctaaagcactgcaggagtgccccaactccgggatactgtggtcggaagcaatctttctggaggcaaggcctcagcggaggaccaagagtgtggacgccctaaaaaagtgcgagcatgatccccatgtgttgctggccgttgctaagcttttttggagccagagaaaaatcacaaaagcaagagaatggtttcaccgcactgtcaagatcgatagtgacctcggagatgcatgggccttcttttataagtttgaacttcagcacggaactgaggaacagcaagaggaagtgagaaagcgctgcgaatcagccgaaccgcggcacggggagctgtggtgtgccgttagcaaagatattgcaaattggcagaaaaaaattggggacatacttcggctggtagcaggcagaatcaagaacacgttctag

SEQ ID NO: 174730 - DNA, 2706 bp, Artificial Sequence
  derived and/or modified sequence
atgaacaagaagaagaagcccttcctgggcatgcccgcccccctgggttacgtcccaggacttggtagaggtgctaccgggtttaccacgcggagcgatataggtcctgcacgtgacgccaacgaccctgtagacgatcgccacgctcctcccggaaagcggactgtcggagatcagatgaaaaagaaccaggccgccgacgacgatgatgaagacctcaacgatactaattacgatgagttcaacggatacgccgggtctctgttttcatccggaccttacgagaaggacgacgaggaagcagacgcgatctatgctgccctggataagcgcatggatgagcggcgcaaagaaaggcgcgagcaaagggagaaagaagaaatcgagaaatatagaatggagaggcctaagattcaacaacagttttcagacctgaaaagaaagctggcggaagtgaccgaagaggaatggctgtccatcccagaagtgggtgatgcacggaacaagagacaacgtaatcctaggtatgaaaaactgacgccagtgcccgacagctttttcgcaaaacatctgcagactggggagaatcatacctctgtagatcctcggcagacacaattcggcggcttgaacaccccctatccagggggtctgaataccccttatcccggaggtatgacgccgggcctgatgactcccggtaccggcgaactggatatgcgtaagatcggacaggcccgcaatactctgatggacatgcggcttagtcaagtgagcgattccgtgtcagggcaaacagtggtggaccccaagggctacctaaccgatttaaatagtatgatccccactcatggtggcgacattaacgatattaagaaagcacggttgctgctcaagtccgtgcgagaaacaaatcctcatcacccgcctgcatggattgcttccgcgcggctggaagaggtgactggaaagctgcaggtggctaggaatctgataatgaagggtaccgaaatgtgcccaaaatccgaagacgtgtggctggaagcagcacggctccaaccaggcgacaccgccaaggccgtggttgctcaagccgttcggcacctgccacaatccgtgagaatttacatccgggctgcagagctcgaaacagacataagagcaaagaagcgggtgctgaggaaagcactagagcacgtccccaattctgtacgcctctggaaagctgcggtggagcttgaggagcctgaagatgcacggattatgttgtctcgggccgtggagtgctgtccaactagcgttgagctttggctggctttggctcgactcgagacatacgaaaacgcccgtaaggtgctcaataaggccagagagaacatccccacagacaggcatatttggataaccgctgccaaattagaagaagcaaacgggaatactcagatggtggagaagataattgatcgtgcaattacctctctccgcgcgaacggtgtggagattaacagggagcagtggatacaggatgctgaggaatgcgaccgtgcaggttcagttgccacttgccaagcggtgatgagagccgtaataggaataggcattgaggaagaagataggaagcacacctggatggaggatgcggacagctgcgttgcccataatgcattggaatgtgcccgagccatctatgcctatgctctccaggtcttcccctctaaaaagtccgtatggctgcgcgccgcctacttcgaaaaaaatcacggcacccgcgaatccttggaagccttgctacaacgcgcagtcgctcattgtccaaaagccgaggtgctctggctcatgggcgccaagagcaaatggctagccggagacgtcccagctgccaggagtatcctagctttggcatttcaagtttttatgaagtctgtgaagctcgagtgggtgcaagataacataagagctgctcaggacctgtgcgaggaagcactcaggcactatgaggatttccctaagctgtggatgatgaagggtcagattgaggagcagaaggaaatgatggaaaaggctcgagaggcctacaatcagggactcaaaaagtgcccccactctacaccattatggctgttgttgtccaggctcgaagagaaaattggccagctgacgcgagcacgggcaattttggagaagtcacgattgaaaaaccccaaaaacccgggcctctggttagagtctgtgagactcgagtatagggccggtctgaaaaatatcgccaacacattgatggccaaggccctgcaggaatgtcccaattctgggatcctctggagtgaggccatctttctcgaggctcgacctcagagaagaaccaaaagcgtcgacgcactcaagaagtgcgagcacgacccacacgttcttctggccgtggctaagctgttctggagccagagaaaaatcacaaaagcaagagagtggtttcatcgcactgtcaaaatcgactcggacctgggcgatgcgtgggccttcttctataagttcgaattacagcacggcaccgaggaacagcaggaggaagttaggaaaaggtgtgagagtgctgagccccggcacggggagctctggtgtgctgtgtcaaaagacatcgccaactggcagaagaagattggagatatcctgagactggtagctgggagaatcaaaaacaccttctag

SEQ ID NO: 174731 - DNA, 2826 bp, Artificial Sequence
  derived and/or modified sequence
atgaacaagaaaaagaaaccctttttgggcatgcccgctccattggggtatgttccgggattgggcagaggtgctaccggcttcacaacaagaagtgacattggcccagctagagatgctaacgatccagtggacgatcggcacgcgccaccgggaaaaaggaccgtgggcgaccagatgaagaaaaatcaggccgcagatgatgatgacgaagatctgaatgacaccaactacgacgaatttaacggttacgcagggagtctgttcagttcaggtccttatgagaaggatgacgaggaggccgatgccatatacgccgctctcgacaagcggatggatgagcgcagaaaggaacgtagagagcagcgcgaaaaggaagagatcgagaagtacagaatggagcgccctaagatacagcagcagttttccgatctgaaaaggaaactggcagaggtgacagaggaagagtggctgtccatcccagaagtgggagatgcccgtaataaacggcagcgcaacccgagatatgaaaagttgacgccagtccctgatagcttctttgccaaacatttgcaaactggtgagaaccacaccagtgttgatcccagacagacccagttcggaggcttaaatactccctacccgggtggcttaaatacaccttaccctggcggtatgaccccaggcctgatgactccaggaaccggtgagttggacatgcgcaaaattggacaggcgcgaaacactcttatggatatgaggctgagccaggtgagtgacagcgtttccggccagacagtggtggaccccaagggatacctcacagacctgaattctatgattcctacgcatgggggtgacatcaacgatatcaaaaaagcaaggcttttgttgaaaagcgttagggaaacaaaccctcatcaccccccagcctggatcgctagcgcaaggttagaagaggtgacaggtaagctgcaggtcgccagaaatttaatcatgaaggggaccgaaatgtgcccgaagtctgaggacgtctggcttgaggctgccaggctccaaccgggagacaccgctaaagcagtggtggctcaggcagtcagacacctgccccaaagcgtcagaatctatattcgagccgcagaactggagaccgatatacgggcaaagaagcgagtgctgcggaaagctctggagcacgtacccaactcagttcggctgtggaaagctgccgtggagctagaggaacccgaggatgcacggataatgctgagcagggcagtagagtgctgtcccacatcagtagagttatggttggctcttgcaagacttgagacttacgagaatgccagaaaggtgctgaataaggccagagagaatattccaacagatagacatatatggattactgctgctaagttggaggaggccaatggtaacactcagatggtggagaagattattgaccgcgcaattaccagcttgagggccaatggagtggagatcaatcgggagcaatggatccaggacgccgaagagtgtgatcgagccggatctgtagcgacctgccaggcagtgatgcgcgcagtgataggcatcggaatagaggaagaagatagaaaacacacttggatggaagacgctgacagctgcgtcgctcacaatgccctggaatgtgcccgagccatctacgcctacgccctccaagtgtttccttctaagaagagcgtctggctgcgggcagcctattttgagaagaaccacggtacaagagagtcccttgaagcactgctgcagcgcgcagttgctcactgccccaaggctgaggttctgtggctcatgggtgccaagtctaaatggctggctggcgatgtgcctgccgctcggagtatattggcgctagccttccaggcaaatcctaacagcgaagagatatggctcgctgctgtcaagctggagtccgaaaacgacgagtacgagagggcccgacgcctgttggccaaagctcgctcaagtgcaccaacagctagagtcttcatgaaatccgttaaattagaatgggtgcaagataacatcagagcggcacaagatctgtgcgaggaagccctgcgccattatgaggatttccctaagctgtggatgatgaaaggccaaatcgaagagcagaaagaaatgatggagaaggccagggaagcttacaatcaagggcttaaaaagtgtcctcatagcacacctctctggctgctgctgtcccgcctggaagagaagattggacagttgactagagccagagctattctcgagaaatctcggctgaagaatccaaagaacccgggactctggttggagagtgtccgtttggagtatagagcgggtttaaagaacatcgctaataccctcatggccaaggcacttcaggagtgtcctaacagcgggattctgtggtccgaggctatcttcctcgaagctagaccgcagcggagaacaaagtccgtcgacgctctcaaaaaatgtgagcacgatccccacgtgctgctggcggtcgctaaactcttctggtcccagaggaagatcactaaggccagggaatggttccaccggacggtcaaaattgatagcgacttgggcgacgcctgggccttcttttacaaattcgaattgcaacacgggaccgaggagcagcaggaggaggtacgcaaacggtgtgaaagcgccgagccaagacacggtgaattgtggtgcgccgtctctaaagatatcgcaaattggcagaaaaagatcggcgacatcttacgtctggtcgcgggacggatcaagaatacattttag

SEQ ID NO: 174732 - DNA, 2706 bp, Artificial Sequence
  derived and/or modified sequence
atgaataaaaaaaagaaaccctttctgggtatgccagcccctcttggctacgtacccggactaggcaggggtgccacaggtttcactaccagaagtgacatcgggcctgctcgtgacgccaatgacccagtcgacgaccggcacgcccctccgggaaagcggaccgttggcgaccagatgaaaaaaaatcaggccgctgacgacgacgatgaagacctcaatgatactaattatgacgagtttaacggttatgcgggaagtctgtttagctctggaccctacgagaaagacgatgaggaagcagatgcaatttacgctgcactggacaagaggatggatgaaagaagaaaggaacgacgtgagcagcgtgagaaagaagaaatcgagaagtacagaatggagagacctaaaatacagcagcagttttctgatctgaagcgtaagcttgctgaggtgactgaggaggaatggctgtccattcctgaagtgggcgacgcaagaaacaaacggcagcgtaatccacggtatgaaaagctgacgcctgtgccggacagtttctttgctaaacatctccagaccggcgagaaccatacatctgttgaccccaggcagacacagtttgggggtctcaatacaccataccccggaggattgaataccccttacccaggaggtatgacccctgggcttatgacccccggaaccggagagctggatatgaggaagatcggccaggccaggaataccttgatggatatgcgactatctcaggttagcgactctgtgagcggccagactgtggtcgatcccaagggttaccttaccgacctgaactcgatgatccccacccacggtggggacataaacgacattaagaaagccagactgttactcaagagcgttagagagactaacccacaccatccccctgcctggatcgccagtgctagactggaggaagttactggaaaactgcaagtggccaggaatctgataatgaagggcaccgagatgtgtccaaaatctgaagacgtctggttagaggccgcacgcctacagcccggtgacacggccaaagctgtagtcgcgcaggccgtcagacatcttccccagtctgtccgtatatatattagggccgcagagcttgagaccgatatcagggccaaaaagcgggtgctgcgaaaggcactcgagcacgtgcccaactcagtgagactttggaaagccgcagtggagctcgaagagccggaagacgctagaatcatgctgagtcgtgccgtagagtgttgtccaaccagtgtggagctgtggctggccctggctaggctggaaacctatgagaacgccagaaaagttctcaataaggctagagagaacatcccgacggatagacatatttggattacggccgcaaagctggaggaagccaacgggaatactcagatggtcgaaaagatcatcgaccgcgctatcacctctctaagggctaacggtgtcgagatcaaccgcgaacaatggatccaggatgcggaggaatgcgatcgtgctggtagcgtcgctacctgtcaggctgtcatgcgggctgtaattggcattggcattgaggaggaggatagaaaacacacctggatggaggatgcagatagctgcgttgcccacaacgccctcgagtgtgcacgcgcaatatatgcgtacgctcttcaagtcttcccctcaaagaagagtgtctggctgcgagctgcctatttcgaaaaaaaccatggcacccgcgagtcactggaggctctactgcagcgcgctgtggcacactgccctaaggcggaggtcttgtggttgatgggcgcaaagagcaagtggcttgctggtgacgttcctgccgcacgaagtatacttgccttggcttttcaagtatttatgaagtccgtgaaactggagtgggtgcaagataacatcagagctgcgcaggacttgtgtgaggaggcactccgccactacgaagattttccaaagttatggatgatgaagggacagattgaagaacagaaggagatgatggaaaaagcaagggaggcctataaccagggcctgaaaaagtgcccccattcgactcctctgtggctgttgctgtcacggctagaggaaaaaatcggccagctcacaagagccagggccatcctggagaagtctaggctaaaaaacccaaagaaccccggtctgtggctcgaatcggtcagattggaatatcgggctggccttaagaacattgcaaacacacttatggctaaagcgctgcaggagtgccccaattccggtattttatggtctgaagccatcttcctcgaggctcggcctcagcggagaaccaagagtgtggatgctttgaaaaagtgcgagcacgaccctcacgtgctgcttgctgtggctaaattgttctggtctcagagaaaaatcacaaaggcccgtgagtggtttcatcgcacggtaaagatagattccgatctgggtgacgcatgggcattcttttacaagttcgagctccagcacggcactgaggaacaacaagaagaggtgcggaagcgatgcgagtccgcggaacctagacatggggaattatggtgcgcagtgagcaaggacatcgctaattggcagaaaaagattggggacatcttaaggctggtggccggacggatcaaaaataccttctag

SEQ ID NO: 174733 - DNA, 3044 bp, Artificial Sequence
  derived and/or modified sequence
ggcgacactttgctacggagtgcatcggacgtcgaagcctagagtctctgcgtctttccctcttccgctgcctcattcctttccttcctagccttggtcgtcgccgccaccatgaacaagaagaagaaaccgttcctagggatgcccgcgcccctcggctacgtgccggggctgggccggggcgccactggcttcaccacgcggtcagacattgggcccgcccgtgatgcaaatgaccctgtggatgatcgccatgcacccccaggcaagagaaccgttggggaccagatgaagaaaaatcaggctgctgacgatgacgacgaggatctaaatgacaccaattacgatgagtttaatggctatgctgggagcctcttctcaagtggaccctacgagaaagatgatgaggaagcagatgctatctatgcagccctggataaaaggatggatgaaagaagaaaagaaagacgggagcaaagggagaaagaagaaatagagaaatatcgtatggaacgccccaaaatccaacagcagttctcagacctcaagaggaagttggcagaagtcacagaagaagagtggctgagcatccccgaggttggcgatgccagaaataaacgtcagcggaacccacgctatgagaagctgacccctgttcctgacagtttctttgccaaacatttacagaccggagagaaccatacctcagtggatccccgacaaactcaatttggaggtcttaacacaccctatccaggtggactaaacactccatacccaggtggaatgacgccaggactgatgacacctggcacaggtgagctggacatgaggaagattggccaagcgaggaacactctgatggacatgaggctgagccaggtgtctgactccgtgagtggacagaccgtcgttgaccccaaaggctacctgacggatttaaattccatgatcccgacacacggaggagacatcaatgatatcaagaaggcgcgactgctcctcaagtctgttcgggagacgaaccctcatcacccgccagcctggattgcatcagcccgcctggaagaagtcactgggaagctacaagtagctcggaaccttatcatgaaggggacggagatgtgccccaagagtgaagatgtctggctggaagcagccaggttgcagcctggggacacagccaaggccgtggtagcccaagctgtccgtcatctcccacagtctgtcaggatttacatcagagccgcagagctggaaacggacattcgtgcaaagaagcgggttcttcggaaagccctcgagcatgttccaaactcggttcgcttgtggaaagcagccgttgagctggaagaacctgaagatgctagaatcatgctgagccgagctgtggagtgctgccccaccagcgtggagctctggcttgctctggcaaggctggagacctatgaaaatgcccgcaaggtcttgaacaaggcgcgggagaacattcctacagaccgacatatctggatcacggctgctaagctggaggaagccaatgggaacacgcagatggtggagaagatcatcgaccgagccatcacctcgctgcgggccaacggtgtggagatcaaccgtgagcagtggatccaggatgccgaggaatgtgacagggctgggagtgtggccacctgccaggccgtcatgcgtgccgtgattgggattgggattgaggaggaagatcggaagcatacctggatggaggatgctgacagttgtgtagcccacaatgccctggagtgtgcacgagccatctacgcctacgccctgcaggtgttccccagcaagaagagtgtgtggctgcgcgccgcgtacttcgagaagaaccatggcactcgggagtccctggaagcactcctgcagagggctgtggcccactgccccaaagcagaggtgctgtggctcatgggcgccaagtccaagtggctggcaggggatgtgcctgcagcaaggagcatcctggccctggccttccaggccaaccccaacagtgaggagatctggctggcagccgtgaagctggagtccgagaatgatgagtacgagcgggcccggaggctgctggccaaggcgcggagcagtgcccccaccgcccgggtgttcatgaagtctgtgaagctggagtgggtgcaagacaacatcagggcagcccaagatctgtgcgaggaggccctgcggcactatgaggacttccccaagctgtggatgatgaaggggcagatcgaggagcagaaggagatgatggagaaggcgcgggaagcctataaccaggggttgaagaagtgtccccactccacacccctgtggcttttgctctctcggctggaggagaagattgggcagcttactcgagcacgggccattttggaaaagtctcgtctgaagaacccaaagaaccctgggctgtggttggagtccgtgcggctggagtaccgtgcggggctgaagaacatcgcaaatacactcatggccaaggcgctgcaggagtgccccaactccggtatcctgtggtctgaggccatcttcctcgaggcaaggccccagaggaggaccaagagcgtggatgccctgaagaagtgtgagcatgacccccatgtgctcctggccgtggccaagctgttttggagtcagcggaagatcaccaaggccagggagtggttccaccgcactgtgaagattgactcggacctgggggatgcctgggccttcttctacaagtttgagctgcagcatggcactgaggagcagcaggaggaggtgaggaagcgctgtgagagtgcagagcctcggcatggggagctgtggtgcgccgtgtccaaggacatcgccaactggcagaagaagatcggggacatccttaggctggtggccggccgcatcaagaacaccttctgattgagcggttgccatggccggtctccgtggggcagggttgggccgcatgtggaagggctctgagctgtgtcctccttcattaaaagtttttatgtctcgtgtcagaa

SEQ ID NO: 174734 - DNA, 2920 bp, Artificial Sequence
  derived and/or modified sequence
ggcgacactttgctacggagtgcatcggacgtcgaagcctagagtctctgcgtctttccctcttccgctgcctcattcctttccttcctagccttggtcgtcgccgccaccatgaacaagaagaagaaaccgttcctagggatgcccgcgcccctcggctacgtgccggggctgggccggggcgccactggcttcaccacgcggtcagacattgggcccgcccgtgatgcaaatgaccctgtggatgatcgccatgcacccccaggcaagagaaccgttggggaccagatgaagaaaaatcaggctgctgacgatgacgacgaggatctaaatgacaccaattacgatgagtttaatggctatgctgggagcctcttctcaagtggaccctacgagaaagatgatgaggaagcagatgctatctatgcagccctggataaaaggatggatgaaagaagaaaagaaagacgggagcaaagggagaaagaagaaatagagaaatatcgtatggaacgccccaaaatccaacagcagttctcagacctcaagaggaagttggcagaagtcacagaagaagagtggctgagcatccccgaggttggcgatgccagaaataaacgtcagcggaacccacgctatgagaagctgacccctgttcctgacagtttctttgccaaacatttacagaccggagagaaccatacctcagtggatccccgacaaactcaatttggaggtcttaacacaccctatccaggtggactaaacactccatacccaggtggaatgacgccaggactgatgacacctggcacaggtgagctggacatgaggaagattggccaagcgaggaacactctgatggacatgaggctgagccaggtgtctgactccgtgagtggacagaccgtcgttgaccccaaaggctacctgacggatttaaattccatgatcccgacacacggaggagacatcaatgatatcaagaaggcgcgactgctcctcaagtctgttcgggagacgaaccctcatcacccgccagcctggattgcatcagcccgcctggaagaagtcactgggaagctacaagtagctcggaaccttatcatgaaggggacggagatgtgccccaagagtgaagatgtctggctggaagcagccaggttgcagcctggggacacagccaaggccgtggtagcccaagctgtccgtcatctcccacagtctgtcaggatttacatcagagccgcagagctggaaacggacattcgtgcaaagaagcgggttcttcggaaagccctcgagcatgttccaaactcggttcgcttgtggaaagcagccgttgagctggaagaacctgaagatgctagaatcatgctgagccgagctgtggagtgctgccccaccagcgtggagctctggcttgctctggcaaggctggagacctatgaaaatgcccgcaaggtcttgaacaaggcgcgggagaacattcctacagaccgacatatctggatcacggctgctaagctggaggaagccaatgggaacacgcagatggtggagaagatcatcgaccgagccatcacctcgctgcgggccaacggtgtggagatcaaccgtgagcagtggatccaggatgccgaggaatgtgacagggctgggagtgtggccacctgccaggccgtcatgcgtgccgtgattgggattgggattgaggaggaagatcggaagcatacctggatggaggatgctgacagttgtgtagcccacaatgccctggagtgtgcacgagccatctacgcctacgccctgcaggtgttccccagcaagaagagtgtgtggctgcgcgccgcgtacttcgagaagaaccatggcactcgggagtccctggaagcactcctgcagagggctgtggcccactgccccaaagcagaggtgctgtggctcatgggcgccaagtccaagtggctggcaggggatgtgcctgcagcaaggagcatcctggccctggccttccaggtgttcatgaagtctgtgaagctggagtgggtgcaagacaacatcagggcagcccaagatctgtgcgaggaggccctgcggcactatgaggacttccccaagctgtggatgatgaaggggcagatcgaggagcagaaggagatgatggagaaggcgcgggaagcctataaccaggggttgaagaagtgtccccactccacacccctgtggcttttgctctctcggctggaggagaagattgggcagcttactcgagcacgggccattttggaaaagtctcgtctgaagaacccaaagaaccctgggctgtggttggagtccgtgcggctggagtaccgtgcggggctgaagaacatcgcaaatacactcatggccaaggcgctgcaggagtgccccaactccggtatcctgtggtctgaggccatcttcctcgaggcaaggccccagaggaggaccaagagcgtggatgccctgaagaagtgtgagcatgacccccatgtgctcctggccgtggccaagctgttttggagtcagcggaagatcaccaaggccagggagtggttccaccgcactgtgaagattgactcggacctgggggatgcctgggccttcttctacaagtttgagctgcagcatggcactgaggagcagcaggaggaggtgaggaagcgctgtgagagtgcagagcctcggcatggggagctgtggtgcgccgtgtccaaggacatcgccaactggcagaagaagatcggggacatccttaggctggtggccggccgcatcaagaacaccttctgattgagcggttgccatggccggtctccgtggggcagggttgggccgcatgtggaagggctctgagctgtgtcctccttcattaaaagtttttatgtctcgtgtc

SEQ ID NO: 174735 - DNA, 2826 bp, Artificial Sequence
  derived and/or modified sequence
atgaacaagaagaagaagcccttcctgggcatgcccgcccccctgggctacgtgcccggcctgggcagaggcgccaccggcttcaccaccagaagcgacatcggccccgccagagacgccaacgaccccgtggacgacagacacgccccccccggcaagagaaccgtgggcgaccagatgaagaagaaccaggccgccgacgacgacgacgaggacctgaacgacaccaactacgacgagttcaacggctacgccggcagcctgttcagcagcggcccctacgagaaggacgacgaggaggccgacgccatctacgccgccctggacaagagaatggacgagagaagaaaggagagaagagagcagagagagaaggaggagatcgagaagtacagaatggagagacccaagatccagcagcagttcagcgacctgaagagaaagctggccgaggtgaccgaggaggagtggctgagcatccccgaggtgggcgacgccagaaacaagagacagagaaaccccagatacgagaagctgacccccgtgcccgacagcttcttcgccaagcacctgcagaccggcgagaaccacaccagcgtggaccccagacagacccagttcggcggcctgaacaccccctaccccggcggcctgaacaccccctaccccggcggcatgacccccggcctgatgacccccggcaccggcgagctggacatgagaaagatcggccaggccagaaacaccctgatggacatgagactgagccaggtgagcgacagcgtgagcggccagaccgtggtggaccccaagggctacctgaccgacctgaacagcatgatccccacccacggcggcgacatcaacgacatcaagaaggccagactgctgctgaagagcgtgagagagaccaacccccaccacccccccgcctggatcgccagcgccagactggaggaggtgaccggcaagctgcaggtggccagaaacctgatcatgaagggcaccgagatgtgccccaagagcgaggacgtgtggctggaggccgccagactgcagcccggcgacaccgccaaggccgtggtggcccaggccgtgagacacctgccccagagcgtgagaatctacatcagagccgccgagctggagaccgacatcagagccaagaagagagtgctgagaaaggccctggagcacgtgcccaacagcgtgagactgtggaaggccgccgtggagctggaggagcccgaggacgccagaatcatgctgagcagagccgtggagtgctgccccaccagcgtggagctgtggctggccctggccagactggagacctacgagaacgccagaaaggtgctgaacaaggccagagagaacatccccaccgacagacacatctggatcaccgccgccaagctggaggaggccaacggcaacacccagatggtggagaagatcatcgacagagccatcaccagcctgagagccaacggcgtggagatcaacagagagcagtggatccaggacgccgaggagtgcgacagagccggcagcgtggccacctgccaggccgtgatgagagccgtgatcggcatcggcatcgaggaggaggacagaaagcacacctggatggaggacgccgacagctgcgtggcccacaacgccctggagtgcgccagagccatctacgcctacgccctgcaggtgttccccagcaagaagagcgtgtggctgagagccgcctacttcgagaagaaccacggcaccagagagagcctggaggccctgctgcagagagccgtggcccactgccccaaggccgaggtgctgtggctgatgggcgccaagagcaagtggctggccggcgacgtgcccgccgccagaagcatcctggccctggccttccaggccaaccccaacagcgaggagatctggctggccgccgtgaagctggagagcgagaacgacgagtacgagagagccagaagactgctggccaaggccagaagcagcgcccccaccgccagagtgttcatgaagagcgtgaagctggagtgggtgcaggacaacatcagagccgcccaggacctgtgcgaggaggccctgagacactacgaggacttccccaagctgtggatgatgaagggccagatcgaggagcagaaggagatgatggagaaggccagagaggcctacaaccagggcctgaagaagtgcccccacagcacccccctgtggctgctgctgagcagactggaggagaagatcggccagctgaccagagccagagccatcctggagaagagcagactgaagaaccccaagaaccccggcctgtggctggagagcgtgagactggagtacagagccggcctgaagaacatcgccaacaccctgatggccaaggccctgcaggagtgccccaacagcggcatcctgtggagcgaggccatcttcctggaggccagaccccagagaagaaccaagagcgtggacgccctgaagaagtgcgagcacgacccccacgtgctgctggccgtggccaagctgttctggagccagagaaagatcaccaaggccagagagtggttccacagaaccgtgaagatcgacagcgacctgggcgacgcctgggccttcttctacaagttcgagctgcagcacggcaccgaggagcagcaggaggaggtgagaaagagatgcgagagcgccgagcccagacacggcgagctgtggtgcgccgtgagcaaggacatcgccaactggcagaagaagatcggcgacatcctgagactggtggccggcagaatcaagaacaccttctag

SEQ ID NO: 174736 - DNA, 2706 bp, Artificial Sequence
  derived and/or modified sequence
atgaacaagaagaagaagcccttcctgggcatgcccgcccccctgggctacgtgcccggcctgggcagaggcgccaccggcttcaccaccagaagcgacatcggccccgccagagacgccaacgaccccgtggacgacagacacgccccccccggcaagagaaccgtgggcgaccagatgaagaagaaccaggccgccgacgacgacgacgaggacctgaacgacaccaactacgacgagttcaacggctacgccggcagcctgttcagcagcggcccctacgagaaggacgacgaggaggccgacgccatctacgccgccctggacaagagaatggacgagagaagaaaggagagaagagagcagagagagaaggaggagatcgagaagtacagaatggagagacccaagatccagcagcagttcagcgacctgaagagaaagctggccgaggtgaccgaggaggagtggctgagcatccccgaggtgggcgacgccagaaacaagagacagagaaaccccagatacgagaagctgacccccgtgcccgacagcttcttcgccaagcacctgcagaccggcgagaaccacaccagcgtggaccccagacagacccagttcggcggcctgaacaccccctaccccggcggcctgaacaccccctaccccggcggcatgacccccggcctgatgacccccggcaccggcgagctggacatgagaaagatcggccaggccagaaacaccctgatggacatgagactgagccaggtgagcgacagcgtgagcggccagaccgtggtggaccccaagggctacctgaccgacctgaacagcatgatccccacccacggcggcgacatcaacgacatcaagaaggccagactgctgctgaagagcgtgagagagaccaacccccaccacccccccgcctggatcgccagcgccagactggaggaggtgaccggcaagctgcaggtggccagaaacctgatcatgaagggcaccgagatgtgccccaagagcgaggacgtgtggctggaggccgccagactgcagcccggcgacaccgccaaggccgtggtggcccaggccgtgagacacctgccccagagcgtgagaatctacatcagagccgccgagctggagaccgacatcagagccaagaagagagtgctgagaaaggccctggagcacgtgcccaacagcgtgagactgtggaaggccgccgtggagctggaggagcccgaggacgccagaatcatgctgagcagagccgtggagtgctgccccaccagcgtggagctgtggctggccctggccagactggagacctacgagaacgccagaaaggtgctgaacaaggccagagagaacatccccaccgacagacacatctggatcaccgccgccaagctggaggaggccaacggcaacacccagatggtggagaagatcatcgacagagccatcaccagcctgagagccaacggcgtggagatcaacagagagcagtggatccaggacgccgaggagtgcgacagagccggcagcgtggccacctgccaggccgtgatgagagccgtgatcggcatcggcatcgaggaggaggacagaaagcacacctggatggaggacgccgacagctgcgtggcccacaacgccctggagtgcgccagagccatctacgcctacgccctgcaggtgttccccagcaagaagagcgtgtggctgagagccgcctacttcgagaagaaccacggcaccagagagagcctggaggccctgctgcagagagccgtggcccactgccccaaggccgaggtgctgtggctgatgggcgccaagagcaagtggctggccggcgacgtgcccgccgccagaagcatcctggccctggccttccaggtgttcatgaagagcgtgaagctggagtgggtgcaggacaacatcagagccgcccaggacctgtgcgaggaggccctgagacactacgaggacttccccaagctgtggatgatgaagggccagatcgaggagcagaaggagatgatggagaaggccagagaggcctacaaccagggcctgaagaagtgcccccacagcacccccctgtggctgctgctgagcagactggaggagaagatcggccagctgaccagagccagagccatcctggagaagagcagactgaagaaccccaagaaccccggcctgtggctggagagcgtgagactggagtacagagccggcctgaagaacatcgccaacaccctgatggccaaggccctgcaggagtgccccaacagcggcatcctgtggagcgaggccatcttcctggaggccagaccccagagaagaaccaagagcgtggacgccctgaagaagtgcgagcacgacccccacgtgctgctggccgtggccaagctgttctggagccagagaaagatcaccaaggccagagagtggttccacagaaccgtgaagatcgacagcgacctgggcgacgcctgggccttcttctacaagttcgagctgcagcacggcaccgaggagcagcaggaggaggtgagaaagagatgcgagagcgccgagcccagacacggcgagctgtggtgcgccgtgagcaaggacatcgccaactggcagaagaagatcggcgacatcctgagactggtggccggcagaatcaagaacaccttctag

SEQ ID NO: 174737 - protein, 923 aa, Artificial Sequence
  derived and/or modified sequence
MEGAKPTLQLVYQAVQALYHDPDPSGKERASFWLGELQRSVHAWEISDQLLQIRQDVESCYFAAQTMKMKIQTSFYELPTDSHASLRDSLLTHIQNLKDLSPVIVTQLALAIADLALQMPSWKGCVQTLVEKYSNDVTSLPFLLEILTVLPEEVHSRSLRIGANRRTEIIEDLAFYSSTVVSLLMTCVEKAGTDEKMLMKVFRCLGSWFNLGVLDSNFMANNKLLALLFEVLQQDKTSSNLHEAASDCVCSALYAIENVETNLPLAMQLFQGVLTLETAYHMAVAREDLDKVLNYCRIFTELCETFLEKIVCTPGQGLGDLRTLELLLICAGHPQYEVVEISFNFWYRLGEHLYKTNDEVIHGIFKAYIQRLLHALARHCQLEPDHEGVPEETDDFGEFRMRVSDLVKDLIFLIGSMECFAQLYSTLKEGNPPWEVTEAVLFIMAAIAKSVDPENNPTLVEVLEGVVRLPETVHTAVRYTSIELVGEMSEVVDRNPQFLDPVLGYLMKGLCEKPLASAAAKAIHNICSVCRDHMAQHFNGLLEIARSLDSFLLSPEAAVGLLKGTALVLARLPLDKITECLSELCSVQVMALKKLLSQEPSNGISSDPTVFLDRLAVIFRHTNPIVENGQTHPCQKVIQEIWPVLSETLNKHRADNRIVERCCRCLRFAVRCVGKGSAALLQPLVTQMVNVYHVHQHSCFLYLGSILVDEYGMEEGCRQGLLDMLQALCIPTFQLLEQQNGLQNHPDTVDDLFRLATRFIQRSPVTLLRSQVVIPILQWAIASTTLDHRDANCSVMRFLRDLIHTGVANDHEEDFELRKELIGQVMNQLGQQLVSQLLHTCCFCLPPYTLPDVAEVLWEIMQVDRPTFCRWLENSLKGLPKETTVGAVTVTHKQLTDFHKQVTSAEECKQVCWALRDFTRLFR

SEQ ID NO: 174738 - protein, 957 aa, Artificial Sequence
  derived and/or modified sequence
MEGAKPTLQLVYQAVQALYHDPDPSGKERASFWLGELQRSVHAWEISDQLLQIRQDVESCYFAAQTMKMKIQTSFYELPTDSHASLRDSLLTHIQNLKDLSPVIVTQLALAIADLALQMPSWKGCVQTLVEKYSNDVTSLPFLLEILTVLPEEVHSRSLRIGANRRTEIIEDLAFYSSTVVSLLMTCVEKAGTDEKMLMKVFRCLGSWFNLGVLDSNFMANNKLLALLFEVLQQDKTSSNLHEAASDCVCSALYAIENVETNLPLAMQLFQGVLTLETAYHMAVAREDLDKVLNYCRIFTELCETFLEKIVCTPGQGLGDLRTLELLLICAGHPQYEVVEISFNFWYRLGEHLYKTNDEVIHGIFKAYIQRLLHALARHCQLEPDHEGVPEETDDFGEFRMRVSDLVKDLIFLIGSMECFAQLYSTLKEGNPPWEVTEAVLFIMAAIAKSVDPKKPFSNAVCRHSLLFGQNITSEISNCEYLPPVLRENNPTLVEVLEGVVRLPETVHTAVRYTSIELVGEMSEVVDRNPQFLDPVLGYLMKGLCEKPLASAAAKAIHNICSVCRDHMAQHFNGLLEIARSLDSFLLSPEAAVGLLKGTALVLARLPLDKITECLSELCSVQVMALKKLLSQEPSNGISSDPTVFLDRLAVIFRHTNPIVENGQTHPCQKVIQEIWPVLSETLNKHRADNRIVERCCRCLRFAVRCVGKGSAALLQPLVTQMVNVYHVHQHSCFLYLGSILVDEYGMEEGCRQGLLDMLQALCIPTFQLLEQQNGLQNHPDTVDDLFRLATRFIQRSPVTLLRSQVVIPILQWAIASTTLDHRDANCSVMRFLRDLIHTGVANDHEEDFELRKELIGQVMNQLGQQLVSQLLHTCCFCLPPYTLPDVAEVLWEIMQVDRPTFCRWLENSLKGLPKETTVGAVTVTHKQLTDFHKQVTSAEECKQVCWALRDFTRLFR

SEQ ID NO: 174739 - DNA, 2772 bp, Artificial Sequence
  derived and/or modified sequence
atggagggcgccaagcccaccctgcagctggtgtaccaggccgtgcaggccctgtaccacgaccccgaccccagcggcaaggagagagccagcttctggctgggcgagctgcagagaagcgtgcacgcctgggagatcagcgaccagctgctgcagatcagacaggacgtggagagctgctacttcgccgcccagaccatgaagatgaagatccagaccagcttctacgagctgcccaccgacagccacgccagcctgagagacagcctgctgacccacatccagaacctgaaggacctgagccccgtgatcgtgacccagctggccctggccatcgccgacctggccctgcagatgcccagctggaagggctgcgtgcagaccctggtggagaagtacagcaacgacgtgaccagcctgcccttcctgctggagatcctgaccgtgctgcccgaggaggtgcacagcagaagcctgagaatcggcgccaacagaagaaccgagatcatcgaggacctggccttctacagcagcaccgtggtgagcctgctgatgacctgcgtggagaaggccggcaccgacgagaagatgctgatgaaggtgttcagatgcctgggcagctggttcaacctgggcgtgctggacagcaacttcatggccaacaacaagctgctggccctgctgttcgaggtgctgcagcaggacaagaccagcagcaacctgcacgaggccgccagcgactgcgtgtgcagcgccctgtacgccatcgagaacgtggagaccaacctgcccctggccatgcagctgttccagggcgtgctgaccctggagaccgcctaccacatggccgtggccagagaggacctggacaaggtgctgaactactgcagaatcttcaccgagctgtgcgagaccttcctggagaagatcgtgtgcacccccggccagggcctgggcgacctgagaaccctggagctgctgctgatctgcgccggccacccccagtacgaggtggtggagatcagcttcaacttctggtacagactgggcgagcacctgtacaagaccaacgacgaggtgatccacggcatcttcaaggcctacatccagagactgctgcacgccctggccagacactgccagctggagcccgaccacgagggcgtgcccgaggagaccgacgacttcggcgagttcagaatgagagtgagcgacctggtgaaggacctgatcttcctgatcggcagcatggagtgcttcgcccagctgtacagcaccctgaaggagggcaaccccccctgggaggtgaccgaggccgtgctgttcatcatggccgccatcgccaagagcgtggaccccgagaacaaccccaccctggtggaggtgctggagggcgtggtgagactgcccgagaccgtgcacaccgccgtgagatacaccagcatcgagctggtgggcgagatgagcgaggtggtggacagaaacccccagttcctggaccccgtgctgggctacctgatgaagggcctgtgcgagaagcccctggccagcgccgccgccaaggccatccacaacatctgcagcgtgtgcagagaccacatggcccagcacttcaacggcctgctggagatcgccagaagcctggacagcttcctgctgagccccgaggccgccgtgggcctgctgaagggcaccgccctggtgctggccagactgcccctggacaagatcaccgagtgcctgagcgagctgtgcagcgtgcaggtgatggccctgaagaagctgctgagccaggagcccagcaacggcatcagcagcgaccccaccgtgttcctggacagactggccgtgatcttcagacacaccaaccccatcgtggagaacggccagacccacccctgccagaaggtgatccaggagatctggcccgtgctgagcgagaccctgaacaagcacagagccgacaacagaatcgtggagagatgctgcagatgcctgagattcgccgtgagatgcgtgggcaagggcagcgccgccctgctgcagcccctggtgacccagatggtgaacgtgtaccacgtgcaccagcacagctgcttcctgtacctgggcagcatcctggtggacgagtacggcatggaggagggctgcagacagggcctgctggacatgctgcaggccctgtgcatccccaccttccagctgctggagcagcagaacggcctgcagaaccaccccgacaccgtggacgacctgttcagactggccaccagattcatccagagaagccccgtgaccctgctgagaagccaggtggtgatccccatcctgcagtgggccatcgccagcaccaccctggaccacagagacgccaactgcagcgtgatgagattcctgagagacctgatccacaccggcgtggccaacgaccacgaggaggacttcgagctgagaaaggagctgatcggccaggtgatgaaccagctgggccagcagctggtgagccagctgctgcacacctgctgcttctgcctgcccccctacaccctgcccgacgtggccgaggtgctgtgggagatcatgcaggtggacagacccaccttctgcagatggctggagaacagcctgaagggcctgcccaaggagaccaccgtgggcgccgtgaccgtgacccacaagcagctgaccgacttccacaagcaggtgaccagcgccgaggagtgcaagcaggtgtgctgggccctgagagacttcaccagactgttcagatag

SEQ ID NO: 174740 - DNA, 2874 bp, Artificial Sequence
  derived and/or modified sequence
atggagggcgccaagcccaccctgcagctggtgtaccaggccgtgcaggccctgtaccacgaccccgaccccagcggcaaggagagagccagcttctggctgggcgagctgcagagaagcgtgcacgcctgggagatcagcgaccagctgctgcagatcagacaggacgtggagagctgctacttcgccgcccagaccatgaagatgaagatccagaccagcttctacgagctgcccaccgacagccacgccagcctgagagacagcctgctgacccacatccagaacctgaaggacctgagccccgtgatcgtgacccagctggccctggccatcgccgacctggccctgcagatgcccagctggaagggctgcgtgcagaccctggtggagaagtacagcaacgacgtgaccagcctgcccttcctgctggagatcctgaccgtgctgcccgaggaggtgcacagcagaagcctgagaatcggcgccaacagaagaaccgagatcatcgaggacctggccttctacagcagcaccgtggtgagcctgctgatgacctgcgtggagaaggccggcaccgacgagaagatgctgatgaaggtgttcagatgcctgggcagctggttcaacctgggcgtgctggacagcaacttcatggccaacaacaagctgctggccctgctgttcgaggtgctgcagcaggacaagaccagcagcaacctgcacgaggccgccagcgactgcgtgtgcagcgccctgtacgccatcgagaacgtggagaccaacctgcccctggccatgcagctgttccagggcgtgctgaccctggagaccgcctaccacatggccgtggccagagaggacctggacaaggtgctgaactactgcagaatcttcaccgagctgtgcgagaccttcctggagaagatcgtgtgcacccccggccagggcctgggcgacctgagaaccctggagctgctgctgatctgcgccggccacccccagtacgaggtggtggagatcagcttcaacttctggtacagactgggcgagcacctgtacaagaccaacgacgaggtgatccacggcatcttcaaggcctacatccagagactgctgcacgccctggccagacactgccagctggagcccgaccacgagggcgtgcccgaggagaccgacgacttcggcgagttcagaatgagagtgagcgacctggtgaaggacctgatcttcctgatcggcagcatggagtgcttcgcccagctgtacagcaccctgaaggagggcaaccccccctgggaggtgaccgaggccgtgctgttcatcatggccgccatcgccaagagcgtggaccccaagaagcccttcagcaacgccgtgtgcagacacagcctgctgttcggccagaacatcaccagcgagatcagcaactgcgagtacctgccccccgtgctgagagagaacaaccccaccctggtggaggtgctggagggcgtggtgagactgcccgagaccgtgcacaccgccgtgagatacaccagcatcgagctggtgggcgagatgagcgaggtggtggacagaaacccccagttcctggaccccgtgctgggctacctgatgaagggcctgtgcgagaagcccctggccagcgccgccgccaaggccatccacaacatctgcagcgtgtgcagagaccacatggcccagcacttcaacggcctgctggagatcgccagaagcctggacagcttcctgctgagccccgaggccgccgtgggcctgctgaagggcaccgccctggtgctggccagactgcccctggacaagatcaccgagtgcctgagcgagctgtgcagcgtgcaggtgatggccctgaagaagctgctgagccaggagcccagcaacggcatcagcagcgaccccaccgtgttcctggacagactggccgtgatcttcagacacaccaaccccatcgtggagaacggccagacccacccctgccagaaggtgatccaggagatctggcccgtgctgagcgagaccctgaacaagcacagagccgacaacagaatcgtggagagatgctgcagatgcctgagattcgccgtgagatgcgtgggcaagggcagcgccgccctgctgcagcccctggtgacccagatggtgaacgtgtaccacgtgcaccagcacagctgcttcctgtacctgggcagcatcctggtggacgagtacggcatggaggagggctgcagacagggcctgctggacatgctgcaggccctgtgcatccccaccttccagctgctggagcagcagaacggcctgcagaaccaccccgacaccgtggacgacctgttcagactggccaccagattcatccagagaagccccgtgaccctgctgagaagccaggtggtgatccccatcctgcagtgggccatcgccagcaccaccctggaccacagagacgccaactgcagcgtgatgagattcctgagagacctgatccacaccggcgtggccaacgaccacgaggaggacttcgagctgagaaaggagctgatcggccaggtgatgaaccagctgggccagcagctggtgagccagctgctgcacacctgctgcttctgcctgcccccctacaccctgcccgacgtggccgaggtgctgtgggagatcatgcaggtggacagacccaccttctgcagatggctggagaacagcctgaagggcctgcccaaggagaccaccgtgggcgccgtgaccgtgacccacaagcagctgaccgacttccacaagcaggtgaccagcgccgaggagtgcaagcaggtgtgctgggccctgagagacttcaccagactgttcagatag

SEQ ID NO: 174741 - DNA, 2772 bp, Artificial Sequence
  derived and/or modified sequence
atggagggtgccaagcctactttacagctggtgtatcaagcagtgcaagcactgtaccacgatccagaccctagcggaaaggaaagggcctctttctggttgggtgagctccagagaagtgttcacgcctgggaaatcagcgaccagctcctacagatccggcaagatgtcgagtcctgctacttcgccgcccaaacaatgaagatgaaaattcagacctcattttacgagttacccacagactcccatgcttcacttagggattcactgctgacccatatccagaacctcaaggatctgagccctgtaatcgtaacacagttagcactcgccatcgcggatctcgcactgcagatgccatcatggaaaggatgcgtacagaccctcgtcgaaaaatattctaacgatgtcactagcctgcccttcctgctggagatcctgactgtgctgcccgaggaggtgcacagcaggtccctaaggattggtgccaatcgcagaacagaaattattgaggatctcgcattttactcaagcactgtcgtgagcttacttatgacttgtgtggagaaggccggtactgacgagaaaatgttgatgaaggtctttcgatgccttggatcttggtttaacctcggcgtgctggacagcaacttcatggccaataacaaacttttggctttgttgttcgaggtcctgcagcaggataagacctccagtaaccttcatgaggctgctagcgactgcgtctgttccgcgttatatgccatcgagaacgtggagaccaaccttcccttagccatgcagctttttcagggcgtgcttacgctcgagaccgcttaccacatggcggtggctcgcgaagacttggataaggtgctcaattactgcagaattttcacggagttatgtgagaccttcttagagaaaatcgtttgtactccaggccaaggactgggcgatttgcggacactagaactgctgctgatttgtgcaggacatccacagtatgaggttgtagagatatcattcaacttttggtatagactcggcgaacatttgtataagacgaacgacgaggtgatccacggcattttcaaggcttatatccagcggctactccacgcattggcccgtcattgtcaactcgagcctgaccatgagggggtgcccgaagagaccgatgatttcggtgaattccgcatgagagtatcggatttggtcaaagacctgatcttccttatcggctccatggagtgctttgcccagctgtacagtacgcttaaggaaggcaatccaccttgggaggtgaccgaggccgttttatttatcatggctgccatcgcgaagtctgtggaccccgaaaacaatccaactctcgtggaagtgctggaaggagtcgtgcggctgcctgaaaccgtccacacggccgtgagatacactagtatcgagctggtgggcgagatgtccgaagtggtggaccgaaatccccagttcctcgatcccgtcctggggtatctcatgaaaggtctgtgtgagaaaccactggcctcggccgcggccaaggccatacacaacatttgtagtgtctgcagggaccacatggcacaacactttaacggcctgctggaaattgctcggtccctggacagctttttactaagtcctgaagctgcagtgggcctgctgaaagggacagcactagtcttagcccgtctgcccttggacaaaattacagaatgcctatcagaattgtgttctgtgcaggtgatggccctgaagaagctgttgtcacaagagccgagcaacggcatctcatccgacccaaccgtgttcctggacagactggctgtgatcttcaggcatactaaccctatagtagaaaatggacagacgcatccctgtcagaaggtgattcaggagatctggccagttctgtctgagacacttaacaaacatcgtgcagataatcggattgtagagcggtgctgtcgttgcctgcgctttgctgtccgttgcgttggtaaggggtccgcagctctcctgcaacctttagtcacccagatggtcaacgtttatcacgtgcaccagcatagttgcttcctgtacctggggtccattctggtggatgagtatggtatggaggagggctgtagacagggccttctagacatgctgcaggcattgtgcattcctacctttcaacttctggagcaacagaatgggctgcagaaccacccagacactgtcgatgacctgttccgtttggctaccagattcatacagaggtctccagtgacactactgaggagtcaggtggtcatccctatcctccagtgggccatcgctagtactaccctcgatcacagagatgccaactgctccgtgatgcgctttctgagggacctgatccacacaggagtcgcgaatgatcatgaagaggatttcgagctgaggaaagaactcattggacaggtcatgaaccagctcggccagcagctagtatctcagctccttcacacgtgctgcttctgtctgccaccttatactcttcctgacgtcgcggaggtcctgtgggaaatcatgcaggttgatcgtcctaccttttgcagatggctcgagaactccctgaaggggctccccaaggagacaacggtgggggccgtgaccgtgacgcacaaacagctgactgattttcataagcaggtcacctcagcggaggagtgtaaacaggtgtgctgggcacttcgagactttacacgactgttccgctag

SEQ ID NO: 174742 - DNA, 2874 bp, Artificial Sequence
  derived and/or modified sequence
atggagggggccaagcctacactccagcttgtgtaccaggcagtgcaagccctttatcatgatccagacccatctggtaaggaaagagcaagcttttggctgggagagttacaacggagcgtgcacgcttgggagatctccgaccagttgctgcagatccgtcaagatgtggagagttgctacttcgcggcccagactatgaagatgaaaattcagacctcattctacgaattacctactgactctcatgcaagcttgcgggactcccttttgactcatatacagaacctaaaagacctcagcccagtgatcgtgacacagctagcactcgcaatcgcagacctagccctgcagatgccatcttggaagggatgcgtccagaccctggtggagaaatacagtaacgatgtgaccagtctacccttcctcctggaaattcttaccgtgcttcccgaggaagtgcattctaggtccctgcgaattggggctaacaggaggacggagattatcgaagacctcgcattttattcgtcaacagtcgtctcactgcttatgacttgtgtggagaaggccggcacagatgagaagatgctgatgaaggtgtttagatgtctggggtcctggttcaatctcggcgtcctagattctaattttatggctaataacaagctcctggctttactgtttgaagttttgcagcaggataaaacttctagtaatctgcatgaagccgcttcggattgtgtgtgcagtgcgctgtacgcgatcgaaaacgtggagacaaacctgcccctggcgatgcaacttttccagggagtgcttacattggagactgcttatcacatggcagtcgcaagagaggacttggacaaagtgctgaactactgccggatattcaccgaactttgtgaaactttcctcgagaagatcgtgtgtaccccagggcaaggtctgggcgacctgcgtactctcgagcttctgctaatttgcgcagggcacccacagtacgaggtggtggaaatcagttttaatttttggtacaggttaggggaacatttgtacaaaactaatgatgaggtaatccatggcatatttaaggcgtatatacagcgactgttgcacgcccttgcgagacattgccagctcgagccagaccatgaaggggtccccgaggagacagatgactttggggaattcaggatgcgtgtgtccgatttggtgaaggacctcatctttcttatcgggagtatggagtgtttcgcgcaattgtattccaccctcaaggaaggaaatccaccatgggaggttaccgaggctgtgttgttcatcatggccgccatcgccaaatcagtggaccccaagaaaccattctcgaatgcggtgtgtcggcacagcttgctgttcgggcaaaatatcacctctgagatatcaaactgtgagtatttgcctccagtactgcgagaaaataaccccaccctggtcgaggtgctagaaggagtcgtcagactccctgagacagtgcacaccgctgtgaggtatacaagtatcgagctggtgggtgaaatgagcgaagtcgtcgacagaaacccacagtttcttgatcccgtcctaggatatctaatgaaggggctttgtgagaagcctctcgccagtgccgcagcgaaggctatccacaatatctgcagtgtgtgtcgcgatcatatggctcagcacttcaacgggctccttgagatcgcccgctctctggattcatttctgctgagtcctgaagcggcggtggggctattgaagggcacagccctggtgctcgctaggctgcccctggacaagataaccgaatgcctgtccgagctgtgtagcgtccaggttatggcccttaagaagctcctaagccaggagcccagtaatggtatcagcagtgatccaactgtgtttctggaccggttagctgtcatttttcgacacacaaatcctattgttgagaacggccaaacacacccctgtcaaaaagtcatccaagaaatctggccagtcctctctgagacactcaataaacaccgcgctgacaacagaatcgtggagagatgctgtcgctgcctgaggttcgccgtgagatgtgtgggcaaggggagcgctgctcttcttcagcctttagtgactcagatggtcaacgtgtaccatgtacaccaacacagctgcttcctgtacctgggaagtatcctggtcgacgaatatgggatggaggagggatgcagacagggcctgctcgacatgctccaggccctctgtattcccacatttcaattacttgagcagcaaaacggcctgcagaatcacccagacacagtggacgacctgtttaggctggcaaccagattcatccagagatcacctgtgacactgcttcggtcccaggtggtcatacctatcctgcagtgggcaattgcttcaacaacactcgatcatcgggatgcaaattgttccgtcatgcgttttctgagagacctaatccacactggggtggccaatgaccatgaagaagacttcgaactgcgaaaagagttaataggacaggtgatgaaccagctgggccaacagttggtgtctcagctgttacatacatgctgcttctgcctccccccctatactctgccagacgtggcggaggtgctgtgggagataatgcaggtcgacagacccaccttttgtagatggctcgaaaattctctgaaggggctgcccaaggaaactacagtgggggcggtgacagtgactcacaagcagctcaccgattttcacaaacaggttacatccgccgaagaatgcaagcaggtgtgctgggcactacgggacttcactcggttgttccggtag

SEQ ID NO: 174743 - DNA, 2874 bp, Artificial Sequence
  derived and/or modified sequence
atggaaggcgctaagcctacattgcagctggtgtatcaggccgtgcaggccctgtatcacgaccctgacccctctggcaaggaacgcgcgtccttttggcttggtgagctccagcgctctgtacatgcctgggagataagcgaccagttgttacagatcagacaagatgtggaatcttgttacttcgctgcacagaccatgaaaatgaagattcagacatccttttacgagttgcccaccgattcacacgcctccctcagagacagtctgctaacacacattcagaatttgaaagatctgtccccagtgattgttacccagttagccctggcgatcgccgacttagctcttcagatgccgtcttggaagggatgtgtgcagactttggttgaaaagtactccaatgatgttacctcactaccattcctcttggaaatcctgacagtactgcctgaagaagtacactccagatccttgcgcatcggggctaaccgccggacggagatcattgaagacctggcattctattctagcaccgtagtgtctttgttgatgacatgcgttgagaaagctggaacagatgagaagatgttgatgaaagtattccggtgtttgggttcgtggttcaatctgggggtactggattctaactttatggccaacaataaattattggctctgctttttgaggtgctgcagcaggataagacatctagtaacttacatgaagcagcaagcgattgcgtctgtagtgccctctacgcaatcgagaacgttgagaccaacttacctctggctatgcagctttttcagggcgtgttaaccctagaaacagcttaccacatggctgtagctagagaggatctggacaaagtgctgaactactgtcggatttttaccgagctctgcgaaaccttcttagagaagatcgtgtgtaccccaggtcaaggactgggtgacctgaggactttggagctcctgctgatctgcgccggtcacccccaatatgaagtggtggaaatctcttttaacttttggtatcgcctaggggaacacctgtataaaactaatgatgaagtaattcacggcatcttcaaggcatacattcagagattactgcacgccctggcgcgacactgccagcttgagcctgatcatgaaggcgtacctgaagagaccgatgacttcggagagtttcgtatgcgcgtgtctgatctggtgaaggatctcatctttttgatcggatccatggagtgttttgctcagttatactcaacccttaaagaaggcaaccctccttgggaagtaaccgaagccgtactgtttatcatggccgctattgccaaatctgtcgacccgaaaaagcctttctccaatgcggtgtgtaggcattccctgctgtttggccaaaacattacaagcgagatcagcaactgtgagtatctgccccccgtccttagggaaaacaaccccacattggtggaggtgctagagggcgttgtgaggctcccagagacggttcacaccgcagtacgatatactagcattgagctggttggagagatgtccgaagtggtggaccgaaatcctcaatttctcgacccggtacttggatacctaatgaagggactttgcgaaaagcccctcgcatctgcggctgctaaagccatccataacatctgcagcgtatgccgggaccatatggcacagcacttcaacgggcttcttgaaattgccagatctctggactcctttcttcttagcccggaggctgctgtgggtttgctcaaaggcactgcactggtgctcgcacggttacctttggataagattacagaatgtctgtcggagctatgttcagtgcaggtgatggctctcaagaagcttctgagccaggaacccagcaacgggatcagttctgaccctactgtctttttagataggcttgcggtgattttccgacacacgaaccccattgttgagaatggccaaacccatccttgtcaaaaagtcattcaggagatatggcctgtgctctccgagaccttgaataaacacagggctgacaacagaatcgttgaacggtgctgccggtgcctgaggttcgccgtgagatgcgtggggaaaggcagcgctgctttactgcagcccctcgtcacacaaatggtgaacgtctatcacgtgcaccagcattcttgctttctctatttaggttccatcctggtcgatgaatacggtatggaagaaggctgtcgtcagggtcttctggatatgctgcaggctttgtgcattccaaccttccagctcttagagcagcaaaacggcttacaaaaccaccccgacaccgtggacgacctgtttagactggccacccggttcattcagcggtctcctgtgacccttttacggtctcaggttgtcattcccatcctgcagtgggccattgctagtacaaccctggaccacagagacgcgaactgttcagttatgcggttccttcgagacctgatccacaccggggtggctaatgaccatgaagaagacttcgaactgcggaaagaactcattggccaagtcatgaaccagttgggccaacagcttgtaagccagcttctgcacacctgttgcttttgcctaccaccctatacacttccagacgtggctgaggtattgtgggaaatcatgcaagttgataggcccactttttgccggtggctcgagaatagtctgaaaggtttgcctaaggagaccacggtgggcgcagtgactgtgactcataaacagctcacggactttcacaaacaggtcacatctgcagaggagtgcaagcaggtctgctgggcacttcgggattttactaggctttttagatag

SEQ ID NO: 174744 - DNA, 2772 bp, Artificial Sequence
  derived and/or modified sequence
atggagggcgccaagcccaccctgcagctggtgtaccaggccgtgcaggccctgtaccatgaccctgaccccagcggcaaggagcgggccagcttctggctgggggagctgcagaggtctgtgcacgcctgggagatcagtgaccagctgctgcagatccggcaggatgtggagagctgctactttgctgcccagaccatgaagatgaagatccagaccagcttctatgagctgcccacagacagccacgccagcctgcgggacagcctgctgacccacatccagaacctgaaggacctgagccctgtgattgtgacccagctggccctggccatcgctgacctggccctgcagatgcccagctggaagggctgtgtgcagaccctggtggagaagtacagcaatgatgtgaccagcctgcccttcctgctggagatcctgactgtgctgcctgaggaggtgcacagccgcagcctgagaattggagccaacagaagaacagagatcatcgaggacctggccttctacagcagcacagtggtgtccctgctgatgacctgtgtggagaaggccggcacagatgagaagatgctgatgaaggtgttccgctgcctgggctcctggttcaacctgggcgtgctggacagcaacttcatggccaacaacaagctgctggccctgctgtttgaggtgctgcagcaggacaagaccagcagcaacctgcacgaggccgccagtgactgtgtgtgcagcgccctgtatgccattgaaaatgtggagaccaacctgcccctggccatgcagctgttccagggcgtgctgaccctggagacagcctaccacatggctgtggcccgggaggacctggacaaggtgctgaactactgccgcatcttcacagagctgtgtgagaccttcctggagaagatcgtgtgcaccccaggccagggcctgggggacctgcggaccctggagctgctgctgatctgtgccggccacccccagtatgaggtggtggagatctccttcaacttctggtaccgcctgggggagcacctgtacaagaccaatgatgaggtgatccacggcatcttcaaggcctacatccagaggctgctgcacgccctggcccggcactgccagctggagccagaccacgagggcgtgcctgaggagacagatgactttggagagttcaggatgagggtgtctgacctggtgaaggacctgatcttcctgattggctccatggagtgctttgcccagctgtacagcaccctgaaggagggcaaccccccctgggaggtgacagaagctgtgctcttcatcatggccgccatcgccaagtctgtggaccctgagaacaaccccaccctggtggaggtgctggagggcgtggtgcggctgcctgagaccgtgcacacagctgtgcgctacaccagcattgagctggtgggggagatgtctgaggtggtggacaggaacccccagttcctggaccctgtgctgggctacctgatgaagggcctgtgtgagaagcccctggccagcgctgctgccaaggccatccacaacatctgcagcgtgtgccgggaccacatggcccagcacttcaacggcctgctggagatcgcccggagcctggacagcttcctgctgagccctgaggccgctgtgggcctgctgaagggcacagccctggtgctggcccggctgcccctggacaagatcacagaatgtctgtctgagctgtgcagcgtgcaggtgatggccctgaagaagctgctgagccaggagcccagcaatggcatcagcagtgaccccaccgtcttcctggaccggctggccgtcatcttccgccacaccaaccccatcgtggagaatggccagacccacccctgccagaaggtgatccaggagatctggcctgtgctgtctgagaccctgaacaagcacagagctgacaaccgcatcgtggagcgctgctgccgctgcctgcgctttgctgtgcgctgtgtgggcaaaggatctgctgccctgctgcagcccctggtgacccagatggtgaatgtgtaccacgtgcaccagcacagctgcttcctgtacctgggcagcatcctggtggatgaatatggcatggaggagggctgccggcagggcctgctggacatgctgcaggccctgtgcatccccaccttccagctgctggagcagcagaatggcctgcagaaccacccagacacagtggatgacctcttccggctggccacccgcttcatccagaggagccctgtgaccctgctgcggagccaggtggtgatccccatcctgcagtgggccatcgccagcaccaccctggaccacagagatgccaactgcagcgtgatgaggttcctgcgggacctgatccacactggagtggccaatgaccatgaagaagattttgagctgaggaaggagctgattggccaggtgatgaaccagctgggccagcagctggtgtcccagctgctgcacacctgctgcttctgcctgcccccctacaccctgcctgatgtggccgaggtgctgtgggagatcatgcaggtggaccggcccaccttctgccgctggctggagaacagcctgaagggcctgcccaaggagaccaccgtgggcgctgtgacagtgacccacaagcagctgacagacttccacaagcaggtgaccagcgctgaggagtgcaagcaggtgtgctgggccctgcgggacttcaccaggctcttcagatag

SEQ ID NO: 174745 - DNA, 2874 bp, Artificial Sequence
  derived and/or modified sequence
atggagggcgccaagcccaccctgcagctggtgtaccaggccgtgcaggccctgtaccatgaccctgaccccagcggcaaggagcgggccagcttctggctgggggagctgcagaggtctgtgcacgcctgggagatcagtgaccagctgctgcagatccggcaggatgtggagagctgctactttgctgcccagaccatgaagatgaagatccagaccagcttctatgagctgcccacagacagccacgccagcctgcgggacagcctgctgacccacatccagaacctgaaggacctgagccctgtgattgtgacccagctggccctggccatcgctgacctggccctgcagatgcccagctggaagggctgtgtgcagaccctggtggagaagtacagcaatgatgtgaccagcctgcccttcctgctggagatcctgactgtgctgcctgaggaggtgcacagccgcagcctgagaattggagccaacagaagaacagagatcatcgaggacctggccttctacagcagcacagtggtgtccctgctgatgacctgtgtggagaaggccggcacagatgagaagatgctgatgaaggtgttccgctgcctgggctcctggttcaacctgggcgtgctggacagcaacttcatggccaacaacaagctgctggccctgctgtttgaggtgctgcagcaggacaagaccagcagcaacctgcacgaggccgccagtgactgtgtgtgcagcgccctgtatgccattgaaaatgtggagaccaacctgcccctggccatgcagctgttccagggcgtgctgaccctggagacagcctaccacatggctgtggcccgggaggacctggacaaggtgctgaactactgccgcatcttcacagagctgtgtgagaccttcctggagaagatcgtgtgcaccccaggccagggcctgggggacctgcggaccctggagctgctgctgatctgtgccggccacccccagtatgaggtggtggagatctccttcaacttctggtaccgcctgggggagcacctgtacaagaccaatgatgaggtgatccacggcatcttcaaggcctacatccagaggctgctgcacgccctggcccggcactgccagctggagccagaccacgagggcgtgcctgaggagacagatgactttggagagttcaggatgagggtgtctgacctggtgaaggacctgatcttcctgattggctccatggagtgctttgcccagctgtacagcaccctgaaggagggcaaccccccctgggaggtgacagaagctgtgctcttcatcatggccgccatcgccaagtctgtggaccccaagaagcccttcagcaatgctgtgtgccgccacagcctgctgtttggccagaacatcaccagcgagatcagcaactgtgagtacctgccccctgtgctgcgggagaacaaccccaccctggtggaggtgctggagggcgtggtgcggctgcctgagaccgtgcacacagctgtgcgctacaccagcattgagctggtgggggagatgtctgaggtggtggacaggaacccccagttcctggaccctgtgctgggctacctgatgaagggcctgtgtgagaagcccctggccagcgctgctgccaaggccatccacaacatctgcagcgtgtgccgggaccacatggcccagcacttcaacggcctgctggagatcgcccggagcctggacagcttcctgctgagccctgaggccgctgtgggcctgctgaagggcacagccctggtgctggcccggctgcccctggacaagatcacagaatgtctgtctgagctgtgcagcgtgcaggtgatggccctgaagaagctgctgagccaggagcccagcaatggcatcagcagtgaccccaccgtcttcctggaccggctggccgtcatcttccgccacaccaaccccatcgtggagaatggccagacccacccctgccagaaggtgatccaggagatctggcctgtgctgtctgagaccctgaacaagcacagagctgacaaccgcatcgtggagcgctgctgccgctgcctgcgctttgctgtgcgctgtgtgggcaaaggatctgctgccctgctgcagcccctggtgacccagatggtgaatgtgtaccacgtgcaccagcacagctgcttcctgtacctgggcagcatcctggtggatgaatatggcatggaggagggctgccggcagggcctgctggacatgctgcaggccctgtgcatccccaccttccagctgctggagcagcagaatggcctgcagaaccacccagacacagtggatgacctcttccggctggccacccgcttcatccagaggagccctgtgaccctgctgcggagccaggtggtgatccccatcctgcagtgggccatcgccagcaccaccctggaccacagagatgccaactgcagcgtgatgaggttcctgcgggacctgatccacactggagtggccaatgaccatgaagaagattttgagctgaggaaggagctgattggccaggtgatgaaccagctgggccagcagctggtgtcccagctgctgcacacctgctgcttctgcctgcccccctacaccctgcctgatgtggccgaggtgctgtgggagatcatgcaggtggaccggcccaccttctgccgctggctggagaacagcctgaagggcctgcccaaggagaccaccgtgggcgctgtgacagtgacccacaagcagctgacagacttccacaagcaggtgaccagcgctgaggagtgcaagcaggtgtgctgggccctgcgggacttcaccaggctcttcagatag

SEQ ID NO: 174746 - DNA, 2772 bp, Artificial Sequence
  derived and/or modified sequence
atggagggcgccaagcccaccctgcagctggtgtaccaggccgtgcaggctttgtaccatgaccccgacccgtccggaaaagaaagagcctccttttggctgggggagttacagcgaagtgtacacgcctgggaaatctcggaccagttactccagatcagacaggacgtggagtcctgctatttcgccgctcaaacgatgaaaatgaagattcagaccagcttctatgagcttcccaccgatagtcatgctagtcttcgcgatagcctgttgacacatatccagaatctcaaagacctgtcccccgtcatcgtgacccagctggcactggccattgcagacctggccctccaaatgccatcgtggaagggctgcgtgcagactttagtagagaagtactctaacgacgtgaccagcctgccttttctgttggagattcttaccgttttgcctgaagaggtgcactcacgctccctgcggatcggcgccaaccggcgcacagagattatcgaagatctggcgttctactccagtacagtggtcagtctcctgatgacctgtgtcgagaaagcaggaactgacgagaagatgttaatgaaggtgtttcgctgcctcggctcttggtttaatcttggtgttttggattccaattttatggccaacaataagttgctggcgcttttgttcgaggtgctgcaacaggataagacaagcagtaatttgcatgaggccgcctccgactgtgtgtgctcagctttgtacgcaatagaaaacgtagagaccaacctgcccctagcaatgcaactgtttcagggagtgctcacacttgagacagcataccatatggcggtcgcaagggaggacctcgacaaagtgttgaactattgccgcatcttcacagaactctgtgaaacgttcttggaaaaaatagtttgcaccccgggacaaggcctaggtgatttgcggaccctggagctcttgctgatttgtgccggacacccccagtatgaagttgtggaaatatcatttaacttttggtaccggctgggagaacatctgtataagacaaatgacgaagtgattcacggcatttttaaggcttacattcagcggctcttacacgctttagctcgccactgccagctggaacctgatcacgaaggcgtgcctgaggaaaccgacgacttcggggagtttaggatgcgagtttcagatctagtaaaggacctgatctttctcataggcagtatggagtgctttgcccagctctattcaactcttaaggagggcaatcccccatgggaagtcacggaagcagtcctgttcataatggctgcaatcgcaaaaagcgtggatcccgaaaataatcccactttggtggaagttctcgaaggtgttgtgcggctaccagagacagtccacactgctgtgaggtacacatctatagagttagtgggcgaaatgtccgaggtcgtcgatcgcaaccctcagttcctggatcctgtactgggttatctcatgaagggattatgcgagaaaccactcgcctctgcggccgctaaagccatccataacatctgcagtgtgtgtagagaccacatggcccaacatttcaatggtcttttggagatcgcacgatctttagattctttcttgctatcaccagaagccgcagtgggcctgctgaagggcactgccctcgtattggcgagactgcctttggacaagattaccgagtgtttatctgaactgtgctcagtccaggtcatggctttgaagaaactgctctctcaagaaccatccaatggcatctcaagtgatcctaccgtcttcctcgacaggctggctgtaatctttaggcacaccaacccaatagtagaaaacggccaaacacatccttgtcagaaagtcattcaggagatatggcctgtgctaagcgaaaccttgaacaaacaccgggctgataataggatcgtagaaaggtgctgccgttgtttgagattcgccgttagatgcgtcggcaaaggctccgcggcgttgctgcagccactggttacccagatggtcaatgtgtaccacgtccaccagcattcatgctttctctatctcgggagtattttggtcgacgaatacggaatggaggagggctgccgccaaggcctactggacatgttgcaggctttatgcatcccgacattccaattgctggaacagcagaacggtctccagaaccatcctgacaccgtcgacgacttgtttagactggcgacgaggttcattcagcgctctcccgtcactctgctccgaagccaggttgtgattccaatcctccaatgggctatagccagcacaactctggatcacagggacgcgaactgttctgtgatgcgatttctgcgggaccttatacatacgggtgttgccaacgaccacgaggaagactttgagcttcgcaaggaacttataggacaggtgatgaaccagctgggccagcagcttgtcagccagctgctccacacttgttgtttctgcttgcccccatacacgctacctgatgtggcggaagttctctgggaaatcatgcaggtggatagacccaccttttgccgatggctggagaattcccttaagggcctgccaaaagagactacggtaggcgcggtgaccgttactcataaacagttaacagacttccataaacaagtaacctcagccgaagagtgtaagcaggtgtgctgggcgttgagagattttacaagactgtttcgctag

SEQ ID NO: 174747 - DNA, 2874 bp, Artificial Sequence
  derived and/or modified sequence
atggagggcgccaagcccaccctgcagctggtgtaccaggccgtgcaggccctctaccacgaccccgacccctccggtaaggaacgggcttccttctggctgggcgagctgcaacggagcgttcatgcctgggagatatccgaccaattgttgcagattcgtcaggatgtggagagttgctattttgcagctcaaactatgaaaatgaagatacagacttccttttacgaactgccaaccgactcccatgccagtcttagagactcgctgctgacacatatccagaacctgaaagatctgtccccagtgatcgtcacacaacttgctcttgcaatcgcagatctggctcttcagatgccatcttggaagggatgtgtacaaaccctggtggagaagtattctaacgacgtaactagcctcccgttcttattggagattctgactgtgctccccgaggaggtacattcccgatccctgcggatcggggctaaccggaggactgaaataatcgaggacctggccttttattcttctacagttgtgtctcttttgatgacgtgcgttgagaaggctggcaccgacgagaagatgctcatgaaggtctttcgctgcctgggaagttggtttaatctgggcgtcttggactcaaatttcatggctaacaacaagttgctcgctctgctgttcgaagtgctgcaacaggataaaacaagttcaaatctccacgaagccgcctccgactgcgtctgcagtgccctatacgccatcgaaaatgtggagaccaatcttcctctggccatgcagctgttccaaggcgtgctcaccctggaaactgcttaccacatggcagtggcacgggaggatctcgataaggtactcaactactgcaggatattcaccgagctttgtgagacttttctggagaaaatcgtgtgcacacctggacagggacttggagacctgcggacactcgagctgctcctcatctgcgccggtcatccgcagtatgaagtagtggaaatatctttcaatttctggtaccgcctgggcgagcacctgtacaaaactaatgatgaggtcattcatggcatctttaaagcatacatccagcgcctccttcatgcattagcaaggcattgtcagttggagccagaccacgagggtgttcctgaggaaacagacgactttggcgaatttcgaatgagggtgtccgacctcgttaaggacctgatctttttgataggcagtatggagtgcttcgcgcaactatattccacactgaaggaggggaatccgccatgggaagtgactgaagctgtgttgttcattatggctgccatcgcgaaaagcgtagatcccaaaaagccattctccaatgccgtatgtcgtcattctctgctgttcggtcagaacattacgagcgagatcagtaattgtgagtatctgccgcccgtgctgcgggaaaataacccaactctggtcgaggttctcgaaggggtggttagactgccagaaactgtccacactgcagttcgctacacctcaattgaactagtaggggaaatgtctgaggtcgtggacagaaatccccagtttttggacccggtgctggggtacttaatgaagggactgtgcgagaagccgctagcttccgctgccgccaaggcgatacacaatatctgtagcgtgtgccgcgatcacatggcccagcactttaacgggctcttggaaatagcccgttccctcgactcgtttttattaagtccagaggccgccgttggactgttgaaagggaccgctctggtgctcgctagactgcctctggataagatcaccgagtgcttaagcgaactttgcagtgtgcaagtgatggcactcaaaaaactgttgtcacaggaaccttctaacggaatcagttcagatcccacagtatttctggatcggctggcggtcatctttcgccatacaaaccccatagttgagaacgggcagacccatccttgtcagaaagtgatccaggagatctggcctgtgctgagcgagacactcaacaaacacagggccgacaatagaatcgtggaacgatgctgtcggtgtctgcggttcgccgtgcggtgtgtaggcaagggatcagccgcactgttgcagccattggtcacacagatggtgaacgtataccatgtgcaccagcattcctgcttcttataccttggttcaatcctcgttgacgaatacggtatggaagaaggatgtcgccagggtcttcttgacatgctgcaggccctgtgtatccctacatttcagctgctcgaacagcagaacggattgcagaatcatccagacaccgtggacgacctgtttcgactggccaccaggtttattcaaagaagccccgtgacacttctgcgatcccaggtagttatccccatcttacaatgggctattgcttctaccacccttgaccatcgggacgccaattgcagtgttatgcgctttttaagagatttaatccacaccggggtggccaatgaccacgaggaggacttcgaacttcggaaggagctgatcggacaggttatgaatcaactgggtcagcagcttgtgtcccaactgctgcacacatgttgcttctgtcttcccccatacacgctgcccgatgtggccgaagtgctctgggagatcatgcaggtcgaccgccccactttctgtcgctggctagaaaattcattgaagggtctgcccaaggaaactactgtcggcgccgtgaccgtaacccacaagcagctgaccgatttccacaagcaggtgacgtccgccgaagagtgcaaacaggtctgctgggcactgcgagactttactcggctgttccgctag

SEQ ID NO: 174748 - DNA, 2874 bp, Artificial Sequence
  derived and/or modified sequence
atggagggcgccaagcccaccctgcagctggtgtaccaggccgtgcaggctctgtatcacgaccccgacccatccggaaaagaacgggctagcttttggctgggtgaactccagcgttcagtccatgcctgggaaatctccgaccagctcttgcagatcagacaggatgtggaatcttgctacttcgctgcccagactatgaagatgaaaatccagaccagtttctacgagctgccaacagactcccacgctagtctacgggattccctgcttactcatatccagaatctgaaggacctgtctcccgtcattgtcactcagcttgccctcgctatcgccgatctggcactgcaaatgcccagctggaagggatgtgtacagacccttgtggagaaatattctaacgatgttactagcctgccctttctgctagagatcctgaccgtgctgcctgaggaggtgcacagtcgcagtttgcgtatcggtgccaacaggcgcaccgagattattgaagacttggccttttactccagcacagtggtctctcttctcatgacttgcgttgagaaggccggcaccgacgaaaagatgctgatgaaagtgtttcgctgcctgggcagttggtttaatctgggagttctggactctaatttcatggctaataacaagttgctggctcttctgtttgaagtcctccagcaagacaagactagttctaacctgcacgaagccgctagcgattgtgtctgcagcgccctgtatgctatcgagaacgtggaaaccaacctgccattggccatgcagctgtttcagggggttttgacattggagacagcctaccatatggccgtcgcacgggaagacttggataaagtacttaactactgtcggattttcacagaactttgcgagacgtttcttgagaaaatcgtttgcaccccagggcagggcctgggagatctgaggacactagagctcctcctgatatgcgcaggccatccccagtatgaggtcgttgagatttcatttaacttctggtataggcttggggagcatttgtataagaccaatgacgaagtgatacacggaatatttaaggcatatatccagcgtctcttacacgccctcgccaggcactgccagctggaacccgatcacgagggagtacccgaggaaacagatgattttggcgagtttaggatgcgggtcagcgatctagtgaaagatttgatctttctgatcgggagcatggaatgcttcgcgcaactctactccacactgaaagagggtaatccaccatgggaggtcaccgaagccgtgctgttcatcatggcagcaatcgctaagagcgtggacccaaagaaacctttttcaaacgcagtctgtcggcactcgttgctctttgggcaaaacataaccagtgagatcagcaattgcgaatacctcccaccagtcctccgggaaaacaaccccacgctggtggaggttcttgagggggtcgtcagactgcccgagactgtgcacacagctgtgcgatacacatccattgagctggtgggcgagatgagcgaggtggtagataggaacccccagtttctcgatcctgtattaggctacttgatgaaaggactgtgtgaaaaaccactcgcctccgccgcagccaaagccatccacaatatctgctccgtttgcagggaccatatggctcagcatttcaacggattactggagatcgctcgttctctcgactcgtttttgttgtcgcccgaggcagctgttggtctcctcaagggaaccgccctcgtcctcgcaaggcttcctctggataagattacagagtgcctctccgagctttgtagcgtccaggtcatggctcttaaaaaactgctctctcaggaaccctccaacgggataagctcagatcctaccgtcttcctcgacagactggctgtaatctttaggcacacgaaccccattgtggagaacggccaaacccatccatgccagaaggtcatccaggagatctggcccgtgctgtcagagacactcaacaagcacagggccgacaatagaattgtggagagatgctgtcgttgtctgagatttgctgtgcggtgcgtgggcaagggtagcgcagctctgctccaaccactggtgacccaaatggtcaacgtataccatgtgcatcaacattcttgctttctctacctcggctccattttagtggacgaatatggaatggaagaaggctgcaggcagggacttttagacatgctgcaagccttgtgtatacctacctttcagctgttggagcaacagaacggactacagaatcatcctgatacagtggacgatctctttaggctggccaccaggtttattcagcgaagcccagtgacattactgcgatctcaagtggtgatcccaattctgcagtgggctatcgcgagcaccacactggatcacagggatgcgaactgttcagtgatgaggttcctgcgtgacctcatccacacaggcgtagccaacgaccatgaagaggactttgaacttcgcaaggagctgataggacaggtcatgaaccagctgggacagcagctagtgtcccagttgctgcatacttgctgcttctgtcttcccccctatacactccccgatgtagcggaggttttgtgggagattatgcaggtggacaggcctaccttctgcagatggctggagaactctttaaagggcctccctaaggagacaaccgtaggggcagtaacagtaacccacaagcagttaactgactttcacaaacaggtgacttccgcagaagaatgtaaacaggtgtgttgggccctaagggactttacacggttgtttagatag

SEQ ID NO: 174749 - DNA, 2772 bp, Artificial Sequence
  derived and/or modified sequence
atggagggagccaagcctacactccagttggtgtatcaagctgttcaggccctttaccacgatccagatccctcaggaaaggagcgtgcttcattttggcttggcgagctccaaagatctgtccacgcatgggaaatttccgaccagctgctgcagattcggcaggatgtagaatcatgctatttcgctgcgcagactatgaaaatgaaaatccaaacaagtttctacgagcttcctactgactctcacgcgagtctgcgggacagtcttctgacacatattcaaaacctgaaggacctctcaccagtcatagtgacacaattggctctggctattgcagacctcgcccttcaaatgccatcttggaagggctgtgtgcaaacacttgtcgaaaaatacagcaatgatgtgaccagtcttcctttccttctcgagatcctgactgttctccccgaagaggttcactcgcggtctctgaggattggtgctaatcgacgcaccgagattattgaagatctcgccttctactcatctacagttgtcagtttgctgatgacatgcgtggagaaggcaggcactgatgaaaagatgctgatgaaggttttccgatgcctcgggtcctggttcaaccttggagtcttggatagcaacttcatggcaaataataaattgctggcccttctgtttgaggtgttacaacaggataagacgtccagtaatctccatgaagcagcctctgactgtgtctgctctgctctgtacgccatcgagaatgtagagaccaatctgccgcttgctatgcagctgttccagggcgtgctgactcttgagactgcgtatcatatggccgtggctcgcgaggatttagataaggtgcttaattactgtcgcatctttactgagttgtgcgagaccttcctcgaaaaaatagtgtgtacgcctggccaaggtctgggggatctccgcactctggagctcctgctgatctgcgccggacacccccaatatgaagtggtggagattagtttcaacttctggtataggttaggggagcacctgtacaagaccaatgatgaagtgattcacggtatctttaaggcttacattcaacggctgctccatgccttagctcgccactgtcaacttgaacccgatcatgagggtgttcccgaggagaccgacgactttggagagttccgtatgcgcgttagcgacctggttaaggacctgatcttcctgatcggttccatggagtgttttgcccagctgtactcaacactgaaggaagggaatcccccttgggaggtgactgaagccgtgctgtttatcatggcggcaatagctaaatccgtggaccctgagaacaatccaacccttgtggaggtgctcgagggcgtggtccgccttccggagacagtgcacaccgccgttcgctacacatctatcgagcttgtaggcgaaatgtcagaagtcgtggaccggaatccccaattcctggatcctgtgctgggatatctcatgaagggcctttgcgagaaaccattggcatcagctgctgctaaggccattcacaatatctgcagcgtctgcagagatcacatggctcagcacttcaacggtctgctggagatagctcgaagtctcgactcctttcttttatcgcccgaggctgctgttggactcctcaagggaaccgccctggttttagccagattgccactggacaagataactgagtgcctgagcgagctgtgcagtgtgcaggtgatggctctcaagaaattgctgtcccaagaaccctctaacggcatcagtagtgatcccaccgtgtttttagatagacttgccgttatttttcgacacacaaaccccattgtggaaaacggccaaacacacccgtgccaaaaagtgatccaagagatatggcccgtcctttctgagactctgaataagcacagggctgacaacaggatcgtggaacgttgttgtcgctgtttacgctttgcagtgcgctgcgtgggtaaaggatccgcagccctgttgcagccattggtcacgcagatggtaaacgtctaccatgtccaccagcacagttgctttctgtatctgggttcaatcttggtagatgagtacgggatggaagagggctgtcgccagggcctattagacatgctccaggctctttgtataccaactttccagcttctagaacagcagaatggcctgcagaatcacccagacactgtggatgatctcttcaggttggccacacgctttattcaaagatcacccgtgaccctcctgcgttcccaggtagttatccccatcctccagtgggccatagcttccaccactctggatcacagagacgccaattgttccgtgatgcgattcctacgtgatctcattcacacaggggttgctaacgaccatgaagaggatttcgaactgagaaaagagctgatcggccaggtcatgaaccagttgggacagcaactagtgagtcaactcctgcacacctgctgcttttgtctccccccttacaccctgccagacgtagccgaggtactgtgggaaatcatgcaagttgatcgacccacgttttgcaggtggttagagaattcccttaagggccttcctaaggaaaccacagtgggagctgtcaccgtgactcataaacaactgacagattttcataaacaggtgacttcagcagaggaatgtaagcaggtctgctgggcactaagggacttcaccaggttgttcagatag

SEQ ID NO: 174750 - DNA, 2874 bp, Artificial Sequence
  derived and/or modified sequence
atggagggagccaagcctaccctccagctggtgtatcaggccgtacaggctctgtatcacgatcctgaccctagcggcaaagagcgtgctagtttttggctgggtgagctgcagcggagtgtgcacgcgtgggaaatttccgaccagcttttacaaatccgccaagacgtggaaagctgttacttcgcggcacagaccatgaaaatgaagatccagacgagtttctacgagctacccaccgactctcacgcctctctgagagacagcctgctcactcatatccaaaacctgaaagacctgtcacctgtgattgtgactcagcttgctctggccatagctgacttggcactgcagatgcccagctggaaaggatgtgtccagacccttgtggagaagtacagcaatgacgttacctcgctaccgtttctgcttgagattctgacagtcctgcctgaggaggtccactctagaagcttaaggattggagctaaccgacggaccgaaatcatcgaggacctcgccttctactcttctacggtggtcagcctccttatgacctgcgtcgaaaaggcgggtacagatgagaagatgttaatgaaagtgttcaggtgcttggggtcatggtttaatctgggggttctcgattccaattttatggcaaataacaaactgctggccctgttgtttgaagttctgcagcaggataaaacgagcagtaatcttcacgaggccgcttcggactgtgtatgcagcgcgctgtatgcaatcgagaatgtggagactaacctgccgttggcaatgcagctgtttcagggagtcctgactctggaaacagcctaccacatggccgtggcccgtgaggacctagataaagtgctgaattactgccggatttttactgagctatgcgagacattcttggagaaaatcgtttgcactcccggtcaaggtctgggcgatctgcgaactttagaattgctgctgatatgcgccggacacccacagtatgaggtggtggaaatcagcttcaacttctggtatcgtctgggcgagcatctgtacaaaactaatgacgaagtaattcacggtattttcaaggcttacattcaacggctcttgcacgccctagctcgccattgccagctggaacccgatcacgagggcgttccagaggagaccgacgactttggtgaatttaggatgagggtgtccgacctggtcaaagatcttatttttcttattggatccatggagtgcttcgcgcaactgtactccacactcaaggaagggaaccctccatgggaggtcacagaggccgtcctgtttatcatggctgctattgccaagtctgtagatcccaaaaagcccttctctaacgcggtctgtcggcacagtttgctgtttggtcagaatatcacgtccgaaatttcaaactgtgaatatctcccccctgttctcagggaaaataacccaaccctagtggaagtgctggagggagtggttcgactgcccgaaacggtgcatacagccgtgagatatacaagcatcgagctcgtgggcgagatgtcagaggttgttgataggaatccacagttcctggatcctgtgctggggtatctcatgaaaggactctgcgagaagccactagcctcagctgctgcaaaggccatacacaatatctgctcagtgtgccgtgaccatatggcacagcacttcaacggccttctggagatcgctagaagcctggattcctttttgctgtccccagaggccgcagttggtttgcttaaggggacagccctggtgttggctcggcttcccctcgacaagattacagaatgcctgagcgaactttgcagcgtgcaagtgatggctttgaaaaagctgctgtctcaggagccttccaacggtattagtagcgacccaacagtatttctggataggctggcagtgatcttccgacacacaaatcccatcgttgagaacggccagacacatccctgccagaaagtgattcaggagatatggcctgtgttgtctgagacactgaacaagcatagagccgacaaccggatcgtcgaacgctgctgtaggtgcctgcgctttgctgtgcgctgtgttggcaaaggctcggccgctctgctacagccgttggtcacacagatggttaacgtgtaccacgtccatcagcacagttgttttctctacctcggatcaatactggtcgacgagtacggtatggaggagggatgccgccaggggctgcttgacatgctgcaggccttgtgcatccctacgttccaactgctggaacagcagaacggcctgcaaaaccatcccgatactgtcgacgacctgttcagacttgctacccggttcattcagcgcagtcctgtcacactgcttcgcagccaggtagtgatccctatcttacagtgggcgattgcctctaccacgttggaccatagggatgccaattgctccgtcatgaggttcctgcgcgatctgatccatacgggagtcgcgaacgatcatgaggaagactttgagctccgaaaagagcttatcggtcaggttatgaaccagcttggccaacaactggtgtctcagctgctccatacatgttgtttttgcctcccaccctacactttacctgacgtcgcggaagtcctctgggagataatgcaggtcgaccgccctacgttctgtagatggttggagaactccctaaagggactgccgaaggagaccactgtgggagctgttactgtcacccacaagcagctgaccgactttcacaagcaagtcacatcagccgaggaatgcaagcaggtgtgctgggcacttagggactttactagactgtttcgatag

SEQ ID NO: 174751 - DNA, 2874 bp, Artificial Sequence
  derived and/or modified sequence
atggaaggggcaaaaccaactctgcaattggtttatcaggcagttcaggcactgtatcacgaccccgaccccagtggcaaggagcgcgcatccttttggctaggcgaactgcagcggagtgtgcacgcctgggagattagtgatcagctgctacagattcgtcaggacgtggagtcatgctactttgccgctcagactatgaagatgaaaattcaaacctctttctatgagttgcccactgactctcacgccagcctcagggattcacttttgacccatattcagaatttgaaagatttaagccctgtcatcgtcacgcagttagctctggcaatcgccgatcttgctctgcaaatgccttcttggaagggatgtgtacagaccttggttgagaaatattctaacgatgttactagccttcctttcctgctcgaaatcctgactgtgctgcctgaggaagtccactcacgaagcttgagaatcggtgccaatagacgcaccgagattatagaggacctggcattttacagttccactgtggtgtcacttctgatgacctgtgtagaaaaggcgggaactgatgaaaaaatgctcatgaaagtgttccgttgcttgggaagttggttcaatctaggcgtgttagactctaattttatggcaaataataagcttctggctctgctttttgaggttctgcagcaggacaaaacttcgtcaaatctgcacgaggctgcatccgactgtgtgtgtagcgcactgtacgcaatcgagaacgtcgagacgaatctgcccctggccatgcaactgttccagggagtgctgacactggagacggcctaccacatggcagtggcccgagaagatctggacaaggtgcttaactattgtcgcatctttactgagctgtgtgagacgttcctggaaaagattgtgtgcactcccggacaggggctcggcgatctgaggacactggagctgcttctaatctgcgctggacatccacagtacgaagtagtcgagattagctttaatttctggtataggctgggtgagcacttatataaaaccaacgatgaggtgattcacgggatattcaaggcatatattcagcggctgttacatgctctcgcgagacactgccaactggaacccgaccatgaaggggtgccagaagaaacggatgacttcggagaatttaggatgcgcgtttctgacctagtcaaggatctgattttcctgatcgggtctatggagtgcttcgcccagttgtattccactctcaaggagggtaaccccccatgggaggtgactgaagcagttttatttatcatggctgccattgctaaatccgtcgaccccaagaaaccttttagtaatgctgtgtgtcgccactcccttctgtttggccagaatattactagcgagatttctaactgcgagtacctgcctcctgtactgagagagaacaatccgacccttgtcgaggtgcttgagggcgtggtgcggctccctgaaacagtccacaccgctgttaggtataccagtatcgaactggtaggggaaatgtcagaagttgtggaccgcaatccccagttcctcgaccccgtgcttggatatctgatgaaggggctgtgtgaaaagccattggcctcagccgctgccaaggctattcacaacatctgttcagtctgccgtgatcatatggcccaacacttcaatggcctcttagaaattgcaagatcactcgactccttcttgctcagcccagaggcggctgtgggtcttctaaagggaacagccctggtcctcgctcgattacctctggacaagatcaccgagtgcctgagtgagttgtgttcagtgcaggtcatggccctgaaaaaacttctctctcaagagcctagcaacgggattagtagcgacccaacagtgtttctggacaggttggccgtgatcttccgccatacgaatcctatagttgaaaatgggcagacgcacccatgccagaaggtgatccaggagatttggcctgtccttagcgaaacacttaacaaacaccgggcagacaaccggatcgtggaacgctgctgccgctgtttgagatttgcggtacggtgcgtcggtaaagggagcgcagccctcctccaacctctcgtcacgcaaatggtgaatgtctaccatgtgcaccagcattcctgcttcttatacctgggttcaatccttgtcgacgaatacggtatggaggagggctgcaggcagggtctcctagatatgctgcaggccttatgtatccccacattccagctcctcgaacaacagaacggattacaaaaccacccagatactgtcgacgacctgtttaggctggccacacgttttatccagcggagtcccgtgacattgctcaggtctcaggtggttatacctattttgcagtgggctatcgcctccactaccttggaccatagagacgccaactgctccgtgatgcgtttcctacgcgatctcattcatacaggtgtggccaacgatcatgaagaagacttcgagctgaggaaagagctgatcggccaggttatgaatcagctgggccagcagctcgtgagtcaactgcttcacacatgctgcttctgtctccctccctatactctgcccgacgttgcagaggtgctgtgggagataatgcaggttgatcgcccaacattttgtagatggttggaaaactccctcaagggactgcctaaagagacaacagtcggggctgtgaccgtgactcacaaacagctcacggacttccacaagcaggttacaagtgcagaagagtgtaagcaggtttgttgggcactgcgggactttacaaggctgttccgctag

SEQ ID NO: 174752 - DNA, 3245 bp, Artificial Sequence
  derived and/or modified sequence
ccctggtaacggccaaagaggaggagatggcgccagtcagggagcggccgtggcccagacagtgaggaagcgcgaaggcggagcaaccgaggaatcctccggagaagaatcagagccgtcgctaccgccactaccgccaccaccatggaaggagcaaagccgacattgcagctcgtgtaccaggcagtgcaggcgctttaccacgacccagatcccagcggaaaggagcgcgcctctttttggcttggggagctgcagcgttcggttcatgcatgggagatctcagaccagttgttacagatccggcaggatgtggagtcatgctattttgctgcacagaccatgaaaatgaagattcagacctcattttatgagctccccacagactctcatgcctctttacgggactcattgctaacccatatccagaacttgaaagacttgtcacctgttattgtaacgcagctggctttagcaatagcagatcttgccctacagatgccttcctggaagggatgtgtgcaaacactggtggaaaaatacagcaatgatgtgacttctttgccttttttgctggagatccttacagtgttacctgaagaagtacatagtcgttccttacgaattggagctaatcggcgcacagaaattatagaagatttggccttctactctagtacagtagtatctctattgatgacctgtgtagaaaaagcaggaacagatgagaaaatgcttatgaaggtttttcgctgtttgggaagttggtttaacttgggagttttggacagtaacttcatggctaacaataaattactagcactcctttttgaggttttgcaacaggataagacctcgtctaacctacatgaagctgcttcggactgtgtatgctcagctctctatgccattgagaatgtggagactaacttgccattagccatgcaactttttcagggagtgctgacattggagactgcctatcatatggccgtggcacgtgaagatttagacaaagttctgaattactgccgtattttcactgaactatgtgaaacttttcttgaaaaaattgtttgtactccaggccaaggtcttggggaccttcgaactctggagctgctgcttatctgtgcaggccatcctcaatatgaggtagtagaaatttcatttaacttttggtaccgactgggggaacatttgtacaaaactaacgatgaagttattcatggcatcttcaaagcttacattcagaggctgcttcacgccttggctcgacactgccagctggaaccagaccatgagggggttcctgaggagactgatgactttggggagtttcgcatgagggtatcagacctggtaaaggacttgattttcttgatagggtctatggagtgttttgctcagttatattctactctgaaagaaggcaacccaccctgggaggtgacagaagcggttctctttatcatggctgctatagcaaagagtgttgatccggaaaacaatccaacacttgtggaagtcctagaaggagttgtccgcctcccggagaccgtacatacggctgtgcgatacaccagcattgaattggttggagagatgagtgaagtcgttgatcgaaatcctcagttccttgaccctgtgttgggctatttgatgaaaggcctgtgtgaaaagcccctggcttctgctgcagccaaagccattcataacatttgctctgtctgccgagatcacatggctcagcactttaatggactcctggagattgcccgctccctcgattccttcctgttgtctccagaagctgctgtgggcttgctaaaagggacagcacttgtcctagcccgattacctttggataagattaccgaatgtcttagtgaactatgttctgttcaggttatggcattgaaaaagctgttgtctcaagagcccagcaatggcatatcctcagatcccacagtgttcttagatcgccttgcagtgatatttaggcataccaatcccattgtggaaaatggacagactcatccgtgtcagaaagtcatacaggaaatatggccagttttatccgagactctaaataagcaccgagctgataatcggattgtagagcgttgttgcaggtgcctgcgctttgctgttcgctgtgtaggcaaaggatctgcagcactgctgcagccactagtcacacagatggtgaatgtgtaccacgtacatcagcattcctgcttcctgtaccttggcagtatccttgtggatgaatatggcatggaagaaggctgtcggcagggactgctagacatgctccaggcactgtgcatccccacctttcagctcctagaacagcagaatggtctccagaatcaccctgacactgtagatgacctgttccggctagccaccaggtttattcagcgtagccctgtcaccttgctgcggagccaagtggtcatccctatcttacagtgggccattgcctctactaccctggaccaccgggatgccaattgtagtgtcatgaggtttctacgagacctcattcatacaggggtagccaatgatcatgaagaagactttgaattacggaaagaactgattggacaggtgatgaaccagcttggacagcagcttgtcagccagctgctgcacacctgctgcttttgcctccccccctataccctaccagatgtggctgaagtgctctgggagatcatgcaggttgacagaccgactttttgtcgatggttagaaaattccttaaaaggtttgccaaaggaaacaaccgtgggagccgtcacagtgacacacaaacaacttacagacttccacaagcaagtcactagtgctgaggaatgtaaacaagtttgctgggccttgcgagacttcaccaggttgtttcgatagctcacactcctgcactgtgcctgtcacccaggaatgtcttttttaattagaagacaggaagaaaacaaaaaccagactgtgtcccacaatcagaaacctccgttgtggcagaggggccttcaccgccaccagggtgtcccgccagacagggagagactccagccttctgaggccatcctgaggagttcctgtttgggggtgtgagggaaaatcagcgcggattttaaaaagatggctgtggcctgcccggcgtggtgggaggggagctggtttcctggtgaactttctaaaaggaaaaataattttaagtaaagaaaaaagaaaaaaaa

SEQ ID NO: 174753 - DNA, 3771 bp, Artificial Sequence
  derived and/or modified sequence
aaaggtatcggtgctgtcgcttccggtccgggtaaacgaaccttaggtacactggtgtgtggcctcccaagataggcttctgagggcaagtcagcgactgaagacgggagcgccagaatctgtggactcaagagtctagaatcaagtggaaaaaccggaaaaaaggccaggaacctgaatacgacctaatagctgtttccgagggggcaacttccacggagagccttctgccctggtaacggccaaagaggaggagatggcgccagtcagggagcggccgtggcccagacagtgaggaagcgcgaaggcggagcaaccgaggaatcctccggagaagaatcagagccgtcgctaccgccactaccgccaccaccatggaaggagcaaagccgacattgcagctcgtgtaccaggcagtgcaggcgctttaccacgacccagatcccagcggaaaggagcgcgcctctttttggcttggggagctgcagcgttcggttcatgcatgggagatctcagaccagttgttacagatccggcaggatgtggagtcatgctattttgctgcacagaccatgaaaatgaagattcagacctcattttatgagctccccacagactctcatgcctctttacgggactcattgctaacccatatccagaacttgaaagacttgtcacctgttattgtaacgcagctggctttagcaatagcagatcttgccctacagatgccttcctggaagggatgtgtgcaaacactggtggaaaaatacagcaatgatgtgacttctttgccttttttgctggagatccttacagtgttacctgaagaagtacatagtcgttccttacgaattggagctaatcggcgcacagaaattatagaagatttggccttctactctagtacagtagtatctctattgatgacctgtgtagaaaaagcaggaacagatgagaaaatgcttatgaaggtttttcgctgtttgggaagttggtttaacttgggagttttggacagtaacttcatggctaacaataaattactagcactcctttttgaggttttgcaacaggataagacctcgtctaacctacatgaagctgcttcggactgtgtatgctcagctctctatgccattgagaatgtggagactaacttgccattagccatgcaactttttcagggagtgctgacattggagactgcctatcatatggccgtggcacgtgaagatttagacaaagttctgaattactgccgtattttcactgaactatgtgaaacttttcttgaaaaaattgtttgtactccaggccaaggtcttggggaccttcgaactctggagctgctgcttatctgtgcaggccatcctcaatatgaggtagtagaaatttcatttaacttttggtaccgactgggggaacatttgtacaaaactaacgatgaagttattcatggcatcttcaaagcttacattcagaggctgcttcacgccttggctcgacactgccagctggaaccagaccatgagggggttcctgaggagactgatgactttggggagtttcgcatgagggtatcagacctggtaaaggacttgattttcttgatagggtctatggagtgttttgctcagttatattctactctgaaagaaggcaacccaccctgggaggtgacagaagcggttctctttatcatggctgctatagcaaagagtgttgatccaaagaagccctttagcaatgctgtgtgtcgtcacagcctgttatttggccagaatataacctctgaaatcagtaactgtgagtacttaccgcctgtactcagggaaaacaatccaacacttgtggaagtcctagaaggagttgtccgcctcccggagaccgtacatacggctgtgcgatacaccagcattgaattggttggagagatgagtgaagtcgttgatcgaaatcctcagttccttgaccctgtgttgggctatttgatgaaaggcctgtgtgaaaagcccctggcttctgctgcagccaaagccattcataacatttgctctgtctgccgagatcacatggctcagcactttaatggactcctggagattgcccgctccctcgattccttcctgttgtctccagaagctgctgtgggcttgctaaaagggacagcacttgtcctagcccgattacctttggataagattaccgaatgtcttagtgaactatgttctgttcaggttatggcattgaaaaagctgttgtctcaagagcccagcaatggcatatcctcagatcccacagtgttcttagatcgccttgcagtgatatttaggcataccaatcccattgtggaaaatggacagactcatccgtgtcagaaagtcatacaggaaatatggccagttttatccgagactctaaataagcaccgagctgataatcggattgtagagcgttgttgcaggtgcctgcgctttgctgttcgctgtgtaggcaaaggatctgcagcactgctgcagccactagtcacacagatggtgaatgtgtaccacgtacatcagcattcctgcttcctgtaccttggcagtatccttgtggatgaatatggcatggaagaaggctgtcggcagggactgctagacatgctccaggcactgtgcatccccacctttcagctcctagaacagcagaatggtctccagaatcaccctgacactgtagatgacctgttccggctagccaccaggtttattcagcgtagccctgtcaccttgctgcggagccaagtggtcatccctatcttacagtgggccattgcctctactaccctggaccaccgggatgccaattgtagtgtcatgaggtttctacgagacctcattcatacaggggtagccaatgatcatgaagaagactttgaattacggaaagaactgattggacaggtgatgaaccagcttggacagcagcttgtcagccagctgctgcacacctgctgcttttgcctccccccctataccctaccagatgtggctgaagtgctctgggagatcatgcaggttgacagaccgactttttgtcgatggttagaaaattccttaaaaggtttgccaaaggaaacaaccgtgggagccgtcacagtgacacacaaacaacttacagacttccacaagcaagtcactagtgctgaggaatgtaaacaagtttgctgggccttgcgagacttcaccaggttgtttcgatagctcacactcctgcactgtgcctgtcacccaggaatgtcttttttaattagaagacaggaagaaaacaaaaaccagactgtgtcccacaatcagaaacctccgttgtggcagaggggccttcaccgccaccagggtgtcccgccagacagggagagactccagccttctgaggccatcctgaggagttcctgtttgggggtgtgagggaaaatcagcgcggattttaaaaagatggctgtggcctgcccggcgtggtgggaggggagctggtttcctggtgaactttctaaaaggaaaaataattttaagtaaagaaaaaagaaaaaaaaggaagactaaacagaaaccagaactgaaacattcacctggtagcaaatgacacatgcacgcacacacacatacacgcacaagcgccagtgcgcacgtgtacacagaaaaacaaaaggacaagctttctgtgaaacaaaatatttacttagggataatgtggggattcacatgaattaaatagctgcaattggaa

SEQ ID NO: 174754 - DNA, 3019 bp, Artificial Sequence
  derived and/or modified sequence
gccagtcagggagcggccgtggcccagacagtgaggaagcgcgaaggcggagcaaccgaggaatcctccggagaagaatcagagccgtcgctaccgccactaccgccaccaccatggaaggagcaaagccgacattgcagctcgtgtaccaggcagtgcaggcgctttaccacgacccagatcccagcggaaaggagcgcgcctctttttggcttggggagctgcagcgttcggttcatgcatgggagatctcagaccagttgttacagatccggcaggatgtggagtcatgctattttgctgcacagaccatgaaaatgaagattcagacctcattttatgagctccccacagactctcatgcctctttacgggactcattgctaacccatatccagaacttgaaagacttgtcacctgttattgtaacgcagctggctttagcaatagcagatcttgccctacagatgccttcctggaagggatgtgtgcaaacactggtggaaaaatacagcaatgatgtgacttctttgccttttttgctggagatccttacagtgttacctgaagaagtacatagtcgttccttacgaattggagctaatcggcgcacagaaattatagaagatttggccttctactctagtacagtagtatctctattgatgacctgtgtagaaaaagcaggaacagatgagaaaatgcttatgaaggtttttcgctgtttgggaagttggtttaacttgggagttttggacagtaacttcatggctaacaataaattactagcactcctttttgaggttttgcaacaggataagacctcgtctaacctacatgaagctgcttcggactgtgtatgctcagctctctatgccattgagaatgtggagactaacttgccattagccatgcaactttttcagggagtgctgacattggagactgcctatcatatggccgtggcacgtgaagatttagacaaagttctgaattactgccgtattttcactgaactatgtgaaacttttcttgaaaaaattgtttgtactccaggccaaggtcttggggaccttcgaactctggagctgctgcttatctgtgcaggccatcctcaatatgaggtagtagaaatttcatttaacttttggtaccgactgggggaacatttgtacaaaactaacgatgaagttattcatggcatcttcaaagcttacattcagaggctgcttcacgccttggctcgacactgccagctggaaccagaccatgagggggttcctgaggagactgatgactttggggagtttcgcatgagggtatcagacctggtaaaggacttgattttcttgatagggtctatggagtgttttgctcagttatattctactctgaaagaaggcaacccaccctgggaggtgacagaagcggttctctttatcatggctgctatagcaaagagtgttgatccaaagaagccctttagcaatgctgtgtgtcgtcacagcctgttatttggccagaatataacctctgaaatcagtaactgtgagtacttaccgcctgtactcagggaaaacaatccaacacttgtggaagtcctagaaggagttgtccgcctcccggagaccgtacatacggctgtgcgatacaccagcattgaattggttggagagatgagtgaagtcgttgatcgaaatcctcagttccttgaccctgtgttgggctatttgatgaaaggcctgtgtgaaaagcccctggcttctgctgcagccaaagccattcataacatttgctctgtctgccgagatcacatggctcagcactttaatggactcctggagattgcccgctccctcgattccttcctgttgtctccagaagctgctgtgggcttgctaaaagggacagcacttgtcctagcccgattacctttggataagattaccgaatgtcttagtgaactatgttctgttcaggttatggcattgaaaaagctgttgtctcaagagcccagcaatggcatatcctcagatcccacagtgttcttagatcgccttgcagtgatatttaggcataccaatcccattgtggaaaatggacagactcatccgtgtcagaaagtcatacaggaaatatggccagttttatccgagactctaaataagcaccgagctgataatcggattgtagagcgttgttgcaggtgcctgcgctttgctgttcgctgtgtaggcaaaggatctgcagcactgctgcagccactagtcacacagatggtgaatgtgtaccacgtacatcagcattcctgcttcctgtaccttggcagtatccttgtggatgaatatggcatggaagaaggctgtcggcagggactgctagacatgctccaggcactgtgcatccccacctttcagctcctagaacagcagaatggtctccagaatcaccctgacactgtagatgacctgttccggctagccaccaggtttattcagcgtagccctgtcaccttgctgcggagccaagtggtcatccctatcttacagtgggccattgcctctactaccctggaccaccgggatgccaattgtagtgtcatgaggtttctacgagacctcattcatacaggggtagccaatgatcatgaagaagactttgaattacggaaagaactgattggacaggtgatgaaccagcttggacagcagcttgtcagccagctgctgcacacctgctgcttttgcctccccccctataccctaccagatgtggctgaagtgctctgggagatcatgcaggttgacagaccgactttttgtcgatggttagaaaattccttaaaaggtttgccaaaggaaacaaccgtgggagccgtcacagtgacacacaaacaacttacagacttccacaagcaagtcactagtgctgaggaatgtaaacaagtttgctgggccttgcgagacttcaccaggttgtttcgatagctcacactcctgcactgtgcctgtcacccagg

SEQ ID NO: 174755 - protein, 973 aa, Artificial Sequence
  derived and/or modified sequence
MAQLYYKKVNYSPYRDRIPLQIVRAETELSAEEKAFLNAVEKGDYATVKQALQEAEIYYNVNINCMDPLGRSALLIAIENENLEIMELLLNHSVYVGDALLYAIRKEVVGAVELLLSYRRPSGEKQVPTLMMDTQFSEFTPDITPIMLAAHTNNYEIIKLLVQKRVTIPRPHQIRCNCVECVSSSEVDSLRHSRSRLNIYKALASPSLIALSSEDPILTAFRLGWELKELSKVENEFKAEYEELSQQCKLFAKDLLDQARSSRELEIILNHRDDHSEELDPQKYHDLAKLKVAIKYHQKEFVAQPNCQQLLATLWYDGFPGWRRKHWVVKLLTCMTIGFLFPMLSIAYLISPRSNLGLFIKKPFIKFICHTASYLTFLFMLLLASQHIVRTDLHVQGPPPTVVEWMILPWVLGFIWGEIKEMWDGGFTEYIHDWWNLMDFAMNSLYLATISLKIVAYVKYNGSRPREEWEMWHPTLIAEALFAISNILSSLRLISLFTANSHLGPLQISLGRMLLDILKFLFIYCLVLLAFANGLNQLYFYYETRAIDEPNNCKGIRCEKQNNAFSTLFETLQSLFWSVFGLLNLYVTNVKARHEFTEFVGATMFGTYNVISLVVLLNMLIAMMNNSYQLIADHADIEWKFARTKLWMSYFDEGGTLPPPFNIIPSPKSFLYLGNWFNNTFCPKRDPDGRRRRRNLRSFTERNADSLIQNQHYQEVIRNLVKRYVAAMIRNSKTHEGLTEENFKELKQDISSFRYEVLDLLGNRKHPRSFSTSSTELSQRDDNNDGSGGARAKSKSVSFNLGCKKKTCHGPPLIRTMPRSSGAQGKSKAESSSKRSFMGPSLKKLGLLFSKFNGHMSEPSSEPMYTISDGIVQQHCMWQDIRYSQMEKGKAEACSQSEINLSEVELGEVQGAAQSSECPLACSSSLHCASSICSSNSKLLDSSEDVFETWGEACDLLMHKWGDGQEEQVTTRL

SEQ ID NO: 174756 - DNA, 2922 bp, Artificial Sequence
  derived and/or modified sequence
atggcccagctgtactacaagaaggtgaactacagcccctacagagacagaatccccctgcagatcgtgagagccgagaccgagctgagcgccgaggagaaggccttcctgaacgccgtggagaagggcgactacgccaccgtgaagcaggccctgcaggaggccgagatctactacaacgtgaacatcaactgcatggaccccctgggcagaagcgccctgctgatcgccatcgagaacgagaacctggagatcatggagctgctgctgaaccacagcgtgtacgtgggcgacgccctgctgtacgccatcagaaaggaggtggtgggcgccgtggagctgctgctgagctacagaagacccagcggcgagaagcaggtgcccaccctgatgatggacacccagttcagcgagttcacccccgacatcacccccatcatgctggccgcccacaccaacaactacgagatcatcaagctgctggtgcagaagagagtgaccatccccagaccccaccagatcagatgcaactgcgtggagtgcgtgagcagcagcgaggtggacagcctgagacacagcagaagcagactgaacatctacaaggccctggccagccccagcctgatcgccctgagcagcgaggaccccatcctgaccgccttcagactgggctgggagctgaaggagctgagcaaggtggagaacgagttcaaggccgagtacgaggagctgagccagcagtgcaagctgttcgccaaggacctgctggaccaggccagaagcagcagagagctggagatcatcctgaaccacagagacgaccacagcgaggagctggacccccagaagtaccacgacctggccaagctgaaggtggccatcaagtaccaccagaaggagttcgtggcccagcccaactgccagcagctgctggccaccctgtggtacgacggcttccccggctggagaagaaagcactgggtggtgaagctgctgacctgcatgaccatcggcttcctgttccccatgctgagcatcgcctacctgatcagccccagaagcaacctgggcctgttcatcaagaagcccttcatcaagttcatctgccacaccgccagctacctgaccttcctgttcatgctgctgctggccagccagcacatcgtgagaaccgacctgcacgtgcagggccccccccccaccgtggtggagtggatgatcctgccctgggtgctgggcttcatctggggcgagatcaaggagatgtgggacggcggcttcaccgagtacatccacgactggtggaacctgatggacttcgccatgaacagcctgtacctggccaccatcagcctgaagatcgtggcctacgtgaagtacaacggcagcagacccagagaggagtgggagatgtggcaccccaccctgatcgccgaggccctgttcgccatcagcaacatcctgagcagcctgagactgatcagcctgttcaccgccaacagccacctgggccccctgcagatcagcctgggcagaatgctgctggacatcctgaagttcctgttcatctactgcctggtgctgctggccttcgccaacggcctgaaccagctgtacttctactacgagaccagagccatcgacgagcccaacaactgcaagggcatcagatgcgagaagcagaacaacgccttcagcaccctgttcgagaccctgcagagcctgttctggagcgtgttcggcctgctgaacctgtacgtgaccaacgtgaaggccagacacgagttcaccgagttcgtgggcgccaccatgttcggcacctacaacgtgatcagcctggtggtgctgctgaacatgctgatcgccatgatgaacaacagctaccagctgatcgccgaccacgccgacatcgagtggaagttcgccagaaccaagctgtggatgagctacttcgacgagggcggcaccctgcccccccccttcaacatcatccccagccccaagagcttcctgtacctgggcaactggttcaacaacaccttctgccccaagagagaccccgacggcagaagaagaagaagaaacctgagaagcttcaccgagagaaacgccgacagcctgatccagaaccagcactaccaggaggtgatcagaaacctggtgaagagatacgtggccgccatgatcagaaacagcaagacccacgagggcctgaccgaggagaacttcaaggagctgaagcaggacatcagcagcttcagatacgaggtgctggacctgctgggcaacagaaagcaccccagaagcttcagcaccagcagcaccgagctgagccagagagacgacaacaacgacggcagcggcggcgccagagccaagagcaagagcgtgagcttcaacctgggctgcaagaagaagacctgccacggcccccccctgatcagaaccatgcccagaagcagcggcgcccagggcaagagcaaggccgagagcagcagcaagagaagcttcatgggccccagcctgaagaagctgggcctgctgttcagcaagttcaacggccacatgagcgagcccagcagcgagcccatgtacaccatcagcgacggcatcgtgcagcagcactgcatgtggcaggacatcagatacagccagatggagaagggcaaggccgaggcctgcagccagagcgagatcaacctgagcgaggtggagctgggcgaggtgcagggcgccgcccagagcagcgagtgccccctggcctgcagcagcagcctgcactgcgccagcagcatctgcagcagcaacagcaagctgctggacagcagcgaggacgtgttcgagacctggggcgaggcctgcgacctgctgatgcacaagtggggcgacggccaggaggagcaggtgaccaccagactgtag

SEQ ID NO: 174757 - DNA, 2922 bp, Artificial Sequence
  derived and/or modified sequence
atggctcagctttattacaaaaaggtgaattactctccttaccgcgatcgcattcccctgcagatcgtgagagccgagaccgaactctcagcagaggaaaaagcctttctgaatgcggttgaaaagggggattacgccaccgtgaagcaagctttgcaagaggccgagatctactataacgtgaacatcaattgtatggatcccctgggcaggtccgctctgctgatagccatcgaaaacgagaacttagagattatggaactactgcttaaccactctgtctatgttggtgacgcgcttctctacgcaattcggaaggaggtggtgggagcagtggagctcttgctgtcatataggagaccttccggagaaaagcaagtcccaactctgatgatggatacccagttttcagagttcacacccgacatcacacccattatgctggcagcccacactaacaattatgagattattaagctgctggttcagaaaagagtaactattcctagaccgcatcagattcggtgcaactgcgtggaatgtgttagcagctcagaggtcgatagcttgcggcacagtcgctcgcgcctcaatatctataaggccctggcctcgcccagtttgatcgccctgtcttcagaggatccaatcttaaccgctttccgactcggttgggagttgaaagagctgtcaaaagtcgagaatgagtttaaagccgaatacgaggaactgtcccagcagtgcaagctgtttgctaaggaccttctcgaccaagcccggtcgtcacgcgagttagaaattattctgaatcaccgcgatgatcattcggaggagctggatcctcagaagtatcacgatctggctaaattaaaggtggcaatcaaataccatcagaaggagttcgtagctcagcccaattgtcaacagttgttggccacattatggtatgacgggtttcccggttggcgccgcaaacattgggtggtcaaactgctcacatgcatgaccattggctttctgtttcctatgctgtcaattgcctacctaataagcccacgtagcaacctaggcttgttcataaagaagccatttatcaagttcatctgccatactgcgtcatacttgaccttcttatttatgctacttctcgcatcacagcatatcgtgcggaccgacttacatgtccagggtcccccaccaactgtagtcgagtggatgatcctgccttgggtgctgggattcatctggggagaaataaaggagatgtgggatggtgggttcactgagtatatacatgattggtggaacttgatggacttcgctatgaactccctttacttggccaccattagtcttaagattgtggcttatgtgaagtataatggctctcggccccgggaagagtgggaaatgtggcatccaaccttgatcgctgaagctctgttcgcaatctctaacatactgagctccctccggctgatatccttgttcactgccaatagccatctcggacccctgcagatttctttggggaggatgctgttagatattttaaagttcttgtttatttactgtctggtgctgctggcctttgccaacgggctgaaccaattgtatttctactatgaaacccgcgctatcgatgaacccaataactgtaaaggtatccgttgtgagaagcagaacaatgctttctccaccctgttcgagacccttcaatctctcttttggagtgtgtttggtctcctgaatttgtatgtcacaaacgtcaaagctcgtcatgaatttactgagtttgtgggggccaccatgtttggcacgtacaatgttatctcgctggtcgtcctgcttaatatgttaatcgctatgatgaacaatagctaccaacttatagctgaccacgctgacatcgagtggaagtttgcgaggacaaaattatggatgagttatttcgacgagggcggcacgctgccgccgccgttcaacatcatacctagcccaaaatctttcttgtatctgggcaactggtttaacaacacattttgccctaagagggaccccgacggtcggcggaggcgtcgtaacctgcggagctttaccgagaggaatgcagacagcttaatccagaaccagcattatcaggaggtgattaggaatctggttaaacgctatgtggccgctatgatccgtaacagcaagacccacgagggcctcacagaggagaactttaaagagcttaagcaggatattagctcgtttaggtatgaagtgctggatctgctgggaaatcggaaacacccacgtagcttttctacttcatcgaccgagctttcacagcgggacgacaacaacgacggctccgggggcgccagagccaagagcaaatccgtgtccttcaatcttggatgcaagaaaaagacatgccacgggccgcccctgatccgaacaatgccacgctcatcgggcgcccaaggtaaatccaaggccgagagttccagtaagcgaagttttatgggaccctccttgaaaaagctgggtttgctgttcagtaaattcaatgggcacatgtctgaaccttcctccgagccaatgtacactatcagtgacggaatagtgcagcagcactgcatgtggcaggacatacgctactcacagatggagaaggggaaagctgaagcatgctcacagtcagaaatcaatcttagcgaggtggaattaggcgaggttcagggagcggcccagtcttccgagtgcccgttagcctgctcatcttccctgcattgtgctagtagcatctgctcctcaaattctaagctgttagattcttcggaagatgtttttgaaacgtggggagaggcatgcgacttactgatgcataaatggggtgacggacaggaggagcaggtaacaacccggctctag

SEQ ID NO: 174758 - DNA, 2922 bp, Artificial Sequence
  derived and/or modified sequence
atggcccagctgtactacaagaaggtgaactacagcccctacagagaccgcatccccctgcagatcgtgcgggcagagacagagctgtctgctgaggagaaggccttcctgaatgctgtggagaagggggactatgccaccgtgaagcaggccctgcaggaggccgagatctactacaacgtgaacatcaactgcatggaccccctgggccgcagcgccctgctgattgccattgaaaatgaaaacctggagatcatggagctgctgctgaaccacagcgtgtatgtgggagatgccctgctgtatgccatcaggaaggaggtggtgggcgctgtggagctgctgctgagctacagaagacccagcggggagaagcaggtgcccaccctgatgatggacacccagttcagcgagttcaccccagacatcacccccatcatgctggccgcccacaccaacaactatgagatcatcaagctgctggtgcagaagagggtgaccatcccccggccccaccagatccgctgcaactgtgtggagtgtgtgagcagcagcgaggtggacagcctgcggcacagccgcagccggctgaacatctacaaggccctggccagccccagcctgattgccctgagcagcgaggaccccatcctgacagccttccggctgggctgggagctgaaggagctgagcaaggtggagaatgagttcaaggccgagtatgaggagctgagccagcagtgcaagctgtttgccaaggacctgctggaccaggcccggagcagccgggagctggagatcatcctgaaccacagagatgaccacagcgaggagctggacccccagaagtaccatgacctggccaagctgaaggtggccatcaagtaccaccagaaggagtttgtggcccagcccaactgccagcagctgctggccaccctgtggtatgatggcttccctggctggaggaggaagcactgggtggtgaagctgctgacctgcatgaccatcggcttcctgttccccatgctgagcatcgcctacctgatcagccccaggagcaacctgggcctcttcatcaagaagcccttcatcaagttcatctgccacacagccagctacctgaccttcctgttcatgctgctgctggccagccagcacatcgtgaggacagacctgcacgtgcagggccccccacccaccgtggtggagtggatgatcctgccctgggtgctgggcttcatctggggcgagatcaaggagatgtgggatggcggcttcacagagtacatccatgactggtggaacctgatggactttgccatgaacagcctgtacctggccaccatcagcctgaagatcgtggcctacgtgaagtacaacggcagccggccccgggaggagtgggagatgtggcaccccaccctgattgctgaggccctgtttgccatcagcaacatcctgagcagcctgcggctcatcagcctcttcaccgccaacagccacctgggccccctgcagatcagcctgggccgcatgctgctggacatcctgaagttcctgttcatctactgcctggtgctgctggcctttgccaacggcctgaaccagctgtacttctactatgagacccgggccattgatgagcccaacaactgcaagggcatccgctgtgagaagcagaacaatgccttcagcaccctgtttgagaccctgcagagcctcttctggagcgtgtttggcctgctgaacctgtatgtgaccaacgtgaaggcccggcatgagttcacagaatttgtgggcgccaccatgtttggcacctacaacgtcatcagcctggtggtgctgctgaacatgctgattgccatgatgaacaacagctaccagctgattgctgaccatgctgacatcgagtggaagtttgcccggaccaagctgtggatgagctactttgatgagggcggcaccctgcccccacccttcaacatcatccccagccccaagagcttcctgtacctgggcaactggttcaacaacaccttctgccccaagagggaccctgatggaagaagaagaagaagaaacctgcggagcttcacagaaagaaatgctgacagcctcatccagaaccagcactaccaggaggtgatccggaacctggtgaagcgctacgtggccgccatgatccggaacagcaagacccatgagggcctgacagaggagaacttcaaggagctgaagcaggacatcagcagcttccgctatgaggtgctggacctgctgggcaacaggaagcaccccaggagcttcagcaccagcagcacagagctgagccagagagatgacaacaatgatggcagcggcggggcccgggccaagagcaagtctgtgtccttcaacctgggctgcaagaagaagacctgccacggccccccactcatccgcaccatgcccaggagcagcggggcccagggcaagagcaaggccgagagcagcagcaagaggagcttcatgggccccagcctgaagaagctgggcctgctcttcagcaagttcaacggccacatgtctgagcccagcagcgagcccatgtacaccatcagtgatggcatcgtgcagcagcactgcatgtggcaggacatccgctacagccagatggagaagggcaaggccgaggcctgcagccagagcgagatcaacctgtctgaggtggagctgggggaggtgcagggcgccgcccagagcagtgaatgtcccctggcctgcagcagcagcctgcactgtgccagcagcatctgcagcagcaacagcaagctgctggacagcagtgaagatgtgtttgagacctggggcgaggcctgtgacctgctgatgcacaagtggggagatggccaggaggagcaggtgaccacccggctgtag

SEQ ID NO: 174759 - DNA, 2922 bp, Artificial Sequence
  derived and/or modified sequence
atggcccagctgtactacaagaaggtgaactacagcccctaccgggaccggattcccctgcagatcgtgcgggccgaaaccgagttgtcggcagaagaaaaagcatttcttaatgccgtggagaagggggattatgccaccgtgaaacaggctctgcaagaggcagagatttactataacgtgaacataaactgtatggaccctttgggcaggagtgcgcttttaatcgcaatcgagaatgaaaaccttgagatcatggaattattgctcaaccattctgtgtacgtgggcgatgcgctactgtatgcaatcaggaaggaggtggtgggagcagttgagctgctgctgagctatcgtcgtccttctggcgagaaacaggttcccaccctcatgatggatacccagtttagcgagttcactcctgacatcaccccgattatgcttgcggctcatacaaataactacgagattataaaactgctagtccagaagagggtgactattccacgcccccatcagattaggtgcaactgtgtcgaatgcgtttcgtcttcagaggttgattcactcagacactcaaggtcaaggctgaacatttacaaagccctggccagccccagtctcatagccctgtctagcgaggaccctattttgaccgcttttagactggggtgggaacttaaggaactgtctaaagtggagaacgagtttaaagccgagtatgaagaactgagtcaacagtgcaaactgtttgccaaagacctcctggatcaggcccgcagcagtagagagcttgagatcattctgaaccaccgggacgatcacagcgaggaactggacccgcagaaatatcacgatttagctaaactcaaggtggcgatcaagtatcatcagaaggaatttgtcgcccaacccaactgccaacagcttttggcaactttgtggtatgacgggtttcctggctggaggaggaaacattgggtggtcaagctgctcacttgcatgacaatcggcttccttttcccaatgctgtccatcgcgtatctgatctccccccgatctaatctggggctcttcatcaagaagccattcattaagttcatctgtcacaccgctagttacttgaccttcctatttatgctgctgctggcctcacagcatatcgttcgcaccgacttacatgtccaggggccaccccccacagtggtggaatggatgattctgccctgggtgctggggtttatctggggggagattaaagagatgtgggacggggggtttaccgagtatatccatgattggtggaacctaatggacttcgccatgaacagtctctacctcgccactatttccctcaagattgtggcatacgtcaaatacaacgggagccgccccagggaagaatgggagatgtggcaccccaccctgatagcagaagccctctttgcgattagcaatattctttcttcgctacgcctgatcagtctgtttactgctaattcgcacctaggccctcttcagatcagcctcgggcgaatgctcctcgacattcttaaattcttattcatctactgtctggtgttgctggcctttgccaacgggttgaatcaactgtatttttactacgagacaagagccatcgacgaaccaaacaactgcaaaggaattagatgcgagaaacagaataacgcgttcagtaccttatttgaaaccctgcaaagcctgttctggtctgtgtttggcttactaaatctgtacgtaaccaatgtgaaggcgcggcacgagttcaccgagtttgtgggcgcaacaatgtttgggacctacaatgttatttctcttgtcgttcttctgaacatgcttatcgccatgatgaacaattcctatcagctgatcgcagaccatgcagacatagaatggaaattcgcgcgtaccaagctctggatgagttactttgatgagggcgggactctgccacctccatttaacatcatcccctctcctaagtcattcttatacctaggaaattggtttaacaacacattttgccctaagcgggacccagacggtagaaggaggagaaggaacttgcgatccttcaccgaacggaatgcagattcactgatccaaaaccagcactatcaagaggttattagaaacttggtaaagcgttatgtcgctgctatgattagaaacagcaagacacatgagggcttgaccgaagagaatttcaaggagctgaagcaggatatttcttcctttcgatacgaagtccttgacctgctcggtaatcggaagcacccaagatcgttctctacttctagcacagagctcagccagagagatgacaacaatgacggttccgggggcgcgagagcgaaaagcaaatctgtgagctttaacctgggttgtaagaagaaaacttgtcacggacctcccttaataaggacaatgcctcggagttccggtgcccaaggaaaatccaaggctgagagctcatccaaacggtcattcatgggcccctccctaaaaaagctggggctgttattctcgaagttcaatggacacatgagcgaaccgtcatcagagccaatgtacactattagcgacggaattgttcaacagcactgcatgtggcaagatatccggtactctcagatggaaaaagggaaggccgaagcgtgcagtcagtccgagatcaatctctcagaggtagagcttggagaagttcagggtgccgcccaatcctcagagtgcccactggcttgttcttctagcctccactgcgcgagctcgatctgtagcagtaatagtaaactgctggatagcagcgaagatgtattcgagacttggggcgaagcctgtgacctgcttatgcacaaatggggcgacggtcaggaagaacaggtgaccacccgcttgtag

SEQ ID NO: 174760 - DNA, 2922 bp, Artificial Sequence
  derived and/or modified sequence
atggcacaactgtattataaaaaggttaattattcgccctacagagacaggatccccctgcaaatcgtcagggctgagacggagctctcagctgaggagaaagcctttctaaatgcagtcgagaaaggcgactacgctaccgtcaagcaagccttgcaggaggcagagatttactacaatgttaatatcaactgcatggatcccctgggccgatctgcactgctgattgccatagagaacgaaaaccttgagattatggaacttctgctgaaccactctgtctacgtgggggatgctcttctgtatgctatccgcaaagaggttgtgggggctgtggaactactcctgtcctatcggaggccaagcggagaaaagcaggtaccaaccctcatgatggacactcagttctccgaatttacaccggacataacccctatcatgttagccgcacatacaaacaattatgagattatcaaactactagttcagaagagggtaaccataccaaggccccaccagattagatgcaactgtgtggaatgcgtgagcagcagcgaagttgacagtctccgccattctagaagcaggctgaacatctacaaggcgctggcctccccctcactaatcgcactgtcctccgaggaccctatcttaactgcctttcgactggggtgggaactgaaggaactgtccaaggtcgagaacgagttcaaagccgaatatgaagagctgagccagcagtgcaaactattcgccaaagatctcctcgaccaggcccgttcgtcccgggagctcgagattatcttaaaccaccgagatgatcacagtgaggaattggacccgcagaaataccacgaccttgcaaagctaaaagttgccattaagtaccaccagaaggaatttgtggcccagccgaattgtcagcagctgctggccaccctgtggtatgatggcttccccggttggaggcggaagcactgggtggttaagttactgacatgtatgactatagggtttctctttcccatgctgtctattgcctatctcatttcccctcgctcaaacctggggctgttcatcaagaaaccatttattaagtttatttgtcacactgcctcgtatctgacatttttgtttatgcttctgcttgcgagtcagcacattgtgagaactgatttgcacgtccaggggcctccccctaccgtggtggagtggatgattctgccatgggtacttggctttatctggggggagattaaagaaatgtgggatggcggttttaccgagtatatccatgattggtggaatctaatggattttgccatgaacagcctgtatctggctaccatctctctaaagatagtcgcctatgttaagtacaatgggtcacgaccgcgtgaagagtgggaaatgtggcacccaactttaatcgccgaagccctcttcgctatttccaatatcttgtcctccctgagactgataagcctcttcaccgccaacagccacttaggacctctgcagatttcactcggaaggatgcttcttgatatcctcaaattcctgtttatatactgcttagtcctgctcgccttcgctaatggtctgaatcagctctatttttactatgaaacacgggctattgacgaaccaaataattgcaaaggcattcggtgtgagaaacagaacaatgctttttccacgctgttcgaaacactgcaaagcctgttttggagtgtgtttggattgctgaacttatacgtcaccaatgtaaaggcacggcacgaattcacagagttcgtcggtgcaaccatgtttggtacatataatgtgatctccttggtcgtgctcctcaatatgctcattgcgatgatgaataacagctaccagcttattgcggatcacgccgacatagaatggaaattcgcacgcactaaactctggatgtcctacttcgacgagggcggaaccctgccacctcctttcaatatcattccttcccccaagagctttctatacctgggcaattggttcaacaataccttttgcccaaagagggatccggacggcagacgtcgaaggagaaacctgagaagcttcaccgagagaaatgctgattcattgattcagaatcaacattaccaggaagtgatacgcaatttggtaaaaaggtatgttgctgctatgattagaaactccaaaactcatgaggggttgaccgaagagaactttaaggaactgaaacaggatattagctctttcaggtacgaagtgctggatcttctggggaatcggaagcatccccgatcgttttctacctcttctaccgagttgtcacaaagagatgataataatgatggatccgggggagcccgagcaaagagcaagtcggtgtccttcaaccttggatgtaagaagaaaacctgtcacgggccaccccttatccggacaatgcccaggtctagtggggcacaagggaagagcaaggccgaaagcagctcaaaacgctcctttatgggcccatctcttaaaaaactgggactcctcttcagcaagttcaacggccacatgtctgaaccaagctccgaacccatgtataccatttctgacggtatagtacaacagcactgtatgtggcaagatattaggtactcgcagatggaaaagggcaaggccgaagcttgcagccagtcagagattaacctgtccgaagtagaactgggggaggtccaaggagctgcccagtctagcgagtgccctttggcttgttcatcatctctgcactgtgccagctccatctgctcctccaacagcaagctgctcgactctagcgaagacgtcttcgagacatggggcgaggcctgcgacttgttgatgcacaagtggggagacggtcaggaagaacaagttactaccagactatag

SEQ ID NO: 174761 - DNA, 5839 bp, Artificial Sequence
  derived and/or modified sequence
accccacatcacaaccacgacgggttgtccgcagctcgcagccaccccaaagggaggaataaagaacaggagcagagggaagccgggcgcagaaagaagggaaaaggaagagctcagggttggacatttttggagacaggggtggggaggataaagggagcgtgcctccttgattttcccctccccacccctctttgcttttctctccccttctctgtatagcatattccagaaacggcagcagaaggggacagaaacctctagtgtagaaaagggttttggaggggtagccagcgctcccgccagccgctacctaacagctggagcttgagtgtgcgtgtaagagtgtgaatgcggctctctctctttttttctctctctctcccctctctctccatcccttccttcctccctccttctccctctccttcacactacagtgtcagctacccctgtcagtttccccgtgtcagtttcttccctagctcttattgtgtgtgactggctgcgtgaagggagtgggtgcgcttgaaggggctcaggttgggttagagagctgggagaacagggtagggacattggtagagcaaagagtttcagggcactggcgaaggtgaaaggtgaggagggccgatctgttacaggcaagtttggcaataactgagcatccaaaggggaagccaaggtaggagccagtacttgcgctcgtctttacaccccgcccctttccctgtgctcatccgcccacccacccatcagcctagaggccccgggctgtcccagtcggctgctgtttcgcgccgcaaaagaggagtccggcaaggcgccgcaccacgcatcctggccggtggacatccagacgacacagattttatccgaaaaaaccacttggctcaggatttctgcattgctatgaaccatggcccaactgtactacaaaaaggtcaactactcaccgtacagagaccgcatccccctgcaaattgtgagggctgagacagagctctctgcagaggagaaggccttcctcaatgctgtggagaagggggactatgccactgtgaagcaggcccttcaggaggctgagatctactataatgttaacatcaactgcatggaccccttgggccggagtgccctgctcattgccattgagaacgagaacctggagatcatggagctactgctgaaccacagcgtgtatgtgggtgatgcattgctctatgccatacgcaaggaagtggtgggcgctgtggagcttctgctcagctacaggcggcccagcggagagaagcaggtccccactctgatgatggacacgcagttctctgaattcacaccggacatcactcccatcatgctggctgcccacaccaacaactacgaaatcatcaaattgcttgtccaaaaacgggtcactatcccacggccccaccagatccgctgcaactgtgtggagtgtgtgtctagttcagaggtagacagcctgcgccactctcgctcccgactgaacatctataaggctctggcaagcccctcactcattgccttatcaagtgaggaccccatcctaactgccttccgtctgggctgggagctcaaggagctcagcaaggtggagaatgagttcaaggccgagtatgaggagctctctcagcagtgcaagctctttgccaaagacctgctggaccaagctcggagctccagggaactggagatcatcctcaaccatcgagatgaccacagtgaagagcttgaccctcagaagtaccatgacctggccaagttgaaggtggcaatcaaataccaccagaaagagtttgttgctcagcccaactgccaacagttgcttgccaccctgtggtatgatggcttccctggatggcggcggaaacactgggtagtcaagcttctaacctgcatgaccattgggttcctgtttcccatgctgtctatagcctacctgatctcacccaggagcaaccttgggctgttcatcaagaaaccctttatcaagtttatctgccacacagcatcctatttgaccttcctctttatgcttctcctggcttctcagcacattgtcaggacagaccttcatgtacaggggcctcccccaactgtcgtggaatggatgatattgccttgggttctaggtttcatttggggtgagattaaggaaatgtgggatggtggatttactgaatacatccatgactggtggaacctgatggattttgcaatgaactccctctacctggcaactatttccctgaagattgtggcctatgtcaagtataatggttctcgtccaagggaggaatgggaaatgtggcacccgactctgattgcggaagcactcttcgcaatatccaacattttaagttcgttgcgtctcatatccctgttcacagccaactcccacttaggacctctgcagatctctttgggacgcatgctgcttgatatcctcaaattcctctttatctactgcctggtactactagcttttgccaatggactgaaccagctttacttctattatgaaaccagagctatcgatgagcctaacaactgcaaggggatccgatgtgagaaacagaacaatgccttctccacgctctttgagactcttcagtcactcttctggtctgtatttggccttttaaatctatatgtcaccaatgtgaaagccagacacgaattcaccgagtttgtaggagctaccatgtttggaacatacaatgtcatctccctggtagtgctgctgaacatgctgattgctatgatgaacaactcctatcagcttattgccgatcatgctgatatcgagtggaagtttgcaaggacgaagctctggatgagttactttgatgaaggtggcaccttgccacctcctttcaacatcatccccagccccaagtcatttctataccttggtaactggttcaacaacaccttctgccccaaaagagaccctgacggtagacggagaaggcgcaacttgagaagtttcacagaacgcaatgctgacagcctgatacaaaatcaacattatcaggaagttatcaggaatttagtcaaaagatatgtggctgctatgataagaaattccaaaacacatgagggacttacagaagaaaattttaaggaattaaagcaagacatctccagctttcggtatgaagtgcttgacctcttgggaaatagaaaacatccaaggagcttttccactagcagcactgaactgtctcagagagacgataataatgatggcagtggtggggctcgggccaaatccaagagtgtctcttttaatttaggctgcaagaaaaagacttgccatgggccacctctcatcagaaccatgccaaggtccagtggtgcccaaggaaagtcaaaagctgagtcatcaagcaaacgctccttcatgggtccttctctcaagaaactgggtctcctattctccaaatttaatggtcatatgtctgaacccagttcagagccaatgtacacaatttctgatggaattgttcagcagcactgtatgtggcaggacatcagatattctcagatggagaaagggaaagcagaggcctgttctcaaagtgaaattaacctcagtgaggtagaattaggtgaagtccagggcgctgctcagagcagtgaatgccctctagcctgttccagctctcttcactgtgcatccagcatctgctcctcaaattctaaacttttagactcctcagaggatgtatttgaaacttggggagaggcttgtgacttgctcatgcacaaatggggtgatggacaggaagaacaagttacaactcgcctctaagtcaagccctaatcatctgttctggaactcaacagaaatctgtaatttccttgctctcagaggtgacacagaatatgattccctcactgcccctgccccccagaaaggagagtgaaactcttatttgcaccatcttttatagccacattctccatttttgttcttgttttattattactttcattattatttgcctttttaatacctatacacactaagtccatcttacaaccgactgaaggggtgttgcacctaatcatcagaggtgcagttgggtgcttaacctttttgctttgcttttctcacccatgcttccttgaagccccaggtgccactttgctggtcttgttgccgcacagattcctgaccatcctcagaatctcatgccattttcccgcagagctgagggatgtggtcagcagtccccaccagctatcagataaggcaaactaccctgcccatctttgttgccattcagtgctacgcgctgcccatgctgggtcaatgaacagcatcaaagggaggctgaagagatttcaaagaattgtcagcttgtggtttctgggtataagtggcttgtttcgttcttaaatactacaacttcttattgtgggggctattgagttttcttgtttcttaaagatgtgttagtttcctaatgtgtgccaatgaaatatttaccccatagtatatgtcatatctaataagttaggcgaattatttttctgtttgtgtgtttcagttaacttactacatttgaaaatttgatagtatcaaaattagtatttagaatttgtgctattttttaaaaacatctactacactctaaccaatagtcactacatctcatacattggcaagataaatagttgtcatatttgttgggtcctattctactgttgatagttttaattatcattgctatcaaataatttctaagataaaagcctgaatttgaaatatttttatcagaaaaatggcatattgctgaagtgtcaaaatatgagaaaagagcatcttcattttaattaactgctttataaaaatggcaactttaggtatagataacctaattcaggttgcagttttaatattcattgggggcagtggaattgcatgtgtaaattatgttagatatatatcataacaaccctagtggattcatggaattataaacgtgatccaaattctactgtcttccaagaaagctacatttatacatccaaacaaattcttttccacagcttaagagtacctcatcagaatacagtggttcaagttaaaaaataaagtccataatgcatatggtcatcattctagacctgataaccactgagaacctgctgagcaaggacggcttttaccaacattagcacaaaggtttcctcagtttagactctaacatatgacctgaaacaactctaggtctgagtcctagagattacataaatagtgtgtagcccagaaaagtaaaataggtgtcacgctgttttttttaatgtcaacaccaataggaatccatttagattaatgtatgtaatttctgataaaagtaagagaaatgaggaactttcgaactgcaaatatgcctccaaactagcttttgataagtgtggtttctgttatttgaatggattcccatctttgtctctagcctggagaagagcaaaatggagggggaggggccagaaataggaggaggttttgaagaataaagcctcatatccaggaaaaagtgatcaagtgaaaaagctgcatcaagacccatttggcaagaggttgtccgaaaataattccttgatcatatctgaagtggttatttactcaaatcaatttctcccctgcttcgctaagactgtcataaaatggccttgacatttaatcacaggttactttccagaaaggtttctaaagttacagattcagcttttcaaattgtcaaattcactttgaataataatagaacctgggctacattcctaactcatattaacagca

SEQ ID NO: 174762 - protein, 466 aa, Artificial Sequence
  derived and/or modified sequence
MGWITEDLIRRNAEHNDCVIFSLEELSLHQQEIERLEHIDKWCRDLKILYLQNNLIGKIENVSKLKKLEYLNLALNNIEKIENLEGCEELAKLDLTVNFIGELSSIKNLQHNIHLKELFLMGNPCASFDHYREFVVATLPQLKWLDGKEIEPSERIKALQDYSVIEPQIREQEKDHCLKRAKLKEEAQRKHQEEDKNEDKRSNAGFDGRWYTDINATLSSLESKDHLQAPDTEEHNTKKLDNSEDDLEFWNKPCLFTPESRLETLRHMEKQRKKQEKLSEKKKKVKPPRTLITEDGKALNVNEPKIDFSLKDNEKQIILDLAVYRYMDTSLIDVDVQPTYVRVMIKGKPFQLVLPAEVKPDSSSAKRSQTTGHLVICMPKVGEVITGGQRAFKSMKTTSDRSREQTNTRSKHMEKLEVDPSKHSFPDVTNIVQEKKHTPRRRPEPKIIPSEEDPTFEDNPEVPPLI

SEQ ID NO: 174763 - protein, 414 aa, Artificial Sequence
  derived and/or modified sequence
MGTVTEDLIRRNAEHNDCVIFSLEELSLHQQEIERLEHIDKWCRDLKILYLQNNLIGKIENVSKLKKLEYLNLALNNIEKIENLEGCEELAKLDLTVNFIGELSSIKNLQHNIHLKELFLMGNPCASFDHYREFVVATLPQLKWLDGKEIEPSERIKALQDYSVIEPQIREQEKDHCLKRAKLKEEAQRKHQEEDKNEDKRSNAGFDGRWYTDINATLSSLESKDHLQAPDTEEHNTKKLDNSEDDLEFWNKPCLFTPESRLETLRHMEKQRKKQEKLSEKKKKVKPPRTLITEDGKALNVNEPKIDFSLKDNEKQIILDLAVYRYMDTSLIDVDVQPTYVRVMIKGKPFQLVLPAEVKPDSSSAKRSQTTGHLVICMPKVGEVITGGQRAFKSMKTTSDRSREQTNTSYSTGF

SEQ ID NO: 174764 - DNA, 1245 bp, Artificial Sequence
  derived and/or modified sequence
atgggcaccgtgaccgaggacctgatcagaagaaacgccgagcacaacgactgcgtgatcttcagcctggaggagctgagcctgcaccagcaggagatcgagagactggagcacatcgacaagtggtgcagagacctgaagatcctgtacctgcagaacaacctgatcggcaagatcgagaacgtgagcaagctgaagaagctggagtacctgaacctggccctgaacaacatcgagaagatcgagaacctggagggctgcgaggagctggccaagctggacctgaccgtgaacttcatcggcgagctgagcagcatcaagaacctgcagcacaacatccacctgaaggagctgttcctgatgggcaacccctgcgccagcttcgaccactacagagagttcgtggtggccaccctgccccagctgaagtggctggacggcaaggagatcgagcccagcgagagaatcaaggccctgcaggactacagcgtgatcgagccccagatcagagagcaggagaaggaccactgcctgaagagagccaagctgaaggaggaggcccagagaaagcaccaggaggaggacaagaacgaggacaagagaagcaacgccggcttcgacggcagatggtacaccgacatcaacgccaccctgagcagcctggagagcaaggaccacctgcaggcccccgacaccgaggagcacaacaccaagaagctggacaacagcgaggacgacctggagttctggaacaagccctgcctgttcacccccgagagcagactggagaccctgagacacatggagaagcagagaaagaagcaggagaagctgagcgagaagaagaagaaggtgaagccccccagaaccctgatcaccgaggacggcaaggccctgaacgtgaacgagcccaagatcgacttcagcctgaaggacaacgagaagcagatcatcctggacctggccgtgtacagatacatggacaccagcctgatcgacgtggacgtgcagcccacctacgtgagagtgatgatcaagggcaagcccttccagctggtgctgcccgccgaggtgaagcccgacagcagcagcgccaagagaagccagaccaccggccacctggtgatctgcatgcccaaggtgggcgaggtgatcaccggcggccagagagccttcaagagcatgaagaccaccagcgacagaagcagagagcagaccaacaccagctacagcaccggcttctag

SEQ ID NO: 174765 - DNA, 1401 bp, Artificial Sequence
  derived and/or modified sequence
atgggatggataacagaggatcttatacgcagaaacgctgagcataacgattgcgtgatcttctctctggaggagctttcactgcatcagcaggagattgagagactcgagcacatagataaatggtgcagagacttgaagattctgtatctccagaacaacctgataggcaagatcgaaaacgttagcaaacttaagaagttagagtatctgaatctcgccctgaataacattgaaaaaatcgagaatctggaagggtgcgaggaactggctaaattagaccttaccgtcaatttcatcggcgagttaagcagtatcaagaacctgcagcacaatatccatctgaaggagctcttcctcatggggaacccatgcgcctctttcgaccattacagggaatttgtagtcgccaccctcccacaactcaagtggctcgatggcaaagaaatcgaaccatccgagcgaattaaggctctgcaagactattccgtgatagagccgcagattagggagcaggagaaggaccactgtctgaaaagagccaaactcaaggaagaagcccagcgcaaacatcaagaggaggacaaaaatgaggataaaaggtcaaatgctggatttgacggacgatggtatacagatataaacgcgaccttgtctagtctggagagcaaggaccatcttcaggcccctgatacagaggaacacaatactaagaagctggacaactcggaggatgacctggagttctggaacaagccatgcctgtttaccccagaatcacgactggaaaccttaaggcacatggaaaagcagagaaagaaacaggaaaaactgtcagagaagaagaagaaagtgaagccaccccgaactttaataactgaggatggcaaagctttgaatgtcaacgagcctaaaattgatttttctctgaaggataatgaaaagcaaataatcctggacctcgcagtgtaccgctacatggacacatccctcatcgatgttgatgtccagccaacttacgtgcgggtgatgattaaagggaagcccttccagttagttctgcccgccgaggtcaagccagactctagttccgcaaaaagaagccagacaacaggccacctggtgatctgcatgccaaaggtgggagaggtcattacaggtggccagcgtgcattcaaatcaatgaagacaactagtgaccgctcacgagaacaaacaaacacccgaagcaaacatatggaaaaactcgaagtagacccatctaagcatagctttcccgatgtcactaacatagtgcaggaaaaaaagcacaccccaagaagacgtcccgagccaaagatcataccgtcggaggaggacccaactttcgaagacaatccggaagtccctcctctgatttag

SEQ ID NO: 174766 - DNA, 1245 bp, Artificial Sequence
  derived and/or modified sequence
atgggaactgtaaccgaagacttgatccgcaggaacgccgagcacaacgactgtgtcatctttagtttggaggagctcagccttcaccagcaagagatcgaaaggctggagcacattgacaaatggtgcagagatctcaaaattctgtatctgcagaacaacctcatcggaaagattgagaatgtgtccaagcttaaaaaactggagtatctcaatctcgccttaaataatatcgaaaaaatcgagaatctcgagggttgtgaggaactggctaaactggacttgacggtgaatttcataggtgaactgagcagcattaaaaacctccagcacaatattcacttgaaagaattatttctgatgggaaatccttgcgcgtcattcgatcactatagggagttcgtagtggcaactctgcctcaactcaaatggcttgacgggaaagaaatcgaaccatctgagagaatcaaggcgcttcaggactacagcgtgatcgagcctcagattagggagcaggaaaaagatcattgcctcaaacgggcgaaattaaaggaagaggcccagaggaagcatcaggaggaggacaaaaacgaagacaagagaagtaacgcgggcttcgacggccggtggtatacggatattaacgccactctctcttcattggagagcaaagatcatctacaggctcccgatacagaggaacataatactaagaaacttgacaacagcgaggacgacctggagttctggaataagccctgcctgtttactcctgagagccggttagaaaccctgcggcacatggaaaagcagagaaagaagcaggaaaagctaagcgaaaaaaaaaaaaaagttaaacctccccgtacgctgattacggaggatggcaaggccttaaacgtgaatgaacctaagatcgatttttccctaaaggataacgagaagcagatcattctggacctcgctgtctatcgatatatggatacatccctcattgatgtggacgtgcagccaacctacgtccgggtcatgattaagggtaagccttttcagttggttcttcctgcagaggtgaagcccgattcaagcagcgcgaagcgcagccagactactggacatctggttatttgcatgccgaaagtgggcgaggtgattactggcggtcagcgcgcctttaaatctatgaagaccacatctgaccgctcacgtgagcagactaatacctcttattctaccggattttag

SEQ ID NO: 174767 - DNA, 1401 bp, Artificial Sequence
  derived and/or modified sequence
atgggttggatcactgaggacctgatccggagaaatgcagaacataatgactgcgtcattttttcacttgaagagctgagcctccaccagcaggagatagaacgtctggagcatattgacaaatggtgtcgggaccttaaaattctttaccttcagaacaatctaatcgggaaaattgaaaacgtgtctaagcttaagaagctagaatacctcaaccttgcactcaataatatcgagaaaatcgagaatctggaaggctgtgaagagctcgccaaactcgatttaaccgtgaacttcataggggagctctcatcgatcaagaatcttcagcataatattcacctaaaggagctgttcctgatggggaatccatgtgcctccttcgatcattacagggaattcgttgttgcaactctgccccaactgaaatggctggatggtaaagaaatcgaaccatcagagcggatcaaggctctgcaggattattccgtgattgaacctcagatccgcgagcaagagaaggaccactgcctgaagcgggctaagctcaaggaggaagcacagaggaagcaccaggaggaagacaaaaacgaggacaaacgatcgaacgctggatttgacggacggtggtacacagacatcaatgccacgctaagctccctggaatctaaggatcacctccaagctccggacactgaggagcacaataccaagaaactggataacagtgaagatgacctcgagttttggaataaaccttgcctcttcacaccggaatcccgcttagaaacgctacggcatatggaaaagcaaaggaagaagcaggagaaactgagtgaaaaaaagaagaaggtcaaaccaccccggacactgattaccgaagacgggaaagccttaaacgtgaacgaaccgaaaatcgattttagtcttaaagataacgagaagcagatcatcttggatctggctgtttacaggtatatggatacctctcttatcgacgttgacgtgcaacctacttacgtccgagtgatgatcaagggtaaaccctttcaactggtactgccagccgaggttaaacccgatagctctagcgcaaagcgttcgcaaactacagggcacctggtcatttgtatgccgaaggtgggagaggtaatcaccggcggtcagagggcgttcaaaagcatgaaaacgacaagtgatcggagccgtgaacagaccaatacacgaagtaagcacatggaaaagctagaggtggacccctccaagcattcctttcctgatgtgacaaacatagtgcaggagaagaagcacacccctaggcgcagacctgaaccgaagatcattcccagtgaggaggatcctacattcgaggacaatccggaggtcccacccctgatctag

SEQ ID NO: 174768 - DNA, 1401 bp, Artificial Sequence
  derived and/or modified sequence
atgggctggatcacagaggacctgatcagaagaaatgctgagcacaatgactgtgtgatcttcagcctggaggagctgagcctgcaccagcaggagattgagcggctggagcacatcgacaagtggtgccgggacctgaagatcctgtacctgcagaacaacctgattggcaagattgaaaatgtgtccaagctgaagaagctggagtacctgaacctggccctgaacaacatcgagaagattgagaacctggagggctgtgaggagctggccaagctggacctgactgtgaacttcatcggggagctgagcagcatcaagaacctgcagcacaacatccacctgaaggagctgttcctgatgggcaacccctgtgccagctttgaccactaccgggagtttgtggtggccaccctgccccagctgaagtggctggatggcaaggagattgagcccagcgagcgcatcaaggccctgcaggactacagcgtgattgagccccagatccgggagcaggagaaggaccactgcctgaagagggccaagctgaaggaggaggcccagaggaagcaccaggaggaggacaagaatgaagacaagaggagcaatgccggctttgatggccgctggtacacagacatcaatgccaccctgagcagcctggagagcaaggaccacctgcaggccccagacacagaggagcacaacaccaagaagctggacaacagtgaagatgacctggagttctggaacaagccctgcctcttcaccccagagagccggctggagaccctgcggcacatggagaagcagaggaagaagcaggagaagctgtctgagaagaagaagaaggtgaagccacccaggaccctcatcacagaagatggcaaggccctgaatgtgaatgagcccaagattgacttcagcctgaaggacaatgagaagcagatcatcctggacctggccgtgtaccgctacatggacaccagcctgattgatgtggatgtgcagcccacctacgtgcgggtgatgatcaagggcaagcccttccagctggtgctgcctgctgaggtgaagccagacagcagcagcgccaagaggagccagaccaccggccacctggtgatctgcatgcccaaggtgggggaggtgatcaccggcggccagagggccttcaagtccatgaagaccaccagtgacaggagccgggagcagaccaacaccaggagcaagcacatggagaagctggaggtggaccccagcaagcacagcttcccagatgtgaccaacatcgtgcaggagaagaagcacacccccaggagaagacctgagcccaagatcatccccagcgaggaggaccccacctttgaggacaaccctgaggtgcccccactcatctag

SEQ ID NO: 174769 - DNA, 1245 bp, Artificial Sequence
  derived and/or modified sequence
atgggcaccgtgacagaggacctgatcagaagaaatgctgagcacaatgactgtgtgatcttcagcctggaggagctgagcctgcaccagcaggagattgagcggctggagcacatcgacaagtggtgccgggacctgaagatcctgtacctgcagaacaacctgattggcaagattgaaaatgtgtccaagctgaagaagctggagtacctgaacctggccctgaacaacatcgagaagattgagaacctggagggctgtgaggagctggccaagctggacctgactgtgaacttcatcggggagctgagcagcatcaagaacctgcagcacaacatccacctgaaggagctgttcctgatgggcaacccctgtgccagctttgaccactaccgggagtttgtggtggccaccctgccccagctgaagtggctggatggcaaggagattgagcccagcgagcgcatcaaggccctgcaggactacagcgtgattgagccccagatccgggagcaggagaaggaccactgcctgaagagggccaagctgaaggaggaggcccagaggaagcaccaggaggaggacaagaatgaagacaagaggagcaatgccggctttgatggccgctggtacacagacatcaatgccaccctgagcagcctggagagcaaggaccacctgcaggccccagacacagaggagcacaacaccaagaagctggacaacagtgaagatgacctggagttctggaacaagccctgcctcttcaccccagagagccggctggagaccctgcggcacatggagaagcagaggaagaagcaggagaagctgtctgagaagaagaagaaggtgaagccacccaggaccctcatcacagaagatggcaaggccctgaatgtgaatgagcccaagattgacttcagcctgaaggacaatgagaagcagatcatcctggacctggccgtgtaccgctacatggacaccagcctgattgatgtggatgtgcagcccacctacgtgcgggtgatgatcaagggcaagcccttccagctggtgctgcctgctgaggtgaagccagacagcagcagcgccaagaggagccagaccaccggccacctggtgatctgcatgcccaaggtgggggaggtgatcaccggcggccagagggccttcaagtccatgaagaccaccagtgacaggagccgggagcagaccaacaccagctacagcacaggcttctag

SEQ ID NO: 174770 - DNA, 1401 bp, Artificial Sequence
  derived and/or modified sequence
atgggctggatcaccgaggacctgatccggcggaacgccgagcacaacgactgcgtcatcttcagcctggaggagttgagcctacaccagcaagagatcgagcgcctggaacacattgacaaatggtgtagggatctcaagatactgtatctgcagaacaacctgatcggtaaaatagaaaacgtcagtaagttgaagaagttggagtaccttaacttggccctgaacaacatcgagaaaattgagaatctggagggatgtgaagagctcgcaaaattggacctcacagtgaatttcatcggcgagttatcctccatcaagaatcttcagcataacattcacctgaaagaattgttcctgatgggtaatccttgcgcatcatttgaccattatcgggaattcgtcgttgctaccctgccacaattaaagtggttggatggcaaagaaatcgaaccaagtgagaggattaaggcactgcaagattattccgttatcgagccgcagatacgtgagcaagaaaaggatcattgcctcaagcgtgcaaagctcaaagaagaagcccagcgtaagcatcaagaagaggacaagaatgaagacaagaggagtaacgccgggttcgacggcaggtggtacactgatataaacgccacactgagttctctggaatcaaaagatcacctgcaggcgcctgacacagaagagcataatacaaaaaaactggacaactcagaagatgatctggagttctggaacaagccgtgcctgttcacacccgaatcaaggcttgagaccctgcgccacatggaaaagcaacgaaagaagcaggagaagctatctgagaaaaaaaagaaggtcaagccccctagaacactcataactgaggatggtaaggccttaaacgtgaacgagcccaagattgattttagccttaaagataacgaaaagcaaataattctggatctagcggtgtatcggtacatggacacttcccttatcgacgttgatgtgcagcctacatacgttcgagttatgattaaggggaaacccttccagctggtattgcccgctgaagtcaaaccagatagtagctcagctaagaggtcgcagacaaccggacacttggttatttgtatgcctaaagtgggagaagtgataacgggcgggcagagggcattcaagagcatgaagaccactagtgatcgaagcagagaacagaccaatacccgttcaaaacacatggagaaactagaggtcgatccgtctaagcactccttcccagacgtgacaaatattgtgcaagagaaaaaacacacccccagaaggaggcctgagcctaaaatcattccatccgaagaggatccaacattcgaggataaccctgaggtccctcccctgatttag

SEQ ID NO: 174771 - DNA, 1615 bp, Artificial Sequence
  derived and/or modified sequence
atggggacagtcacagaagatcttattagacggaatgctgaacacaacgactgtgtcattttttccctggaggaactctcgttgcatcagcaagaaatagaaagactagaacacattgataaatggtgccgggatttaaaaattctctatcttcaaaataatcttattgggaaaattgaaaatgttagcaaactcaagaaacttgaatatttgaatttagctttaaacaacattgaaaaaatagaaaacttggaaggatgtgaagagctggcaaaacttgacctgactgtgaatttcattggagagctgagcagcattaaaaacttgcagcacaatatccatctgaaggagctctttctcatggggaacccatgtgcttcctttgaccactatagggagttcgtggtagcaactcttccacaattaaagtggttggatggtaaagaaatagagccttcagaaaggattaaggcattgcaggactattcagtaattgaaccacaaatcagagagcaggaaaaagatcactgtcttaaacgagccaaactcaaggaagaggctcagaggaaacaccaagaagaggataaaaatgaagacaagagaagtaacgcaggctttgatggacgttggtacacagacatcaatgctactctttcctctttagagagcaaagaccacctacaggcaccagacacagaggaacacaacacaaagaaattagacaacagtgaagatgacttggaattctggaataagccctgtttgtttactcctgaatcaagattggaaactcttagacacatggaaaaacaacggaagaaacaggaaaaattaagtgaaaaaaagaagaaagtgaaaccacccaggactttgatcactgaagatgggaaagccctaaatgtgaatgagcccaaaattgacttctctttgaaagataacgaaaagcagatcatcctggaccttgctgtctataggtatatggatacctctttaatcgatgttgatgtgcaaccaacttacgtgcgagtaatgatcaaaggaaagccatttcagcttgtccttcctgcagaagtgaaacccgatagtagttctgctaaaagatctcagacaacgggtcatttggtcatctgcatgcccaaggtaggagaagtaatcacaggtggtcagcgagcattcaaatctatgaaaactacctcggacaggagcagagaacaaacaaatacaagctattctactggattctagaggtgatgtttctgacagtcaggtcgtgggtaagaccagtgatgggcgtccgtcctagaggcctctgacattaaggcggggaaagcaaagaagcaagcacatggagaaactagaagtagaccctagcaagcactcattccctgatgtgactaacatagttcaagagaaaaaacacacacccagaagacgacctgaacccaaaattataccaagtgaggaagacccaacctttgaagacaaccctgaagtgcctccgctgatttgaaacatctggctgcgttgccattggctgagacccaccaggtccagttttggttggtgtagagaccatatgcatattattcctgggataaacacagagttatttgtc

SEQ ID NO: 174772 - DNA, 1245 bp, Artificial Sequence
  derived and/or modified sequence
atgggcaccgtgaccgaggacctgatccggcggaacgccgagcacaacgattgtgtcattttctcactggaagagctgagtctgcaccagcaggaaattgaacgcttggaacacatcgacaagtggtgtagagacctgaagatattgtatttgcagaataatctaataggcaaaatcgagaatgtgtctaagctgaagaaactcgagtatctgaatctggcccttaacaatattgagaaaatcgaaaacctggaagggtgcgaagagttggccaaactggacctcaccgtaaacttcatcggcgagctgtcttctattaagaacctccagcataatatacatctgaaagaacttttcctcatgggcaatccatgcgcttcattcgatcactacagggagttcgtggtggccactctgcctcagctgaaatggctcgacggtaaagagattgaaccctcggagcgaattaaagcactgcaagattattccgtcatcgaaccacagattcgcgaacaggaaaaagaccactgtctgaaacgagctaagctgaaggaggaggctcaacgcaagcaccaggaggaagacaaaaacgaggacaagcggtctaacgcagggttcgacgggaggtggtacactgatattaacgcaactctgagctccctggagagcaaagatcaccttcaggctcccgataccgaagaacacaacacgaaaaagttagataactccgaggacgacctcgaattctggaacaagccatgcctcttcactcctgagagccggctcgaaacactccgccatatggaaaaacagcgcaaaaaacaggagaagctgagtgagaaaaaaaaaaaagtaaagcctccccggaccctcatcaccgaagatggcaaggccttgaacgttaacgagccgaaaattgactttagcctgaaagataatgagaagcagataatacttgacctcgctgtatacaggtatatggatacatctcttatcgacgtcgatgtccagccaacttacgtgcgggtcatgattaagggcaaaccttttcagctagtcttgccagctgaggttaagccagacagtagcagcgctaaaaggtcccagacaacgggccatcttgtcatatgtatgcccaaggtgggagaggtgattaccggcggccagcgcgccttcaaatcgatgaaaaccacttccgatcgaagtcgtgagcagaccaacacatcctattccaccgggttttag

SEQ ID NO: 174773 - DNA, 1401 bp, Artificial Sequence
  derived and/or modified sequence
atgggctggatcaccgaggacctgatccggcggaacgccgagcacaatgactgtgttatcttttccctcgaagagctgtctctgcatcagcaggaaatagaaaggctggaacatatcgataaatggtgccgggacctgaaaattctctatttgcaaaataatttaattggtaagatcgagaatgtgtccaaactcaagaagctcgaatacctgaatctggccttaaacaacatcgaaaaaattgaaaacctggaaggctgtgaggaacttgccaaactagatctgactgtgaactttattggagaattgtcctccattaagaaccttcagcacaacatccaccttaaggaattgttccttatgggcaacccctgcgccagtttcgaccactaccgtgaatttgtggtggcgactcttcctcaattaaagtggctggatggaaaagaaattgagccctcggaacgtataaaggctcttcaggattactctgtcatcgaaccccaaatcagagagcaggagaaagaccactgcctcaaacgcgccaagctgaaagaggaagcccagagaaaacatcaggaagaagataagaatgaagataagcgaagtaatgccgggttcgacgggcgatggtataccgatatcaacgccaccttgtcttcgctcgagtcaaaagaccacctgcaagcccctgacacagaggaacacaacacaaaaaagttggataactccgaggatgacttggagttttggaacaagccatgcttattcactcccgaatcccggcttgagacactgcgccatatggagaagcagcgcaagaagcaggagaagctgagcgagaaaaagaaaaaggtgaaacctcctcgtaccctcattacagaagacggcaaggctcttaatgtgaacgagcctaagatcgacttttcactcaaagacaacgagaagcaaatcatcctggatttggcagtttatcggtatatggacaccagcctcatagacgttgacgttcagcccacgtatgtcagagtgatgataaaggggaaacctttccaactggttctgccagccgaagtgaaaccggatagcagctctgcaaaacgcagtcagaccaccggtcacctcgttatctgtatgcccaaggtgggagaagtgataaccggcgggcagagagctttcaagtcaatgaaaacgacttccgatagatcccgggagcaaactaacacccggtcaaagcatatggagaagctagaagtggacccttccaaacacagctttccagatgtgacgaatattgttcaagagaagaagcacacacctaggcgtcgccctgagcccaaaatcatcccttctgaagaagatccaacctttgaagataacccagaggtgccccccctcatctag

SEQ ID NO: 174774 - DNA, 1401 bp, Artificial Sequence
  derived and/or modified sequence
atgggatggattactgaggaccttattagaagaaacgcagagcacaacgattgcgtgattttttcattagaggaactgtccttacaccagcaggaaattgaacgccttgaacacattgacaagtggtgtagagatcttaaaatactttatctccagaacaatctaattggcaagattgagaacgtgtctaagctgaaaaagcttgagtacctcaatctggcactcaataatattgagaagattgagaatctcgagggctgtgaagagcttgccaaactcgacctgaccgtgaactttatcggtgaattgagcagtatcaagaatcttcagcataacattcacctgaaggaactgtttctgatgggtaatccttgcgcctctttcgatcactacagggaattcgtggtcgccacgctgcctcagctaaagtggctcgatggcaaggaaattgaacccagtgagcggattaaagctctccaagattactctgtgatcgaaccccagattagggagcaggagaaagatcactgcttaaagagggcaaagcttaaagaggaggcacagagaaagcatcaggaggaggataaaaatgaagacaaacgctctaacgccggtttcgatggacggtggtacaccgatatcaacgcaacgcttagcagtctggagtccaaagatcatctacaggctcctgatacagaggagcacaataccaagaagcttgacaacagcgaggatgatctcgagttttggaataagccatgtttattcacccccgagtctcgattagaaacgctgcgacatatggaaaagcagcgcaagaaacaagagaaactcagcgaaaaaaagaaaaaagtgaaacccccacgcaccctaatcactgaagatggtaaagccctgaatgtgaacgagcccaagattgatttttccctgaaagataacgaaaaacagattatcctggacttggctgtgtacagatatatggataccagcctcatcgatgtggatgtgcaaccaacttacgtccgcgtgatgattaagggcaaaccatttcagcttgttctgcccgcagaagtgaaacctgattcatcttctgccaaaaggagtcaaacaacggggcatcttgttatctgcatgcccaaggttggggaggtgatcactggaggacagcgcgcttttaagtctatgaagaccacaagtgataggagcagggaacagactaacaccaggtccaagcacatggaaaagttggaggtggatccctctaagcatagctttcctgacgtcacgaatattgttcaggagaagaaacacacaccaagacgcaggcccgaaccaaaaatcatcccatctgaggaagatcccactttcgaggataatcctgaggtgccccctctaatctag

SEQ ID NO: 174775 - DNA, 1245 bp, Artificial Sequence
  derived and/or modified sequence
atggggaccgtcaccgaggatttgatcagaaggaacgctgagcacaacgactgtgtgatatttagtttggaagagctgagtctacatcagcaggagatcgaacgcctcgagcatatcgacaaatggtgtcgggatctgaaaatcctatatctgcagaacaacctgattggaaagattgagaacgtaagtaagttgaaaaaactggagtacctgaatttggcccttaataacatagagaaaatcgaaaacctggaaggatgcgaggagctggccaagctagacctgactgtaaactttattggagagttgtcctcaatcaaaaatcttcagcacaatattcacctgaaggagctttttttgatgggaaacccctgtgcaagcttcgatcactaccgcgagttcgtggtggccactctcccgcaactgaaatggcttgacggcaaggagatcgagccctctgagcggataaaggccctccaggactacagcgtgattgaaccgcagattcgggagcaggaaaaggaccactgcctaaaaagggctaaactgaaggaagaggcccaacgcaagcaccaggaggaggacaaaaatgaagataagcgatcgaacgccggattcgacggtcgctggtatacagacatcaacgcaactctgtcatcactagagtccaaagatcacttacaggcgcctgacacagaggagcataataccaaaaagttagacaatagcgaagacgacctcgagttttggaataagccctgccttttcacccccgaatcacggttggaaaccttgcgacatatggaaaagcaaagaaaaaaacaggagaaattgagcgagaagaagaagaaagtgaaacctcccagaacacttattaccgaagatggaaaggcacttaatgtaaacgagcccaaaattgatttctcacttaaggacaatgagaaacagattattctggacttggccgtctaccggtatatggacacgtccctgatagatgttgatgttcaaccaacttacgtccgggtgatgatcaaagggaagccattccagttggtcctgcctgccgaagtcaagcccgacagcagctcagccaagcgttcgcagactacagggcacctggtgatttgtatgcccaaagtaggcgaggtgattactgggggacagagagcctttaagtccatgaagaccactagcgatcggtccagggaacagaccaacacaagctatagcaccggcttttag

SEQ ID NO: 174776 - DNA, 1580 bp, Artificial Sequence
  derived and/or modified sequence
gcaggggtgaagggtgaaaagcgtcattcgaggtccgggtccggcttgcggggtcagcgaactggagaggcgccatgggctggatcacagaagatcttattagacggaatgctgaacacaacgactgtgtcattttttccctggaggaactctcgttgcatcagcaagaaatagaaagactagaacacattgataaatggtgccgggatttaaaaattctctatcttcaaaataatcttattgggaaaattgaaaatgttagcaaactcaagaaacttgaatatttgaatttagctttaaacaacattgaaaaaatagaaaacttggaaggatgtgaagagctggcaaaacttgacctgactgtgaatttcattggagagctgagcagcattaaaaacttgcagcacaatatccatctgaaggagctctttctcatggggaacccatgtgcttcctttgaccactatagggagttcgtggtagcaactcttccacaattaaagtggttggatggtaaagaaatagagccttcagaaaggattaaggcattgcaggactattcagtaattgaaccacaaatcagagagcaggaaaaagatcactgtcttaaacgagccaaactcaaggaagaggctcagaggaaacaccaagaagaggataaaaatgaagacaagagaagtaacgcaggctttgatggacgttggtacacagacatcaatgctactctttcctctttagagagcaaagaccacctacaggcaccagacacagaggaacacaacacaaagaaattagacaacagtgaagatgacttggaattctggaataagccctgtttgtttactcctgaatcaagattggaaactcttagacacatggaaaaacaacggaagaaacaggaaaaattaagtgaaaaaaagaagaaagtgaaaccacccaggactttgatcactgaagatgggaaagccctaaatgtgaatgagcccaaaattgacttctctttgaaagataacgaaaagcagatcatcctggaccttgctgtctataggtatatggatacctctttaatcgatgttgatgtgcaaccaacttacgtgcgagtaatgatcaaaggaaagccatttcagcttgtccttcctgcagaagtgaaacccgatagtagttctgctaaaagatctcagacaacgggtcatttggtcatctgcatgcccaaggtaggagaagtaatcacaggtggtcagcgagcattcaaatctatgaaaactacctcggacaggagcagagaacaaacaaatacaagaagcaagcacatggagaaactagaagtagaccctagcaagcactcattccctgatgtgactaacatagttcaagagaaaaaacacacacccagaagacgacctgaacccaaaattataccaagtgaggaagacccaacctttgaagacaaccctgaagtgcctccgctgatttgaaacatctggctgcgttgccattggctgagacccaccaggtccagttttggttggtgtagagaccatatgcatattattcctgggataaacacagagttatttgtc

SEQ ID NO: 174777 - DNA, 1401 bp, Artificial Sequence
  derived and/or modified sequence
atggggtggatcactgaggatcttatccgcagaaacgctgagcataatgattgtgtcatcttttccctggaggaattgagcctgcaccagcaggaaatagagcggctggaacatatagacaagtggtgtagggatctgaagatcctgtatctgcagaataacctgatcggcaaaatagagaacgtttcaaaactcaagaagcttgagtatctcaatcttgccctgaataacatcgaaaagatcgaaaatctcgagggttgcgaggagcttgccaagctggacctgacggtcaatttcataggtgagctctcgtccataaagaacctgcagcataacatccatctgaaggagctcttccttatggggaacccctgtgccagctttgaccactacagggagtttgttgtcgccaccctgccccagttgaagtggttggatggaaaagagatcgaaccgagcgagaggataaaggccctgcaggactacagcgttatagaacctcagattagagaacaagaaaaggaccattgcctcaaacgcgcaaagcttaaggaagaagcccagagaaagcaccaggaagaagataagaatgaggataagcgatctaatgctggatttgacggacgctggtacacagatatcaatgccactctgagcagcttagagtccaaggatcacctccaggcaccagacaccgaggagcacaacactaagaagttggacaactccgaggatgatttggaattttggaataaaccttgcttgttcactccagagtcaagactggaaactctacggcacatggagaagcagagaaaaaagcaggaaaaacttagcgaaaagaaaaaaaaagtcaagcccccacggacactcatcaccgaagacggcaaggctctgaacgtaaacgagcctaaaattgactttagcctgaaggacaatgagaagcaaattatcttagacctcgccgtgtatcggtacatggatactagcctcatcgacgtggacgtgcagccaacctacgtgcgagtgatgatcaaaggcaaacccttccagctggtgctgcccgctgaggtgaaaccagactcatcctctgccaaacgtagccagaccaccggccacctggtcatctgtatgcccaaggtcggagaagtgataaccggcggacagagagcctttaagtccatgaagaccacatctgaccgtagtcgggaacagactaatacacgcagtaaacatatggaaaaacttgaggtggaccctagcaaacatagtttccccgacgtaactaacatcgtccaggagaaaaagcacacccccaggaggcggccagagccaaagatcatcccctctgaggaggaccccacatttgaggataatcctgaagttcccccactgatatag

SEQ ID NO: 174778 - DNA, 1734 bp, Artificial Sequence
  derived and/or modified sequence
aattccgacggggacgcgctgaggagcaggggtgaagggtgaaaagcgtcattcgaggtccgggtccggcttgcggggtcagcgaactggagaggcgccatgggctggatcacagaagatcttattagacggaatgctgaacacaacgactgtgtcattttttccctggaggaactctcgttgcatcagcaagaaatagaaagactagaacacattgataaatggtgccgggatttaaaaattctctatcttcaaaataatcttattgggaaaattgaaaatgttagcaaactcaagaaacttgaatatttgaatttagctttaaacaacattgaaaaaatagaaaacttggaaggatgtgaagagctggcaaaacttgacctgactgtgaatttcattggagagctgagcagcattaaaaacttgcagcacaatatccatctgaaggagctctttctcatggggaacccatgtgcttcctttgaccactatagggagttcgtggtagcaactcttccacaattaaagtggttggatggtaaagaaatagagccttcagaaaggattaaggcattgcaggactattcagtaattgaaccacaaatcagagagcaggaaaaagatcactgtcttaaacgagccaaactcaaggaagaggctcagaggaaacaccaagaagaggataaaaatgaagacaagagaagtaacgcaggctttgatggacgttggtacacagacatcaatgctactctttcctctttagagagcaaagaccacctacaggcaccagacacagaggaacacaacacaaagaaattagacaacagtgaagatgacttggaattctggaataagccctgtttgtttactcctgaatcaagattggaaactcttagacacatggaaaaacaacggaagaaacaggaaaaattaagtgaaaaaaagaagaaagtgaaaccacccaggactttgatcactgaagatgggaaagccctaaatgtgaatgagcccaaaattgacttctctttgaaagataacgaaaagcagatcatcctggaccttgctgtctataggtatatggatacctctttaatcgatgttgatgtgcaaccaacttacgtgcgagtaatgatcaaaggaaagccatttcagcttgtccttcctgcagaagtgaaacccgatagtagttctgctaaaagatctcagacaacgggtcatttggtcatctgcatgcccaaggtaggagaagtaatcacaggtggtcagcgagcattcaaatctatgaaaactacctcggacaggagcagagaacaaacaaatacaagaagcaagcacatggagaaactagaagtagaccctagcaagcactcattccctgatgtgactaacatagttcaagagaaaaaacacacacccagaagacgacctgaacccaaaattataccaagtgaggaagacccaacctttgaagacaaccctgaagtgcctccgctgatttgaaacatctggctgcgttgccattggctgagacccaccaggtccagttttggttggtgtagagaccatatgcatattattcctgggataaacacagagttatttgtcaatatcgctgctccagtgttttaactcttactttgcatagtaatatccttaagatagcttaaaattaaaatgtatgtcttaaatgctataactcatcatttacctataataaagggttggtattgaaaa

SEQ ID NO: 174779 - DNA, 1401 bp, Artificial Sequence
  derived and/or modified sequence
atgggctggatcaccgaggacctgatcagaagaaacgccgagcacaacgactgcgtgatcttcagcctggaggagctgagcctgcaccagcaggagatcgagagactggagcacatcgacaagtggtgcagagacctgaagatcctgtacctgcagaacaacctgatcggcaagatcgagaacgtgagcaagctgaagaagctggagtacctgaacctggccctgaacaacatcgagaagatcgagaacctggagggctgcgaggagctggccaagctggacctgaccgtgaacttcatcggcgagctgagcagcatcaagaacctgcagcacaacatccacctgaaggagctgttcctgatgggcaacccctgcgccagcttcgaccactacagagagttcgtggtggccaccctgccccagctgaagtggctggacggcaaggagatcgagcccagcgagagaatcaaggccctgcaggactacagcgtgatcgagccccagatcagagagcaggagaaggaccactgcctgaagagagccaagctgaaggaggaggcccagagaaagcaccaggaggaggacaagaacgaggacaagagaagcaacgccggcttcgacggcagatggtacaccgacatcaacgccaccctgagcagcctggagagcaaggaccacctgcaggcccccgacaccgaggagcacaacaccaagaagctggacaacagcgaggacgacctggagttctggaacaagccctgcctgttcacccccgagagcagactggagaccctgagacacatggagaagcagagaaagaagcaggagaagctgagcgagaagaagaagaaggtgaagccccccagaaccctgatcaccgaggacggcaaggccctgaacgtgaacgagcccaagatcgacttcagcctgaaggacaacgagaagcagatcatcctggacctggccgtgtacagatacatggacaccagcctgatcgacgtggacgtgcagcccacctacgtgagagtgatgatcaagggcaagcccttccagctggtgctgcccgccgaggtgaagcccgacagcagcagcgccaagagaagccagaccaccggccacctggtgatctgcatgcccaaggtgggcgaggtgatcaccggcggccagagagccttcaagagcatgaagaccaccagcgacagaagcagagagcagaccaacaccagaagcaagcacatggagaagctggaggtggaccccagcaagcacagcttccccgacgtgaccaacatcgtgcaggagaagaagcacacccccagaagaagacccgagcccaagatcatccccagcgaggaggaccccaccttcgaggacaaccccgaggtgccccccctgatctag

SEQ ID NO: 174780 - protein, 261 aa, Artificial Sequence
  derived and/or modified sequence
MAGDSEQTLQNHQQPNGGEPFLIGVSGGTASGKSSVCAKIVQLLGQNEVDYRQKQVVILSQDSFYRVLTSEQKAKALKGQFNFDHPDAFDNELILKTLKEITEGKTVQIPVYDFVSHSRKEETVTVYPADVVLFEGILAFYSQEVRDLFQMKLFVDTDADTRLSRRVLRDISERGRDLEQILSQYITFVKPAFEEFCLPTKKYADVIIPRGADNLVAINLIVQHIQDILNGGPSKRQTNGCLNGYTPSRKRQASESSSRPH

SEQ ID NO: 174781 - protein, 130 aa, Artificial Sequence
  derived and/or modified sequence
MAGDSEQTLQNHQQPNGGEPFLIGVSGGTASGKSSVCAKIVQLLGQNEVDYRQKQVVILSQDSFYRVLTSEQKAKALKGQFNFDHPDAFDNELILKTLKEITEGKTVQIPVYDFVSHSRIKGHQRERQGS

SEQ ID NO: 174782 - DNA, 786 bp, Artificial Sequence
  derived and/or modified sequence
atggccggcgacagcgagcagaccctgcagaaccaccagcagcccaacggcggcgagcccttcctgatcggcgtgagcggcggcaccgccagcggcaagagcagcgtgtgcgccaagatcgtgcagctgctgggccagaacgaggtggactacagacagaagcaggtggtgatcctgagccaggacagcttctacagagtgctgaccagcgagcagaaggccaaggccctgaagggccagttcaacttcgaccaccccgacgccttcgacaacgagctgatcctgaagaccctgaaggagatcaccgagggcaagaccgtgcagatccccgtgtacgacttcgtgagccacagcagaaaggaggagaccgtgaccgtgtaccccgccgacgtggtgctgttcgagggcatcctggccttctacagccaggaggtgagagacctgttccagatgaagctgttcgtggacaccgacgccgacaccagactgagcagaagagtgctgagagacatcagcgagagaggcagagacctggagcagatcctgagccagtacatcaccttcgtgaagcccgccttcgaggagttctgcctgcccaccaagaagtacgccgacgtgatcatccccagaggcgccgacaacctggtggccatcaacctgatcgtgcagcacatccaggacatcctgaacggcggccccagcaagagacagaccaacggctgcctgaacggctacacccccagcagaaagagacaggccagcgagagcagcagcagaccccactag

SEQ ID NO: 174783 - DNA, 393 bp, Artificial Sequence
  derived and/or modified sequence
atggccggcgacagcgagcagaccctgcagaaccaccagcagcccaacggcggcgagcccttcctgatcggcgtgagcggcggcaccgccagcggcaagagcagcgtgtgcgccaagatcgtgcagctgctgggccagaacgaggtggactacagacagaagcaggtggtgatcctgagccaggacagcttctacagagtgctgaccagcgagcagaaggccaaggccctgaagggccagttcaacttcgaccaccccgacgccttcgacaacgagctgatcctgaagaccctgaaggagatcaccgagggcaagaccgtgcagatccccgtgtacgacttcgtgagccacagcagaatcaagggccaccagagagagagacagggcagctag

SEQ ID NO: 174784 - DNA, 786 bp, Artificial Sequence
  derived and/or modified sequence
atggcaggggactcggagcagaccctgcagaaccaccagcagcctaacggaggtgagccatttctcatcggcgtaagcgggggaacagcgagcggtaaaagttccgtgtgcgctaaaatcgtgcagctactaggccagaatgaggtggattacaggcaaaagcaggtggtgattctgagccaggattctttctatagagttttaacctctgaacagaaggccaaggccttgaagggtcaatttaacttcgaccatcccgatgcctttgataatgaacttattttaaaaaccctgaaggagattacagagggaaagacagtccagatcccagtgtacgacttcgtctcacatagccggaaggaggaaacggtgacagtgtaccccgccgatgtggtgctctttgaagggattttagcattctacagccaggaggttcgggatttattccagatgaaacttttcgtggatacagatgccgacacccggctatctcgccgcgttctgcgggatatcagtgagcggggccgggatctggagcagattttgagccagtacatcacatttgtaaagccggctttcgaggaattctgcttaccgacaaagaaatatgccgacgtgattatcccgcggggtgccgacaacctggttgccattaacctgatcgttcagcacatacaggatatcttgaatggagggccaagcaagagacagactaatgggtgccttaatgggtacactcctagcagaaaacggcaagccagtgaatcatcaagtcggccacattag

SEQ ID NO: 174785 - DNA, 393 bp, Artificial Sequence
  derived and/or modified sequence
atggcaggagacagcgagcagacgcttcaaaatcaccagcagccaaacgggggtgagccattcctgataggggtgtccgggggcacagcatccggcaaatcttctgtgtgtgctaaaatcgtgcaattgctgggccagaacgaggtggattacagacaaaagcaggtcgttatcctgagtcaggacagcttctaccgggtgctcacctcggaacaaaaggcgaaagcactgaaggggcaatttaactttgatcatccagacgccttcgataacgagctgattctgaagaccctcaaggagattacagagggcaaaactgtgcagatccctgtgtatgattttgtgtcccattcacgcataaagggccatcaaagagagaggcagggatcctag

SEQ ID NO: 174786 - DNA, 786 bp, Artificial Sequence
  derived and/or modified sequence
atggccggggacagcgagcagaccctgcagaaccaccagcagcccaacggcggggagcccttcctgattggagtgtctgggggcacagccagcggcaagagctctgtgtgtgccaagatcgtgcagctgctgggccagaatgaggtggactaccggcagaagcaggtggtgatcctgagccaggacagcttctacagagtgctgaccagcgagcagaaggccaaggccctgaagggccagttcaactttgaccacccagatgcctttgacaatgaactcatcctgaagaccctgaaggagatcacagagggcaagacagtgcagatccctgtgtatgactttgtgagccacagcaggaaggaggagaccgtgacagtgtacccagcagatgtggtgctgtttgagggcatcctggccttctacagccaggaggtgcgggacctcttccagatgaagctgtttgtggacacagatgctgacacccggctgagcagaagagtgctgcgggacatcagcgagcggggccgggacctggagcagatcctgagccagtacatcacctttgtgaagccagcctttgaggagttctgcctgcccaccaagaagtatgcagatgtgatcatccccagaggagctgacaacctggtggccatcaacctgattgtgcagcacatccaggacatcctgaatggaggccccagcaagaggcagaccaacggctgcctgaatggctacacccccagcaggaagaggcaggccagcgagagcagcagccggccccactag

SEQ ID NO: 174787 - DNA, 393 bp, Artificial Sequence
  derived and/or modified sequence
atggccggggacagcgagcagaccctgcagaaccaccagcagcccaacggcggggagcccttcctgattggagtgtctgggggcacagccagcggcaagagctctgtgtgtgccaagatcgtgcagctgctgggccagaatgaggtggactaccggcagaagcaggtggtgatcctgagccaggacagcttctacagagtgctgaccagcgagcagaaggccaaggccctgaagggccagttcaactttgaccacccagatgcctttgacaatgaactcatcctgaagaccctgaaggagatcacagagggcaagacagtgcagatccctgtgtatgactttgtgagccacagccgcatcaagggccaccagcgggagcggcagggcagctag

SEQ ID NO: 174788 - DNA, 786 bp, Artificial Sequence
  derived and/or modified sequence
atggccggcgacagcgagcagaccctgcagaaccaccagcagcccaacggaggtgagccattcctgatcggcgtttccggcgggaccgcctctgggaagtcctctgtgtgcgctaagattgtgcagctgcttggccaaaacgaagtcgattatcgccagaagcaagtagtgattctgagccaggactccttctaccgggttctcacatctgaacagaaggcaaaagccctgaagggtcagttcaacttcgaccatcccgatgctttcgataatgaactgatactgaagactttgaaagaaatcacagaggggaagacggtccagattccggtgtacgattttgtgtcacactctcggaaggaagagacagtgaccgtgtatcctgccgacgttgtgctattcgaggggatactcgccttttattcccaagaggtacgcgacctctttcagatgaaactctttgtggatactgatgctgacacccggctttcccggcgtgtgctgcgagatatcagtgagcgcggcagagacctggagcagatactctcacagtatatcacattcgtgaagcctgcctttgaagaattttgcttgccaaccaagaagtatgctgatgtcattatccctaggggagccgacaatctcgtcgcaattaaccttatcgtccagcacattcaggatatcctgaacgggggtccttctaaacgccagacaaatggttgcctcaacggatatacgccctcaagaaagcggcaggcatccgagagcagcagtcgacctcactag

SEQ ID NO: 174789 - DNA, 393 bp, Artificial Sequence
  derived and/or modified sequence
atggccggcgacagcgagcagaccctgcagaaccaccagcagcccaatggtggcgaacctttcctgataggagtgagcggtgggaccgcttccggtaaaagctcagtctgcgctaaaatagtgcagctcctggggcagaacgaggtggactacaggcagaaacaggtggtgattctctcacaggactcgttctaccgggtgctgactagtgaacagaaggctaaagcactgaagggccagttcaatttcgatcaccctgatgcttttgacaacgaactgattctaaaaaccctaaaggagatcacagagggaaaaacagttcagatccccgtctatgacttcgtgagtcatagtcgcataaaagggcaccagagggagcgccagggtagttag

SEQ ID NO: 174790 - DNA, 786 bp, Artificial Sequence
  derived and/or modified sequence
atggcgggtgatagcgagcagactttacagaaccaccaacaacctaatggcggagagccctttctgatcggggtttccggtggaaccgctagtggcaaaagctcagtctgcgcaaaaatagtacagcttctgggccagaacgaggttgactataggcagaagcaagtcgtcatactgtcccaagactcattttatcgagtgctgacaagcgaacagaaggccaaagccctgaagggccagttcaattttgaccatcccgatgcatttgataacgagctgatcctgaaaaccttgaaagaaattacagaagggaagacagtacagatccctgtgtacgattttgttagccattcaagaaaggaggaaacagtgactgtctatccagccgatgtggtcctgttcgaggggatcttggctttctatagccaggaggtccgggacctgttccagatgaagcttttcgttgacacagacgccgacaccaggctcagtcggcgtgtcctgagagatatctccgaacggggaagagatctggagcagatactcagtcagtacattacctttgtgaagccggctttcgaagaattttgtctgccaacaaaaaagtatgccgacgtgataatccccaggggggctgataaccttgttgctattaatcttatcgttcaacacatccaggacatcttgaatgggggacctagtaagaggcagacaaatggctgcttgaacggctacacgccatccagaaagcgacaagcctccgagtccagttccaggcctcattag

SEQ ID NO: 174791 - DNA, 393 bp, Artificial Sequence
  derived and/or modified sequence
atggctggcgatagtgaacaaactttgcagaaccatcagcagccaaacgggggtgagcccttcctgatcggcgtttccggagggacggccagcggcaagtcatctgtgtgtgctaagattgttcagctgcttggacagaatgaggtggattaccgccagaaacaggtcgtcattttgagtcaggactcgttctaccgcgtcctgacatccgaacaaaaagccaaggcgctgaaaggccagttcaactttgatcaccccgatgcctttgacaacgagctgatcctcaaaaccctgaaggagattaccgaaggtaagacagtgcagattcctgtctacgatttcgtgagccacagcaggattaagggccaccagcgcgagcgtcaaggaagttag

SEQ ID NO: 174792 - DNA, 1375 bp, Artificial Sequence
  derived and/or modified sequence
ctcgccgcctccgcctcggcgaatagcagcgcgctgcccgcccggattggagcagcagcatcacgctgacctctgcctgggatgtaaaccggaccagccgctgcgggcaaaggaaggctcttggctccttcgggaaacccagccccgtcaccgggctccgagcggctcgcaggcgagcgacagcggcctcagccccggcagcgcccagcggcggctgcggaaagcggagggagtccgacgcgggcgcgggcggggagcgtgcgtccgttcgcacaggcagcgggaggaggggcggcgcgaaccatggccggggacagcgagcagaccctgcagaaccaccagcagcccaacggcggcgagcccttccttataggcgtcagcgggggaacagctagcggcaagtcttccgtgtgtgctaagatcgtgcagctcctggggcagaatgaggtggactatcgccagaagcaggtggtcatcctgagccaggatagcttctaccgtgtccttacctcggagcagaaggccaaagccctgaagggccagttcaactttgaccacccggatgcctttgacaatgaactcattctcaaaacactcaaagaaatcactgaagggaaaacagtccagatccccgtgtatgactttgtctcccattcccggaaggaggagacagttactgtctatcccgcagacgtggtgctctttgaagggatcctggccttctactcccaggaggtacgagacctgttccagatgaagctttttgtggatacagatgcggacacccggctctcacgcagagtattaagggacatcagcgagagaggcagggatcttgagcagattttatctcagtacattacgttcgtcaagcctgcctttgaggaattctgcttgccaacaaagaagtatgctgatgtgatcatccctagaggtgcagataatctggtggccatcaacctcatcgtgcagcacatccaggacatcctgaatggagggccctccaaacggcagaccaatggctgtctcaacggctacaccccttcacgcaagaggcaggcatcggagtccagcagcaggccgcattgacccgtctccatcggaccccagcccctatctccaagagacagaggaggggtcaggaggcactgctcatctgtacatactgtttcctatgacattactgtatttaagaaaacaccatggagatgaaatgcctttgattttttttttctttttgtactttggaacgacaaaatgaaacagaacttgaccctgagcttaaataacaaaactgtgccaactactactggtgatgcctaattatgaatccaacgtgtaaccagttataaatacatatatatataaaaaagga

SEQ ID NO: 174793 - DNA, 1202 bp, Artificial Sequence
  derived and/or modified sequence
gcggcgcgaaccatggccggggacagcgagcagaccctgcagaaccaccagcagcccaacggcggcgagcccttccttataggcgtcagcgggggaacagctagcggcaagtcttccgtgtgtgctaagatcgtgcagctcctggggcagaatgaggtggactatcgccagaagcaggtggtcatcctgagccaggatagcttctaccgtgtccttacctcggagcagaaggccaaagccctgaagggccagttcaactttgaccacccggatgcctttgacaatgaactcattctcaaaacactcaaagaaatcactgaagggaaaacagtccagatccccgtgtatgactttgtctcccattcccgtattaagggacatcagcgagagaggcagggatcttgagcagattttatctcagtacattacgttcgtcaagcctgcctttgaggaattctgcttgccaacaaagaagtatgctgatgtgatcatccctagaggtgcagataatctggtggccatcaacctcatcgtgcagcacatccaggacatcctgaatggagggccctccaaacggcagaccaatggctgtctcaacggctacaccccttcacgcaagaggcaggcatcggagtccagcagcaggccgcattgacccgtctccatcggaccccagcccctatctccaagagacagaggaggggtcaggaggcactgctcatctgtacatactgtttcctatgacattactgtatttaagaaaacaccatggagatgaaatgcctttgattttttttttctttttgtactttggaacgacaaaatgaaacagaacttgaccctgagcttaaataacaaaactgtgccaactactactggtgatgcctaattatgaatccaacgtgtaaccagttataaatacatatatatataaaaaaggatctatttttgtgtaaatgtacaaatactgtaaagctgtttgccataagtattttgcaggagggtctgtacttgagtgttttaggactggagctggaatttcaccaaggggaaattgcctgttgtgtcccagggtggggaggctcgggcatctgtgagagacagggagggtggctaaggtccagttgcttttgagtgccccgtggaacttgatgggaatggggttggaaaaccttgattgcctcctctgtcacatgccactc

SEQ ID NO: 174794 - protein, 290 aa, Artificial Sequence
  derived and/or modified sequence
MGDGGAERDRGPARRAESGGGGGRCGDRSGAGDLRADGGGHSPTEVAGTSASSPAGSRESGADSDGQPGPGEADHCRRILVRDAKGTIREIVLPKGLDLDRPKRTRTSFTAEQLYRLEMEFQRCQYVVGRERTELARQLNLSETQVKVWFQNRRTKQKKDQSRDLEKRASSSASEAFATSNILRLLEQGRLLSVPRAPSLLALTPSLPGLPASHRGTSLGDPRNSSPRLNPLSSASASPPLPPPLPAVCFSSAPLLDLPAGYELGSSAFEPYSWLERKVGSASSCKKANT

SEQ ID NO: 174795 - DNA, 1163 bp, Artificial Sequence
  derived and/or modified sequence
ccgccgtagaggggttggcagtggcggtcagcatgggcgatgggggcgccgagcgcgaccggggccccgcgcgccgggcggagtctggtggcggcggtgggcgctgcggagaccgcagcggagcgggggacttgcgagctgatggcggtggccacagcccaacggaggtggccgggacctcagcctccagtcccgcaggctccagggagagtggagccgacagcgacgggcagcccgggcccggcgaggcagaccactgccgccgcatactggtgcgagatgccaaagggacaattcgggaaattgtcctgcctaagggcctggacctggaccggcccaagcggacacgtacatccttcactgccgagcagctgtaccgcctggagatggagttccagcgctgccagtatgtggtgggccgcgagcgcactgagctggcccgccagctgaacctctccgagacccaggtgaaggtctggttccagaaccgccgcaccaagcagaagaaagaccagagcagagacctggagaagcgggcgtcctcctcagcctccgaggcctttgccacctccaacattctgcggctgctggagcagggccggctgctctctgtgcccagggcccctagcctcctggcgctgacccctagcctgccaggcctacctgccagccacaggggcacctccttaggtgaccccaggaactcctccccacgcctcaacccgctgtcctcggcctcagcgtcccccccactgccgccccctctgccagctgtctgcttttcctcggccccgctcctggatctgcctgccggctacgaactgggttcctcggccttcgagccatacagctggctagaacggaaagtgggcagcgccagcagctgcaagaaagctaacacttaagactcccaccctgtgacactgagtcccgagcacagcaccttcccagtctcctgtgccccagcggacagcactgagcaggccccggagaggaggggctgcagccacacactcttccccacctgccccccagctcagagactcgtgaccaaatggccttggtcccgcagcttgtgtgcgtgagtgcagtgtgagtgtgtgtgtctctcactgaaataaaaggaaaacaatgacaagaagggaaaaaaaaaaaaaaaaaaa

SEQ ID NO: 174796 - DNA, 873 bp, Artificial Sequence
  derived and/or modified sequence
atgggcgacggcggcgccgagagagacagaggccccgccagaagagccgagagcggcggcggcggcggcagatgcggcgacagaagcggcgccggcgacctgagagccgacggcggcggccacagccccaccgaggtggccggcaccagcgccagcagccccgccggcagcagagagagcggcgccgacagcgacggccagcccggccccggcgaggccgaccactgcagaagaatcctggtgagagacgccaagggcaccatcagagagatcgtgctgcccaagggcctggacctggacagacccaagagaaccagaaccagcttcaccgccgagcagctgtacagactggagatggagttccagagatgccagtacgtggtgggcagagagagaaccgagctggccagacagctgaacctgagcgagacccaggtgaaggtgtggttccagaacagaagaaccaagcagaagaaggaccagagcagagacctggagaagagagccagcagcagcgccagcgaggccttcgccaccagcaacatcctgagactgctggagcagggcagactgctgagcgtgcccagagcccccagcctgctggccctgacccccagcctgcccggcctgcccgccagccacagaggcaccagcctgggcgaccccagaaacagcagccccagactgaaccccctgagcagcgccagcgccagcccccccctgcccccccccctgcccgccgtgtgcttcagcagcgcccccctgctggacctgcccgccggctacgagctgggcagcagcgccttcgagccctacagctggctggagagaaaggtgggcagcgccagcagctgcaagaaggccaacacctag

SEQ ID NO: 174797 - DNA, 873 bp, Artificial Sequence
  derived and/or modified sequence
atgggcgatgggggggcggagagagaccggggacccgcccgccgcgctgagagtgggggaggtggaggcagatgcggcgatcggagtggcgccggcgacttaagggcagacggaggtggtcactctccaacagaagtggctggaacctctgctagttcaccagctgggagtcgtgagagcggtgccgactctgacgggcagcccggacctggagaggctgatcactgccgaagaatcctcgtcagggacgccaaaggcacgattcgagagatcgttttgccaaaagggcttgatctcgaccggccgaaaagaactcgaacaagtttcaccgcagagcaactctaccgattggagatggagttccaaagatgtcaatacgtggtcgggagagagcgcactgaactggcaaggcagctcaatctcagcgagactcaagtaaaggtttggtttcagaataggcgcactaaacagaaaaaagaccagtccagggacttggagaaacgcgcaagcagctcggcctcagaagccttcgctaccagtaacatcttaaggttgctggaacaggggaggcttctgagcgttcctcgggccccctccttgctggccttgacgccctccctgcctggattgcccgcctcccaccgggggacctccctgggcgatcctagaaacagctcacctcgactgaaccctctctccagtgcgtccgcgagcccgccgctgcctccaccactcccggcggtgtgtttttcatctgcacctctgcttgacctgcccgccggatacgagctcggatcgagcgctttcgagccgtactcatggttagaaaggaaagtcggatccgccagttcttgcaaaaaggcaaatacatag

SEQ ID NO: 174798 - DNA, 873 bp, Artificial Sequence
  derived and/or modified sequence
atgggagatggaggagctgagcgggaccggggccctgcccggcgggcagagagcggcggcggcggcggccgctgtggggacagaagtggagctggggacctgcgggcagatggcggcggccacagccccacagaggtggccggcaccagcgccagcagccctgctggcagccgggagagcggggctgacagtgatggccagcccggccctggagaggccgaccactgccgccgcatcctggtgagagatgccaagggcaccatccgggagatcgtgctgcccaagggcctggacctggaccggcccaagaggaccaggaccagcttcaccgctgagcagctgtaccgcctggagatggagttccagcgctgccagtatgtggtgggccgggagaggacagagctggcccggcagctgaacctgtctgagacccaggtgaaggtgtggttccagaacagaaggaccaagcagaagaaggaccagagccgggacctggagaagagggccagcagcagcgccagcgaggcctttgccaccagcaacatcctgcggctgctggagcagggccgcctgctgtctgtgccccgggcccccagcctgctggccctgacccccagcctgcccggcctgcctgccagccaccggggcaccagcctgggggaccccaggaacagcagcccccggctgaaccccctgagcagcgccagcgccagcccccccctgcccccacccctgcctgctgtgtgcttcagcagcgcccccctgctggacctgcctgctggctatgagctgggcagcagcgcctttgagccctacagctggctggagaggaaggtgggcagcgccagcagctgcaagaaggccaacacctag

SEQ ID NO: 174799 - DNA, 873 bp, Artificial Sequence
  derived and/or modified sequence
atgggcgacggcggcgccgagcgggaccggggccccgcccggcgggctgaatcgggaggcggcggtggacgctgtggcgaccgcagcggtgctggggacctccgcgctgatggcggcggccactcacctacggaggtagcaggaactagcgcaagtagccccgcagggtcgcgcgagtccggagccgattctgatgggcaacccggacccggcgaggccgatcactgcaggcgcatactggtgagggatgctaagggcacaatacgggagattgttcttccgaaaggtctggaccttgataggccaaagcgcactcgtaccagcttcactgctgagcagctatatcgactggaaatggaattccagagatgtcagtatgtggtaggcagggaacgtacagagcttgcgagacagctgaatctatctgaaacccaggtgaaagtctggtttcagaaccggagaaccaagcagaagaaagaccaatcgcgagacctcgagaagcgggcgagctcaagtgcttccgaagcctttgccacgtcaaacattctgcgtctccttgaacagggtagactgcttagcgtgcctcgcgcacccagcctccttgccttgacaccaagcctcccaggactccccgcaagccacaggggcacaagcctaggagatcctagaaattctagtcctaggctgaatccgctgtctagtgcctcggccagccctcctctgcctccccccttgcctgccgtctgtttttcatctgccccgctgcttgatctacctgccggctatgagttgggaagctccgctttcgagccttactcctggctggaaagaaaagtcggtagcgcttccagttgcaagaaggccaacacctag

SEQ ID NO: 174800 - DNA, 873 bp, Artificial Sequence
  derived and/or modified sequence
atgggagacggcggagctgagcgggacagagggccagccaggagagccgagtcgggcggtggaggcggaagatgtggagacagaagcggtgccggtgacctccgggcagatgggggaggtcacagtcctactgaagtagctgggactagcgctagctcaccagcaggctccagagagtccggcgctgattcagacggtcagcccggtccaggagaggccgatcattgccgcaggattttggtgagggacgcaaaaggaacaataagagaaattgtccttccaaaggggttagatctcgatagacctaaaaggacccgtacgagcttcacagccgaacagctgtatagattggaaatggaatttcagcgatgtcagtatgtcgtgggccgagaaaggacggagttggcccgacagctgaacctgtcggagacacaggtgaaagtgtggttccagaacagaagaacaaagcagaagaaagaccagtcacgcgacttggagaagcgggcatcttccagtgcctccgaagccttcgcgacctctaatatcctgcggctgctcgagcaagggagactcctgagtgttcctcgggcaccttctctcctagcacttactccatctctgcctggattgccagcgagccacagagggaccagcctgggagaccctcgaaatagctccccacgcttaaatccgctttcttccgccagtgcgtctcccccactcccaccgcctcttcctgcagtgtgttttagctccgcccctctgctagatctgcctgctgggtatgagctagggagcagcgcctttgagccctactcatggctggagcgtaaggtgggtagtgcatccagctgtaagaaagcgaacacctag

SEQ ID NO: 174801 - DNA, 1147 bp, Artificial Sequence
  derived and/or modified sequence
ccgccgtagaggggttggcagtggcggtcagcatgggcgatgggggcgccgagcgcgaccggggccccgcgcgccgggcggagtctggtggcggcggtgggcgctgcggagaccgcagcggagcgggggacttgcgagctgatggcggtggccacagcccaacggaggtggccgggacctcagcctccagtcccgcaggctccagggagagtggagccgacagcgacgggcagcccgggcccggcgaggcagaccactgccgccgcatactggtgcgagatgccaaagggacaattcgggaaattgtcctgcctaagggcctggacctggaccggcccaagcggacacgtacatccttcactgccgagcagctgtaccgcctggagatggagttccagcgctgccagtatgtggtgggccgcgagcgcactgagctggcccgccagctgaacctctccgagacccaggtgaaggtctggttccagaaccgccgcaccaagcagaagaaagaccagagcagagacctggagaagcgggcgtcctcctcagcctccgaggcctttgccacctccaacattctgcggctgctggagcagggccggctgctctctgtgcccagggcccctagcctcctggcgctgacccctagcctgccaggcctacctgccagccacaggggcacctccttaggtgaccccaggaactcctccccacgcctcaacccgctgtcctcggcctcagcgtcccccccactgccgccccctctgccagctgtctgcttttcctcggccccgctcctggatctgcctgccggctacgaactgggttcctcggccttcgagccatacagctggctagaacggaaagtgggcagcgccagcagctgcaagaaagctaacacttaagactcccaccctgtgacactgagtcccgagcacagcaccttcccagtctcctgtgccccagcggacagcactgagcaggccccggagaggaggggctgcagccacacactcttccccacctgccccccagctcagagactcgtgaccaaatggccttggtcccgcagcttgtgtgcgtgagtgcagtgtgagtgtgtgtgtctctcactgaaataaaaggaaaacaatgacaagaagggaaa

SEQ ID NO: 174802 - protein, 261 aa, Artificial Sequence
  derived and/or modified sequence
MALNKNHSEGGGVIVNNTESILMSYDHVELTFNDMKNVPEAFKGTKKGTVYLTPYRVIFLSKGKDAMQSFMMPFYLMKDCEIKQPVFGANYIKGTVKAEAGGGWEGSASYKLTFTAGGAIEFGQRMLQVASQASRGEVPSGAYGYSYMPSGAYVYPPPVANGMYPCPPGYPYPPPPPEFYPGPPMMDGAMGYVQPPPPPYPGPMEPPVSGPDVPSTPAAEAKAAEAAASAYYNPGNPHNVYMPTSQPPPPPYYPPEDKKTQ

SEQ ID NO: 174803 - protein, 239 aa, Artificial Sequence
  derived and/or modified sequence
MSYDHVELTFNDMKNVPEAFKGTKKGTVYLTPYRVIFLSKGKDAMQSFMMPFYLMKDCEIKQPVFGANYIKGTVKAEAGGGWEGSASYKLTFTAGGAIEFGQRMLQVASQASRGEVPSGAYGYSYMPSGAYVYPPPVANGMYPCPPGYPYPPPPPEFYPGPPMMDGAMGYVQPPPPPYPGPMEPPVSGPDVPSTPAAEAKAAEAAASAYYNPGNPHNVYMPTSQPPPPPYYPPEDKKTQ

SEQ ID NO: 174804 - protein, 217 aa, Artificial Sequence
  derived and/or modified sequence
MALNKNHSEGGGVIVNNTESILMSYDHVELTFNDMKNVPEAFKGTKKGTVYLTPYRVIFLSKGKDAMQSFMMPFYLMKDCEIKQPVFGANYIKGTVKAEAGASRGEVPSGAYGYSYMPSGAYVYPPPVANGMYPCPPGYPYPPPPPEFYPGPPMMDGAMGYVQPPPPPYPGPMEPPVSGPDVPSTPAGEGPWVLAALRDQPSPPRCRTESLRMARDC

SEQ ID NO: 174805 - protein, 209 aa, Artificial Sequence
  derived and/or modified sequence
MALNKNHSEGGGVIVNNTESILMSYDHVELTFNDMKNVPEAFKGTKKGTVYLTPYRVIFLSKGKDAMQSFMMPFYLMKDCEIKQPVFGANYIKGTVKAEAGGGWEGSASYKLTFTAPMSPPLLQPKPRPQKQPPAPITTQAIASRRHLPTTHRKIEDPVGPPASLPPTLISLPYPSHRGCAGAWGGEGAPCSPSRSDHKQLPGTSIVGH

SEQ ID NO: 174806 - DNA, 786 bp, Artificial Sequence
  derived and/or modified sequence
atggccctgaacaagaaccacagcgagggcggcggcgtgatcgtgaacaacaccgagagcatcctgatgagctacgaccacgtggagctgaccttcaacgacatgaagaacgtgcccgaggccttcaagggcaccaagaagggcaccgtgtacctgaccccctacagagtgatcttcctgagcaagggcaaggacgccatgcagagcttcatgatgcccttctacctgatgaaggactgcgagatcaagcagcccgtgttcggcgccaactacatcaagggcaccgtgaaggccgaggccggcggcggctgggagggcagcgccagctacaagctgaccttcaccgccggcggcgccatcgagttcggccagagaatgctgcaggtggccagccaggccagcagaggcgaggtgcccagcggcgcctacggctacagctacatgcccagcggcgcctacgtgtaccccccccccgtggccaacggcatgtacccctgcccccccggctacccctaccccccccccccccccgagttctaccccggcccccccatgatggacggcgccatgggctacgtgcagccccccccccccccctaccccggccccatggagccccccgtgagcggccccgacgtgcccagcacccccgccgccgaggccaaggccgccgaggccgccgccagcgcctactacaaccccggcaacccccacaacgtgtacatgcccaccagccagccccccccccccccctactacccccccgaggacaagaagacccagtag

SEQ ID NO: 174807 - DNA, 654 bp, Artificial Sequence
  derived and/or modified sequence
atggccctgaacaagaaccacagcgagggcggcggcgtgatcgtgaacaacaccgagagcatcctgatgagctacgaccacgtggagctgaccttcaacgacatgaagaacgtgcccgaggccttcaagggcaccaagaagggcaccgtgtacctgaccccctacagagtgatcttcctgagcaagggcaaggacgccatgcagagcttcatgatgcccttctacctgatgaaggactgcgagatcaagcagcccgtgttcggcgccaactacatcaagggcaccgtgaaggccgaggccggcgccagcagaggcgaggtgcccagcggcgcctacggctacagctacatgcccagcggcgcctacgtgtaccccccccccgtggccaacggcatgtacccctgcccccccggctacccctaccccccccccccccccgagttctaccccggcccccccatgatggacggcgccatgggctacgtgcagccccccccccccccctaccccggccccatggagccccccgtgagcggccccgacgtgcccagcacccccgccggcgagggcccctgggtgctggccgccctgagagaccagcccagcccccccagatgcagaaccgagagcctgagaatggccagagactgctag

SEQ ID NO: 174808 - DNA, 786 bp, Artificial Sequence
  derived and/or modified sequence
atggctctaaataaaaatcacagcgaaggaggcggagttattgtgaataacaccgagagcatcctgatgagctacgatcatgtcgaactaacctttaatgacatgaagaacgtccctgaagctttcaagggcaccaaaaaaggcactgtgtacctgactccgtatagggtcatcttcctgagtaaaggaaaggacgcaatgcaatcttttatgatgcccttctatctgatgaaggattgcgaaatcaagcagcccgtgttcggagccaactatatcaagggcactgtgaaagctgaggctggagggggctgggagggttccgcctcctacaaactgacattcaccgccggaggggctatcgagttcggtcaacggatgctacaggttgcaagccaggccagcagaggggaagttcccagcggtgcgtacggatactcatatatgccatcaggcgcttacgtgtacccgcctccagtggctaacggcatgtatccatgccctcctggttacccctacccccctcctccccccgaattctatccgggaccaccgatgatggacggggccatgggttacgttcagccaccaccgcctccatacccgggaccaatggaacccccagtcagcgggcctgacgtaccttccaccccagctgccgaggccaaggcggcagaagcagctgcaagcgcctactacaatcctgggaacccacacaacgtctacatgcctacaagccaacctccacctcctccctactatccccccgaggacaaaaagactcagtag

SEQ ID NO: 174809 - DNA, 654 bp, Artificial Sequence
  derived and/or modified sequence
atggctttaaacaagaatcactcagagggcggaggagtgatagtgaataataccgagagcattctcatgagttatgatcatgttgagctcacctttaatgatatgaaaaacgtgcccgaagcctttaagggtactaagaagggaacggtgtacctcaccccttacagagtgatcttcctgagcaagggtaaagacgcgatgcagtccttcatgatgcctttctatctgatgaaggattgtgaaattaagcagcctgtgtttggggccaactacatcaagggaacagtgaaggccgaggcgggcgcctctcggggtgaggtgcccagcggagcgtacggttatagctacatgccctccggggcctatgtttaccccccccctgtggcgaacggcatgtatccttgtcctccagggtacccttatccacctcctccacccgaattctaccccggtcctcccatgatggatggcgcaatgggatatgtgcaacccccacccccaccatatcccgggcctatggagcctccagtttctggccctgacgtgccatctactcccgccggcgagggcccttgggtcctggccgccctgagggatcaaccgtcaccccctaggtgtaggacagaatcactgcggatggctcgggattgctag

SEQ ID NO: 174810 - DNA, 786 bp, Artificial Sequence
  derived and/or modified sequence
atggccctgaacaagaaccacagcgagggcggcggcgtcatcgtgaacaacacagagagcatcctgatgtcctatgaccacgtggagctgaccttcaatgacatgaagaatgtgcctgaggccttcaagggcaccaagaagggcaccgtgtacctgaccccctacagagtcatcttcctgagcaagggcaaggatgccatgcagagcttcatgatgcccttctacctgatgaaggactgtgagatcaagcagcctgtgtttggagccaactacatcaagggcaccgtgaaggccgaggccggcggcggctgggagggcagcgccagctacaagctgaccttcaccgctgggggcgccatcgagtttggccagaggatgctgcaggtggccagccaggccagcagaggagaggtgcccagcggggcctacggctacagctacatgcccagcggggcctacgtgtacccacctcctgtggccaacggcatgtacccctgccccccaggctacccctacccacctcctcctcctgagttctacccaggcccccccatgatggatggagccatgggctacgtgcagcccccacctccaccctacccaggccccatggagccccctgtgtctggcccagatgtgcccagcaccccagctgctgaggccaaggctgctgaggccgccgccagcgcctactacaaccctggcaacccccacaacgtgtacatgcccaccagccagcccccacctccaccctactacccacctgaggacaagaagacccagtag

SEQ ID NO: 174811 - DNA, 654 bp, Artificial Sequence
  derived and/or modified sequence
atggccctgaacaagaaccacagcgagggcggcggcgtcatcgtgaacaacacagagagcatcctgatgtcctatgaccacgtggagctgaccttcaatgacatgaagaatgtgcctgaggccttcaagggcaccaagaagggcaccgtgtacctgaccccctacagagtcatcttcctgagcaagggcaaggatgccatgcagagcttcatgatgcccttctacctgatgaaggactgtgagatcaagcagcctgtgtttggagccaactacatcaagggcaccgtgaaggccgaggccggggccagcagaggagaggtgcccagcggggcctacggctacagctacatgcccagcggggcctacgtgtacccacctcctgtggccaacggcatgtacccctgccccccaggctacccctacccacctcctcctcctgagttctacccaggcccccccatgatggatggagccatgggctacgtgcagcccccacctccaccctacccaggccccatggagccccctgtgtctggcccagatgtgcccagcaccccagctggggagggcccctgggtgctggccgccctgcgggaccagcccagccccccacgctgcaggacagagagcctgaggatggcccgggactgctag

SEQ ID NO: 174812 - DNA, 786 bp, Artificial Sequence
  derived and/or modified sequence
atggccctgaacaagaaccacagcgagggcggcggcgtgatcgtgaataacaccgagagcatcctcatgagttacgatcacgtcgagttgactttcaacgacatgaagaatgtccctgaggccttcaaggggacaaagaaaggcaccgtttacctgaccccctacagggtgatcttcctttctaagggcaaagatgccatgcagtcgttcatgatgcccttctacctaatgaaggactgcgagattaagcaacctgttttcggagctaactacataaaaggcaccgtgaaggctgaggctgggggcggctgggagggaagtgccagctacaagctgacattcaccgctggtggagccattgagtttgggcaacgtatgctgcaggtggcatcacaggcaagcagaggggaagtacccagtggtgcctacggctactcctacatgccatcaggagcatatgtctatccaccgcctgtagcaaacggcatgtacccttgccctcctggatacccctacccgccacccccccctgagttctatccagggccccccatgatggatggggcaatggggtatgtgcagccaccgccccctccataccccggccctatggagccccctgtgtccgggcctgatgtaccttcgactcccgccgctgaagcaaaagctgccgaggccgcagcgagcgcatattacaaccccggcaatcctcacaacgtgtatatgcctaccagccagcctccccctcccccctattacccacccgaggacaaaaagacccagtag

SEQ ID NO: 174813 - DNA, 654 bp, Artificial Sequence
  derived and/or modified sequence
atggccctgaacaagaaccacagcgagggcggcggcgtgatcgtgaacaataccgagtctatactgatgagctacgatcacgtggaattgacgttcaatgatatgaagaatgttccggaggccttcaaaggcactaaaaaaggaactgtttatttgaccccatatagggttatttttttatcgaagggtaaggacgccatgcagtcatttatgatgccattttacctgatgaaagattgtgagatcaagcagcccgtgtttggcgctaattatataaaggggaccgtaaaagctgaagccggagctagccgaggagaggtgccctcaggagcatacggctattcatacatgccatcaggcgcctacgtttacccacccccagtcgccaatggaatgtatccctgtcctccagggtacccttatcctccaccgccccccgaattctaccctggccctcccatgatggacggggctatgggatatgtccagcctccgcctccgccatatccaggtccaatggaaccacctgtctctggaccggatgtcccttccacgcccgcgggggaaggaccgtgggtgctggcggcgctgcgagatcaaccttcccccccaagatgccggacagagtctctcaggatggccagggactgctag

SEQ ID NO: 174814 - DNA, 786 bp, Artificial Sequence
  derived and/or modified sequence
atggcactgaacaaaaatcattcggaaggcggaggcgttatagtgaacaacactgagtctatcctgatgagttacgaccacgtagagctcacatttaacgatatgaaaaacgtgccagaggccttcaaggggacaaagaaaggaaccgtctacctcacgccatatcgcgttatcttcttgagtaagggaaaggacgccatgcaatcctttatgatgccattctacttaatgaaggattgtgagattaaacagcctgtgttcggagctaattatatcaaaggcacagttaaagcagaggccggaggaggctgggaggggagtgcttcttacaaactgacattcacagcagggggtgccattgagtttggccagcgaatgctgcaggtcgcctcacaggcgagtagaggagaggttcctagcggcgcatatggatacagctatatgccgtctggggcatacgtgtatcccccacccgtggccaacggcatgtatccttgtcctccaggatacccttaccccccacctcccccagagttctaccccggaccaccgatgatggacggagctatgggatacgtccagccaccaccccctccctatcctggacccatggagccaccagtctctggaccagacgtgccttcaaccccggcagccgaggccaaggctgcggaagctgctgccagcgcctattataaccccggaaacccacataacgtgtacatgcctacgtctcagccccctccacctccgtactatcctcctgaggacaaaaagactcagtag

SEQ ID NO: 174815 - DNA, 654 bp, Artificial Sequence
  derived and/or modified sequence
atggctctgaacaaaaaccacagtgaagggggtggtgttattgtcaacaatacagagtctattctaatgtcatatgaccatgtggagctgacgttcaacgatatgaaaaacgtgccggaagcctttaagggtactaaaaaaggtactgtgtacctgaccccctaccgcgtgatcttcctgagcaaggggaaggatgcgatgcagtccttcatgatgcctttctacctgatgaaggactgtgaaatcaagcagcctgtgtttggagcgaactacattaaaggtaccgtgaaagctgaagccggtgcctcacggggagaagtaccctcaggtgcctatggctattcatatatgcccagcggagcttatgtgtacccccctcccgtggcaaacggcatgtacccatgccctccgggatatccatacccaccccctccacctgaattctaccctggccctcccatgatggacggcgctatgggctatgttcagccgcctcctccaccctacccagggccaatggagcctcctgtgtccggtccggacgtacctagcacccctgcaggtgaggggccttgggtgctggcggctctgcgggaccagccatcacccccacggtgccgtactgagtcactgcggatggcaagggattgctag

SEQ ID NO: 174816 - DNA, 1944 bp, Artificial Sequence
  derived and/or modified sequence
gggccagcctccgcactcgagctttgattggctgactctaataagaagacgccactaggggcggggcgaagaggggcgcaagctcattgcgttttgagtctcgggacccctgttggagagactatggcgctcaacaagaatcactcggagggcggcggagtgatcgtcaataacaccgagagcatcctaatgtcctatgatcacgtggaactcacattcaatgacatgaagaacgtgccagaagccttcaaagggaccaagaaaggcactgtctaccttaccccttaccgggtcatctttctgtccaagggcaaggatgccatgcagtccttcatgatgccattttatctcatgaaagactgtgagatcaagcagcccgtatttggtgcaaactacatcaagggaacagtgaaggcggaagcgggaggtggctgggaaggctctgcttcctacaagttgactttcacggcagggggcgccattgagttcggacagcggatgctccaggtggcatctcaagcctccagaggtgaagtccccagtggagcctatggctactcttacatgcccagcggggcctatgtctatcccccgccagtcgccaatggaatgtacccctgccctcctggctacccctatccaccgcccccacctgagttctatccaggaccccccatgatggacggggccatgggatacgtgcagcccccaccaccgccctaccctgggcccatggaacctccggtcagcggccccgatgtcccctccactcctgcagccgaagccaaggccgcagaagcagccgccagcgcctattacaacccaggcaatcctcacaacgtctacatgcccacgagccagccgccgccacctccctactacccaccggaagataagaagacccagtaggccctcctgcctccctgcctcccaccctcatctctctaccctacccctcccatcggggctgtgctggggcttggggaggggagggggcgccttgttctccctccaggtctgatcataaacaattaccaggaactagcattgtgggacattagggcccccggcctcgggagaggtgccgcccagcttcccatgccagcccggagcccacagtgctgcccagcgtacctccctcaccgtctggggctcttctgggagcacggagcatcccctgttcctgtttcactctcagcttctcccctcgaagggactctctggccacctcctccaccgcagtccagctccctcagtctggcacccactgctacactcagcctcatgagccacttcagaccagccaggtgtcttcccgggccctgccagaccctgctcacattccctctgctggtctgtgctggtctcagaaggccaccgcgcccgcattccactcagccagggtccagctgcagcccccgccacccttccttcccttccctgtcctgggtcatgttgttgccaccctgtgtgacttttgaagctgtaaaatgagcttccagggcttgggtggcgtcggggcagggccgccgaggctgggaggaagcccttctgccttttgctggtgtttctggaatttgctttccctcacctctcacttccttctagaaggagcttcctgactggaaccagagaatgcatgtctgtccacttggtggctgctgggtggggccgggaacaagggcccctgaccctgtgtgctggccgggacctgccaccagccccccagcctgcttcttccccttaagctttgtgcccctggatgcgctaacattcactcttgtttgtccctggactggccatgaagtgaggagatggttatttaaagagaattccctatttatttgacaaaaaatccagttaatatattaatgtgaaataaaccctgtttgcacctcgatttgtttgctgaaaatgtgaaatagtaaaaatgaaataactgga

SEQ ID NO: 174817 - DNA, 1374 bp, Artificial Sequence
  derived and/or modified sequence
gttggagagactatggcgctcaacaagaatcactcggagggcggcggagtgatcgtcaataacaccgagaggcttgaaaaacaaaccagcaaaaacagaacatctatcacaaggacttaaaagaaaatagaagagttggccgggcgcagtggctcacgcctgtaatccctgcactttgggaggccgaggcaggtggatcacgaagtcaggagatcgagaccatcctggctaacacgcatcctaatgtcctatgatcacgtggaactcacattcaatgacatgaagaacgtgccagaagccttcaaagggaccaagaaaggcactgtctaccttaccccttaccgggtcatctttctgtccaagggcaaggatgccatgcagtccttcatgatgccattttatctcatgaaagactgtgagatcaagcagcccgtatttggtgcaaactacatcaagggaacagtgaaggcggaagcgggaggtggctgggaaggctctgcttcctacaagttgactttcacggcagggggcgccattgagttcggacagcggatgctccaggtggcatctcaagcctccagaggtgaagtccccagtggagcctatggctactcttacatgcccagcggggcctatgtctatcccccgccagtcgccaatggaatgtacccctgccctcctggctacccctatccaccgcccccacctgagttctatccaggaccccccatgatggacggggccatgggatacgtgcagcccccaccaccgccctaccctgggcccatggaacctccggtcagcggccccgatgtcccctccactcctgcagccgaagccaaggccgcagaagcagccgccagcgcctattacaacccaggcaatcctcacaacgtctacatgcccacgagccagccgccgccacctccctactacccaccggaagataagaagacccagtaggccctcctgcctccctgcctcccaccctcatctctctaccctacccctcccatcggggctgtgctggggcttggggaggggagggggcgccttgttctccctccaggtctgatcataaacaattaccaggaactagcattgtgggacattagggcccccggcctcgggagaggtgccgcccagcttcccatgccagcccggagcccacagtgctgcccagcgtacctccctcaccgtctggggctcttctgggagcacggagcatcccctgttcctgtttcactctcagcttctcccctcgaagggactctctggccacctcctccaccgcagtccagctccctcagtctggcacccactgctacactcagcctcatgagccacttcagaccagccaggtgtcttcccggg

SEQ ID NO: 174818 - DNA, 987 bp, Artificial Sequence
  derived and/or modified sequence
attgcgttttgagtctcgggacccctgttggagagactatggcgctcaacaagaatcactcggagggcggcggagtgatcgtcaataacaccgagagcatcctaatgtcctatgatcacgtggaactcacattcaatgacatgaagaacgtgccagaagccttcaaagggaccaagaaaggcactgtctaccttaccccttaccgggtcatctttctgtccaagggcaaggatgccatgcagtccttcatgatgccattttatctcatgaaagactgtgagatcaagcagcccgtatttggtgcaaactacatcaagggaacagtgaaggcggaagcgggagcctccagaggtgaagtccccagtggagcctatggctactcttacatgcccagcggggcctatgtctatcccccgccagtcgccaatggaatgtacccctgccctcctggctacccctatccaccgcccccacctgagttctatccaggaccccccatgatggacggggccatgggatacgtgcagcccccaccaccgccctaccctgggcccatggaacctccggtcagcggccccgatgtcccctccactcctgcaggtgagggcccttgggtgctggcagcccttcgggaccagccctctcctccccgatgtcgcacagagagcctcagaatggccagagactgctgagagccgcagatgatggatgacccctggactaccccaggggcccagcagggctgtggcctggtggagcggagctagattctggccccacccccatcccttagctatccatgtgccctgggcggggaaggtcaccctgtgtgcctctcgatcctctcatctacactcagctggtcggtcacagtggcacctggggcattggctcaaggattagatgaggtgagacatgcgatgggcctggaaaggaccgtgccagcgcgtggcatgtgctcaggaaacctcacctgctgctctcatt

SEQ ID NO: 174819 - protein, 247 aa, Artificial Sequence
  derived and/or modified sequence
MVDREQLVQKARLAEQAERYDDMAAAMKNVTELNEPLSNEERNLLSVAYKNVVGARRSSWRVISSIEQKTSADGNEKKIEMVRAYREKIEKELEAVCQDVLSLLDNYLIKNCSETQYESKVFYLKMKGDYYRYLAEVATGEKRATVVESSEKAYSEAHEISKEHMQPTHPIRLGLALNYSVFYYEIQNAPEQACHLAKTAFDDAIAELDTLNEDSYKDSTLIMQLLRDNLTLWTSDQQDDDGGEGNN

SEQ ID NO: 174820 - protein, 207 aa, Artificial Sequence
  derived and/or modified sequence
MVDREQLVQKARLAEQAERYDDMAAAMKNVTELNEPLSNEERNLLSVAYKNVVGARRSSWRVISSIEQKTSADGNEKKIEMVRAYREKIEKELEAEVATGEKRATVVESSEKAYSEAHEISKEHMQPTHPIRLGLALNYSVFYYEIQNAPEQACHLAKTAFDDAIAELDTLNEDSYKDSTLIMQLLRDNLTLWTSDQQDDDGGEGNN

SEQ ID NO: 174821 - protein, 225 aa, Artificial Sequence
  derived and/or modified sequence
MAAAMKNVTELNEPLSNEERNLLSVAYKNVVGARRSSWRVISSIEQKTSADGNEKKIEMVRAYREKIEKELEAVCQDVLSLLDNYLIKNCSETQYESKVFYLKMKGDYYRYLAEVATGEKRATVVESSEKAYSEAHEISKEHMQPTHPIRLGLALNYSVFYYEIQNAPEQACHLAKTAFDDAIAELDTLNEDSYKDSTLIMQLLRDNLTLWTSDQQDDDGGEGNN

SEQ ID NO: 174822 - DNA, 744 bp, Artificial Sequence
  derived and/or modified sequence
atggtggacagagagcagctggtgcagaaggccagactggccgagcaggccgagagatacgacgacatggccgccgccatgaagaacgtgaccgagctgaacgagcccctgagcaacgaggagagaaacctgctgagcgtggcctacaagaacgtggtgggcgccagaagaagcagctggagagtgatcagcagcatcgagcagaagaccagcgccgacggcaacgagaagaagatcgagatggtgagagcctacagagagaagatcgagaaggagctggaggccgtgtgccaggacgtgctgagcctgctggacaactacctgatcaagaactgcagcgagacccagtacgagagcaaggtgttctacctgaagatgaagggcgactactacagatacctggccgaggtggccaccggcgagaagagagccaccgtggtggagagcagcgagaaggcctacagcgaggcccacgagatcagcaaggagcacatgcagcccacccaccccatcagactgggcctggccctgaactacagcgtgttctactacgagatccagaacgcccccgagcaggcctgccacctggccaagaccgccttcgacgacgccatcgccgagctggacaccctgaacgaggacagctacaaggacagcaccctgatcatgcagctgctgagagacaacctgaccctgtggaccagcgaccagcaggacgacgacggcggcgagggcaacaactag

SEQ ID NO: 174823 - DNA, 624 bp, Artificial Sequence
  derived and/or modified sequence
atggtggacagagagcagctggtgcagaaggccagactggccgagcaggccgagagatacgacgacatggccgccgccatgaagaacgtgaccgagctgaacgagcccctgagcaacgaggagagaaacctgctgagcgtggcctacaagaacgtggtgggcgccagaagaagcagctggagagtgatcagcagcatcgagcagaagaccagcgccgacggcaacgagaagaagatcgagatggtgagagcctacagagagaagatcgagaaggagctggaggccgaggtggccaccggcgagaagagagccaccgtggtggagagcagcgagaaggcctacagcgaggcccacgagatcagcaaggagcacatgcagcccacccaccccatcagactgggcctggccctgaactacagcgtgttctactacgagatccagaacgcccccgagcaggcctgccacctggccaagaccgccttcgacgacgccatcgccgagctggacaccctgaacgaggacagctacaaggacagcaccctgatcatgcagctgctgagagacaacctgaccctgtggaccagcgaccagcaggacgacgacggcggcgagggcaacaactag

SEQ ID NO: 174824 - DNA, 678 bp, Artificial Sequence
  derived and/or modified sequence
atggccgccgccatgaagaacgtgaccgagctgaacgagcccctgagcaacgaggagagaaacctgctgagcgtggcctacaagaacgtggtgggcgccagaagaagcagctggagagtgatcagcagcatcgagcagaagaccagcgccgacggcaacgagaagaagatcgagatggtgagagcctacagagagaagatcgagaaggagctggaggccgtgtgccaggacgtgctgagcctgctggacaactacctgatcaagaactgcagcgagacccagtacgagagcaaggtgttctacctgaagatgaagggcgactactacagatacctggccgaggtggccaccggcgagaagagagccaccgtggtggagagcagcgagaaggcctacagcgaggcccacgagatcagcaaggagcacatgcagcccacccaccccatcagactgggcctggccctgaactacagcgtgttctactacgagatccagaacgcccccgagcaggcctgccacctggccaagaccgccttcgacgacgccatcgccgagctggacaccctgaacgaggacagctacaaggacagcaccctgatcatgcagctgctgagagacaacctgaccctgtggaccagcgaccagcaggacgacgacggcggcgagggcaacaactag

SEQ ID NO: 174825 - DNA, 744 bp, Artificial Sequence
  derived and/or modified sequence
atggtcgaccgcgaacagctcgtgcagaaggccaggctagccgagcaagctgaaagatatgatgatatggccgccgctatgaaaaatgttacggagctgaatgaacctctgagtaacgaggaaagaaatctgctctccgtggcatacaagaatgttgttggtgcaagaagatcatcctggcgggtaatctctagcatcgaacaaaaaacctctgccgacggaaatgagaaaaaaattgagatggtcagggcctatagggagaaaatagagaaggagctggaagctgtgtgtcaggacgtcctcagtctgctcgataactacttaatcaaaaactgctccgagacgcagtatgagagcaaggtcttctacctcaagatgaaaggggactattaccgctatctggcagaggtagcaaccggcgagaagcgcgctacagtggtggaatccagtgagaaggcctatagcgaggcccacgagatctccaaagaacacatgcagccaacccatcctataagattggggctcgccctgaactacagcgtattctactacgaaatccaaaacgcccccgagcaggcttgccaccttgccaagacggcattcgacgatgcaatagccgagttggatactttaaacgaggacagttataaggactccaccctgatcatgcagttgttaagggacaatctaacgctgtggaccagcgatcagcaggacgacgatgggggagaagggaacaattag

SEQ ID NO: 174826 - DNA, 624 bp, Artificial Sequence
  derived and/or modified sequence
atggtggatcgcgagcagctggtgcagaaagcaaggcttgccgagcaggccgaacgatacgatgacatggccgctgctatgaagaatgttactgagctgaatgaacccctgtccaacgaagaacgtaacctcttaagtgtcgcctataagaatgtggttggagcccgccgaagttcttggagggtgattagctcaattgagcagaagacatctgctgacggcaatgagaaaaagattgagatggtgcgcgcgtacagagagaaaattgaaaaggagctcgaggctgaggtagccaccggcgaaaagagagctacggttgtggagagttcagaaaaggcgtatagcgaagctcacgagatcagcaaggagcacatgcagccaacccacccaattagactgggactcgccctcaattactcagtgttctactacgaaatccagaatgcgcccgaacaagcctgtcacctcgctaaaactgcgttcgacgacgcgatcgcagagttggataccctgaatgaggactcctataaagactctactctgattatgcagctcttgagagataatctgacgctgtggacgtccgaccagcaggatgacgatggcggagagggaaataactag

SEQ ID NO: 174827 - DNA, 678 bp, Artificial Sequence
  derived and/or modified sequence
atggcggccgctatgaaaaacgtaaccgaacttaatgaacctctgtctaatgaggaacggaatcttctgagcgtcgcttataagaacgtggtgggcgcaaggaggagcagctggagagtcatcagctctattgagcagaaaacctccgctgacgggaacgaaaaaaagatcgagatggtgcgagcctatagagagaaaatcgagaaggaactagaggccgtctgccaggacgtgctgtcgctgctcgataactacttgataaagaattgtagcgaaacccagtacgaatctaaagtgttctacctgaagatgaagggagattactacaggtacttggccgaggtggccacgggggaaaagagggccactgtcgtggagtcttccgagaaagcctattccgaagctcatgagattagtaaggaacatatgcagcctacgcatcccatccgcctggggctggctctcaactactccgtgttctactatgagatacagaatgcccctgagcaggcatgtcacctggcaaaaacagcttttgatgatgctattgctgagctcgatactttgaatgaagacagctataaagacagcaccctcatcatgcagctgttgcgcgacaatctcacattgtggacaagtgaccaacaggatgatgatggcggggaggggaacaattag

SEQ ID NO: 174828 - DNA, 744 bp, Artificial Sequence
  derived and/or modified sequence
atggtggaccgggagcagctggtgcagaaggcccggctggccgagcaggccgagagatatgatgacatggctgctgccatgaagaatgtgacagagctgaatgagcccctgagcaatgaggagaggaacctgctgtctgtggcctacaagaatgtggtgggcgcccggcgcagctcctggagggtcatcagcagcattgagcagaagaccagcgcagatggaaatgagaagaagattgagatggtgcgggcctaccgggagaagattgagaaggagctggaggccgtgtgccaggatgtgctgagcctgctggacaactacctgatcaagaactgcagcgagacccagtatgagagcaaggtgttctacctgaagatgaagggggactactaccgctacctggccgaggtggccactggagagaagagggccaccgtggtggagagcagcgagaaggcctacagcgaggcccacgagatcagcaaggagcacatgcagcccacccaccccatccggctgggcctggccctgaactacagcgtcttctactatgagatccagaatgcccctgagcaggcctgccacctggccaagacagcctttgatgatgccatcgccgagctggacaccctgaatgaagattcctacaaggacagcaccctcatcatgcagctgctgcgggacaacctgaccctgtggaccagtgaccagcaggatgatgatggaggagagggcaacaactag

SEQ ID NO: 174829 - DNA, 624 bp, Artificial Sequence
  derived and/or modified sequence
atggtggaccgggagcagctggtgcagaaggcccggctggccgagcaggccgagagatatgatgacatggctgctgccatgaagaatgtgacagagctgaatgagcccctgagcaatgaggagaggaacctgctgtctgtggcctacaagaatgtggtgggcgcccggcgcagctcctggagggtcatcagcagcattgagcagaagaccagcgcagatggaaatgagaagaagattgagatggtgcgggcctaccgggagaagattgagaaggagctggaggccgaggtggccactggagagaagagggccaccgtggtggagagcagcgagaaggcctacagcgaggcccacgagatcagcaaggagcacatgcagcccacccaccccatccggctgggcctggccctgaactacagcgtcttctactatgagatccagaatgcccctgagcaggcctgccacctggccaagacagcctttgatgatgccatcgccgagctggacaccctgaatgaagattcctacaaggacagcaccctcatcatgcagctgctgcgggacaacctgaccctgtggaccagtgaccagcaggatgatgatggaggagagggcaacaactag

SEQ ID NO: 174830 - DNA, 678 bp, Artificial Sequence
  derived and/or modified sequence
atggctgctgccatgaagaatgtgacagagctgaatgagcccctgagcaatgaggagaggaacctgctgtctgtggcctacaagaatgtggtgggcgcccggcgcagctcctggagggtcatcagcagcattgagcagaagaccagcgcagatggaaatgagaagaagattgagatggtgcgggcctaccgggagaagattgagaaggagctggaggccgtgtgccaggatgtgctgagcctgctggacaactacctgatcaagaactgcagcgagacccagtatgagagcaaggtgttctacctgaagatgaagggggactactaccgctacctggccgaggtggccactggagagaagagggccaccgtggtggagagcagcgagaaggcctacagcgaggcccacgagatcagcaaggagcacatgcagcccacccaccccatccggctgggcctggccctgaactacagcgtcttctactatgagatccagaatgcccctgagcaggcctgccacctggccaagacagcctttgatgatgccatcgccgagctggacaccctgaatgaagattcctacaaggacagcaccctcatcatgcagctgctgcgggacaacctgaccctgtggaccagtgaccagcaggatgatgatggaggagagggcaacaactag

SEQ ID NO: 174831 - DNA, 744 bp, Artificial Sequence
  derived and/or modified sequence
atggtggaccgggagcagctggtgcagaaggcccggctggccgagcaggctgaacggtacgacgatatggcagcagccatgaaaaacgtaactgaactgaatgaacccctgtccaatgaagagaggaacctgctgtctgtcgcctacaaaaacgtcgtcggtgcgcgaagatcaagttggagggtcatttcctccatcgaacaaaaaacaagcgctgacgggaatgaaaagaagatcgaaatggttagagcctacagagagaaaatagagaaagaactggaggccgtatgccaggatgtgctctccctactcgacaattacttaatcaagaattgttccgaaacgcagtatgaatctaaagtcttctatctcaaaatgaagggcgactactacaggtatctggcagaggtggccaccggggagaagagggccacagtggttgagtcatctgagaaagcatactctgaagctcatgaaatcagtaaggaacacatgcagcctacacatcccatccgacttggcctagccctgaattactctgtcttttactatgagattcagaatgctccagagcaggcctgtcatttagctaaaacagccttcgatgacgctatcgccgagctggacacgctgaacgaagattcttataaggattccacactgataatgcagctacttcgggataacctgacactctggacatctgatcagcaagatgacgatggcggtgagggtaacaattag

SEQ ID NO: 174832 - DNA, 624 bp, Artificial Sequence
  derived and/or modified sequence
atggtggaccgggagcagctggtgcagaaggcccggctggccgagcaagctgagaggtatgatgatatggcagcagccatgaagaatgttacagaactgaacgaacccctgagtaacgaggaaaggaaccttctctctgtcgcctataagaatgtggtgggagccaggaggagctcctggcgagttatatcgagtattgaacaaaaaacatccgccgacggcaacgaaaaaaaaatcgagatggtcagggcgtatcgcgaaaagatcgagaaggagctcgaggccgaggtggctaccggcgaaaaaagggccacagtggttgagagctcagagaaggcttacagcgaggcacatgaaattagcaaagagcacatgcagcccacacatcctatacgcctgggcttggcactgaattatagcgtgttttactatgagatccagaacgccccagaacaggcctgccacttggccaagaccgccttcgacgacgcgatcgcagagcttgatacgttgaatgaggacagctacaaggattccaccctgattatgcagctgctcagagacaaccttaccctctggacttctgatcagcaagacgacgacggcggggagggcaataattag

SEQ ID NO: 174833 - DNA, 678 bp, Artificial Sequence
  derived and/or modified sequence
atggccgccgccatgaagaacgtgaccgagctgaacgagcccctgagtaacgaggagcggaatcttctgtctgttgcctacaaaaacgtggtcggcgcacgccggtcaagctggcgtgtcataagttccattgagcagaagacttccgctgacggcaatgagaaaaagatagagatggtgagagcctatcgggaaaagatagagaaggagctcgaggcagtgtgccaggacgtgttgtcgctgcttgataactacttgatcaagaactgttccgagacacagtacgaatcaaaggtgttctacctaaagatgaaaggtgattattaccgctacttagcagaggttgcaaccggggagaagcgggcaactgtagttgaatcctcagagaaagcatactccgaagctcatgagatcagcaaggagcacatgcagccaacacatcctattcggctcgggctggcgctgaactacagtgtgttttactatgaaatccagaacgcccctgagcaggcttgtcacttggctaagactgcgttcgatgacgcgatcgcagaactagacaccctgaacgaggactcttacaaagatagtacgctgataatgcagctcctgcgggacaacctgaccttgtggacctcggaccaacaggacgacgatggcggagaagggaacaactag

SEQ ID NO: 174834 - DNA, 744 bp, Artificial Sequence
  derived and/or modified sequence
atggtggatagggagcaattggtccaaaaagccaggctggcggagcaggctgagcgctatgatgacatggcagccgctatgaaaaatgtgactgaactgaacgagccgctgagtaacgaggagcgaaacttgctgtccgttgcctataagaatgtggttggcgctcgtcgatcatcctggcgggttatctcatcaatcgagcagaagacttcggccgacgggaacgagaagaagattgaaatggtccgagcctaccgagaaaagatcgagaaagagctcgaggcggtctgccaggatgtcctatcactgctagacaattacctcattaagaattgctccgagacacagtacgagagtaaggttttctatctgaagatgaaaggcgactattatcgctacctcgccgaagtagctactggcgaaaagagagcgactgtcgtcgaatcatctgagaaggcctactcggaagctcatgagatcagcaaggaacacatgcagccaacgcacccaatcagacttggcttggccttgaattactctgtgttttattatgagattcagaatgcgccagaacaggcctgtcacctggcaaaaacggccttcgatgatgccattgctgaactcgacacgttaaacgaggactcctataaggattctaccctgatcatgcagctactgcgcgacaatcttactctttggacttccgatcaacaagatgacgacggcggtgaaggcaacaactag

SEQ ID NO: 174835 - DNA, 624 bp, Artificial Sequence
  derived and/or modified sequence
atggtcgaccgggagcagctggtgcagaaagctcgattggctgagcaggccgaacgatatgacgacatggccgcagctatgaagaatgtcacagagctcaacgaacctctgtcaaatgaagagcgtaacttgcttagcgtggcttacaagaacgtcgtcggggctaggcgcagttcatggcgcgtaatcagctctatagagcaaaagactagcgcagacggcaatgaaaaaaaaatcgagatggtgagggcgtaccgcgaaaagatcgagaaggagctggaggcggaagtcgctactggtgaaaagagagccactgttgtggaaagcagtgaaaaggcttactccgaagcacacgaaattagcaaagagcacatgcagccgacacatcctattaggctcggcctcgcactgaactacagcgttttctattacgagattcagaacgcccctgagcaggcatgtcatctcgccaagacagcgttcgacgatgcaatcgccgagctcgacactcttaacgaggacagctacaaggacagtacactgatcatgcagttgctgagagacaacctcacattatggacctccgaccagcaggatgacgacggaggagaggggaataactag

SEQ ID NO: 174836 - DNA, 678 bp, Artificial Sequence
  derived and/or modified sequence
atggctgcagcaatgaagaacgtaaccgagctgaacgagcctctcagcaatgaggagaggaatctactctcggtggcatataagaatgtggtaggcgcacgcaggtcaagctggagggtcattagctcaatagaacaaaaaacgagtgcggatggcaatgagaaaaagatcgaaatggtgcgagcttatcgggagaaaatcgaaaaagagctggaggctgtatgtcaggatgtgctgagcttactcgataactatctgattaagaactgttcagagacccagtacgaatccaaagtcttttacctgaaaatgaaaggagactactacaggtacctcgccgaggtcgcaaccggggagaagagggccaccgtcgtcgaatcctccgagaaggcttacagcgaggcccatgaaattagcaaggaacatatgcagcctacacaccccatcagactcggactggcgcttaactactccgttttctattatgaaatccagaacgctccagaacaggcctgtcacttggctaaaactgcctttgatgacgctatagctgaactagacacactgaacgaggattcatataaggattccacactgattatgcagctgttgagagataatctcactctctggacgagcgatcagcaggatgacgatggtggagagggtaataattag

SEQ ID NO: 174837 - DNA, 3745 bp, Artificial Sequence
  derived and/or modified sequence
ggccgcagggggttgtccgtcagtggcacgcacagcagccgcagccgcctcgcgcccggtcccgcggtcgcagctccagccgcctcctccgcgcagccgccgcctcagctgctcgctctgtgggtcggtcctctccggcacttgggctccagtcgcgccctccaagcccttcaggccgccccagtgtcctcctccttctccggccagacccagccccgcgaagatggtggaccgcgagcaactggtgcagaaagcccggctggccgagcaggcggagcgctacgacgacatggccgcggccatgaagaacgtgacagagctgaatgagccactgtcgaatgaggaacgaaaccttctgtctgtggcctacaagaacgttgtgggggcacgccgctcttcctggagggtcatcagtagcattgagcagaagacatctgcagacggcaatgagaagaagattgagatggtccgtgcgtaccgggagaagatagagaaggagttggaggctgtgtgccaggatgtgctgagcctgctggataactacctgatcaagaattgcagcgagacccagtacgagagcaaagtgttctacctgaagatgaaaggggactactaccgctacctggctgaagtggccaccggagagaaaagggcgacggtggtggagtcctccgagaaggcctacagcgaagcccacgagatcagcaaagagcacatgcagcccacccaccccatccgattaggcctggctcttaactactccgtcttctactatgagatccagaacgccccagagcaagcgtgccacttggccaagaccgcgttcgacgacgccatcgccgagcttgacaccctcaacgaggactcctacaaggactccacgctcatcatgcagctcctccgcgacaacctcacgctctggacgagcgaccagcaggacgacgatggcggcgaaggcaacaattaaggccccaggggaactggcagcgcacgcggatgctactactgcagtctttatttttttcccatgagttgggggtcgggtgggggagggaaagggagggatgaccttcccagggagaaacccacgacctgtcctgtctttgatcgcctctttgacatttttgccaaaataccactagtggaaagtcaggctagctgtgctggtattggaatagcagcctcacactggcgtctggactgttctgtagattcatgcaagtggagctgtctgtctctaatttaacttattgctagataatagggttttcagatgaaaagaaaacttaaagaggaatggccctcattcagtaagttctgtggttccagtaaggatttttatgtacatacgctctcgtctctcgttttgggtactttctatctcatctgtctcggctctgcatgttttccagggtgtagcctacagacatggaacagtgtaaatcccagactgacagacttagaacctgaggtctcattcatccttatggtttaggccttgccagttttccgaagtctctgattagttgacagtattaacactaaattgcagtttacagtatttctacattacagccatatgtaacatcaagccatcgattgtgtacttttcctttgctagttgtttgggctttaacatccttattcagccttatccaggttggttttgctgttgatcggtctcctaggctaaatgagaatgaaagcgacttcaggtcaggtggctgtgggattttttttttttggtccttctttcctcttaacgtaaatccaccaccaaaattattaatcctcttgagagaaacgtgaaacgccacaaaaatagagaaaattcaggtctgtatgtcatggatcgtgttggtattttcagagaacatcccgcttctgaagctgctgcagctccctcctcagggatcacactgccgtcacccactctgcactggggcgtttcctactgcgcctcgtgctggcggacgcagctgggtgcagaagctgtggggtcggagaggcgtttggagaaggtctgtggtgcagtgtgtgaaaattcaggtgctagaagcctactggtagaaaaacccaaaaggaagagctatatccttaaccattctgtccaatttcgggagccttgtcagtgtgtcagtttttcctccccgaagacactccttccccaagtaattgtaggaagataaaaaaactgttaccagataacaaacactgaactcctatttgaccagaactttttcctctcgagatagttttttctttttaatgaaaaaagcataggaattggagattggcttgtctcacgcagccagtgcacatttggaattgacggaaacaacgttgctatttccacccatttgttttcggcagccttaaggccctcattctcatttcgggtgaatctgtctatctgtgaacgtggcccgcatgtgcattcttttttttatatatataaagtcagtgacgaggaactcccgagacgtgtaatgacaccacacttgttttctttgtttctttgttttatttaggcaagaagaggtgtgagtaattgaggaaaaactgacagatgcttttgctaataccaaaattgagcttacaattaggaactgagtatgtgtaacaggatacaggtgacagtgaagatagaagaaccacgatgaccacagactcaatgtgctctgtaacatcgcacagtttacccagcatgactttccttaggaggccccctcctcacgctagagtaaaagtcccagttaagtgaagcctaccagaagaactagtagaagaagctttgccgcttttgtgcctctcacaggcgcctaaagtcattgccatgggaggaagacgatttggggggggaggggggggggggcagggtaggtggggctttccctaatttatcttcatgtccagtgagcagtgttgcgtttttccttgtagcatttggaaatgatttactggaattacaaaacctatttttcctttaaatttcagctttggctctggctgctttttagaataatgcaagataaaaatcacacctgagggctgaaaacggagagggaatgggagacttgatatttaagcagcttgaatggtttttcttttctttatttttaaagaaatgcacttgcctatgatactgtctctccagtgaaatgattactcctccattactctattgatacaatattgtgcatgctagtgttgtatttctatacagtagcttgaaattgattaacttatactgtaggtgttatgtattcctatgacaaaaaaaattaagtcttcaaattttttaaaggttttttttttttaatttaatttttccttttgggggtaaagtttgctctaccaaatagtgattgtaacaaattgatctgttttggatgttgctatagtgacatgcagttatatattttgtttttaaaagggggggagcaaaagaaacaccagtgttagcttaatcttaatgtctggtgtttgtcatggtgaaattataactattacagtgttggagaacaacaaatatgttctctgaatgagcctttgtgctttttgtcatgttatgcagtgaactatttttaaggtctaatcagtgattatttttccagctccgtgtttctctaaggaattatttcacacacggaccatctttagcagtttcctcagtgatggaatatcatgaatgtgagtcattatgtagctgtcgtacattgagcaaataaacttacagatctga

SEQ ID NO: 174838 - DNA, 884 bp, Artificial Sequence
  derived and/or modified sequence
agccgcctcgcgcccggtcccgcggtcgcagctccagccgcctcctccgcgcagccgccgcctcagctgctcgctctgtgggtcggtcctctccggcacttgggctccagtcgcgccctccaagcccttcaggccgccccagtgtcctcctccttctccggccagacccagccccgcgaagatggtggaccgcgagcaactggtgcagaaagcccggctggccgagcaggcggagcgctacgacgacatggccgcggccatgaagaacgtgacagagctgaatgagccactgtcgaatgaggaacgaaaccttctgtctgtggcctacaagaacgttgtgggggcacgccgctcttcctggagggtcatcagtagcattgagcagaagacatctgcagacggcaatgagaagaagattgagatggtccgtgcgtaccgggagaagatagagaaggagttggaggctgaagtggccaccggagagaaaagggcgacggtggtggagtcctccgagaaggcctacagcgaagcccacgagatcagcaaagagcacatgcagcccacccaccccatccgattaggcctggctcttaactactccgtcttctactatgagatccagaacgccccagagcaagcgtgccacttggccaagaccgcgttcgacgacgccatcgccgagcttgacaccctcaacgaggactcctacaaggactccacgctcatcatgcagctcctccgcgacaacctcacgctctggacgagcgaccagcaggacgacgatggcggcgaaggcaacaattaaggccccaggggaactggcagcgcacgcggatgctactactgcagtctttatttttttcccatgagttgggggtcgggtg

SEQ ID NO: 174839 - DNA, 1362 bp, Artificial Sequence
  derived and/or modified sequence
agctccagccgcctcctccgcgcagccgccgcctcagctgctcgctctgtgggtcggtcctctccggcacttgggctccagtcgcgccctccaagcccttcaggccgccccagtgtcctcctccttctccggctggccgagcaggcggagcgctacgacgacatggccgcggccatgaagaacgtgacagagctgaatgagccactgtcgaatgaggaacgaaaccttctgtctgtggcctacaagaacgttgtgggggcacgccgctcttcctggagggtcatcagtagcattgagcagaagacatctgcagacggcaatgagaagaagattgagatggtccgtgcgtaccgggagaagatagagaaggagttggaggctgtgtgccaggatgtgctgagcctgctggataactacctgatcaagaattgcagcgagacccagtacgagagcaaagtgttctacctgaagatgaaaggggactactaccgctacctggctgaagtggccaccggagagaaaagggcgacggtggtggagtcctccgagaaggcctacagcgaagcccacgagatcagcaaagagcacatgcagcccacccaccccatccgattaggcctggctcttaactactccgtcttctactatgagatccagaacgccccagagcaagcgtgccacttggccaagaccgcgttcgacgacgccatcgccgagcttgacaccctcaacgaggactcctacaaggactccacgctcatcatgcagctcctccgcgacaacctcacgctctggacgagcgaccagcaggacgacgatggcggcgaaggcaacaattaaggccccaggggaactggcagcgcacgcggatgctactactgcagtctttatttttttcccatgagttgggggtcgggtgggggagggaaagggagggatgaccttcccagggagaaacccacgacctgtcctgtctttgatcgcctctttgacatttttgccaaaataccactagtggaaagtcaggctagctgtgctggtattggaatagcagcctcacactggcgtctggactgttctgtagattcatgcaagtggagctgtctgtctctaatttaacttattgctagataatagggttttcagatgaaaagaaaacttaaagaggaatggccctcattcagtaagttctgtggttccagtaaggatttttatgtacatacgctctcgtctctcgttttgggtactttctatctcatctgtctcggctctgcatgttttccagggtgtagcctacagacatggaacagtgtaaatcccagactgacagacttagaacctgaggtctcattcatccttatg

SEQ ID NO: 174840 - protein, 509 aa, Artificial Sequence
  derived and/or modified sequence
MEDIQTNAELKSTQEQSVPAESAAVLNDYSLTKSHEMENVDSGEGPANEDEDIGDDSMKVKDEYSERDENVLKSEPMGNAEEPEIPYSYSREYNEYENIKLERHVVSFDSSRPTSGKMNCDVCGLSCISFNVLMVHKRSHTGERPFQCNQCGASFTQKGNLLRHIKLHTGEKPFKCHLCNYACQRRDALTGHLRTHSVEKPYKCEFCGRSYKQRSSLEEHKERCRTFLQSTDPGDTASAEARHIKAEMGSERALVLDRLASNVAKRKSSMPQKFIGEKRHCFDVNYNSSYMYEKESELIQTRMMDQAINNAISYLGAEALRPLVQTPPAPTSEMVPVISSMYPIALTRAEMSNGAPQELEKKSIHLPEKSVPSERGLSPNNSGHDSTDTDSNHEERQNHIYQQNHMVLSRARNGMPLLKEVPRSYELLKPPPICPRDSVKVINKEGEVMDVYRCDHCRVLFLDYVMFTIHMGCHGFRDPFECNMCGYRSHDRYEFSSHIARGEHRALLK

SEQ ID NO: 174841 - DNA, 2437 bp, Artificial Sequence
  derived and/or modified sequence
gcaggagcacgtggagaggccgagtagccacagcggcagctccagcccggcccggcagcgacatggaagatatacaaacaaatgcggaactgaaaagcactcaggagcagtctgtgcccgcagaaagtgcagcggttttgaatgactacagtttaaccaaatctcatgaaatggaaaatgtggacagtggagaaggcccagccaatgaagatgaagacataggagatgattcaatgaaagtgaaagatgaatacagtgaaagagatgagaatgttttaaagtcagaacccatgggaaatgcagaagagcctgaaatcccttacagctattcaagagaatataatgaatatgaaaacattaagttggagagacatgttgtctcattcgatagtagcaggccaaccagtggaaagatgaactgcgatgtgtgtggattatcctgcatcagcttcaatgtcttaatggttcataagcgaagccatactggtgaacgcccattccagtgtaatcagtgtggggcatcttttactcagaaaggtaacctcctccgccacattaaactgcacacaggggaaaaaccttttaagtgtcacctctgcaactatgcatgccaaagaagagatgcgctcacggggcatcttaggacacattctgtggagaaaccctacaaatgtgagttttgtggaaggagttacaagcagagaagttcccttgaggagcacaaggagcgctgccgtacatttcttcagagcactgacccaggggacactgcaagtgcggaggcaagacacatcaaagcagagatgggaagtgaaagagctctcgtactggacagattagcaagcaatgtggcaaaacgaaaaagctcaatgcctcagaaattcattggtgagaagcgccactgctttgatgtcaactataattcaagttacatgtatgagaaagagagtgagctcatacagacccgcatgatggaccaagccatcaataacgccatcagctatcttggcgccgaagccctgcgccccttggtccagacaccgcctgctcccacctcggagatggttccagttatcagcagcatgtatcccatagccctcacccgggctgagatgtcaaacggtgcccctcaagagctggaaaagaaaagcatccaccttccagagaagagcgtgccttctgagagaggcctctctcccaacaatagtggccacgactccacggacactgacagcaaccatgaagaacgccagaatcacatctatcagcaaaatcacatggtcctgtctcgggcccgcaatgggatgccacttctgaaggaggttccccgctcttacgaactcctcaagcccccgcccatctgcccaagagactccgtcaaagtgatcaacaaggaaggggaggtgatggatgtgtatcggtgtgaccactgccgcgtcctcttcctggactatgtgatgttcacgattcacatgggctgccacggcttccgtgaccctttcgagtgtaacatgtgtggatatcgaagccatgatcggtatgagttctcgtctcacatagccagaggagaacacagagccctgctgaagtgaatatctggtctcagggattgctcctatgtattcagcatcgtttctaaaaaccaatgacctcgcctaacagattgctctcaaaacatactcagttccaaacttcttttcataccatttttagctgtgttcacaggggtagccagggaaacactgtcttccttcagaaattattcgcaggtctagcatattattacttttgtgaaacctttgttttcccatcagggacttgaattttatggaatttaaaagccaaaaaggtatttggtcattatcttctacagcagtggaatgagtggtcccggagatgtgctatatgaaacattctttctgagatatatcaaccacacgtggaaaagcctttcagtcatacatgcaaatccacaaagaggaagagctgaccagctgaccttgctgggaagcctcacccttctgcccttcacaggctgaagggttaagatctaatctccctaatctaaatgacagtctaagagtaagtaaaagaacagccataaaataagtatctgttacgagtaactgaagaccccattctccaagcatcagatccatttcctatcacaacatttttaaaaaatgtcatctgatggcacttctgcttctgtcctttaccttcccatctccagtgaaaagctgagctgctttgggctaaaccagttgtctatagaagaaaatctatgccagaagaactcatggttttaaatatagaccatcatcgaaactccagaaatttatccactgtggatgatgacatcgctttcctttggtcaaggttggcagagcaagggtataaagggggaaattgtttggcagcaccaacagaaaacaaa

SEQ ID NO: 174842 - DNA, 1530 bp, Artificial Sequence
  derived and/or modified sequence
atggaggacatccagaccaacgccgagctgaagagcacccaggagcagagcgtgcccgccgagagcgccgccgtgctgaacgactacagcctgaccaagagccacgagatggagaacgtggacagcggcgagggccccgccaacgaggacgaggacatcggcgacgacagcatgaaggtgaaggacgagtacagcgagagagacgagaacgtgctgaagagcgagcccatgggcaacgccgaggagcccgagatcccctacagctacagcagagagtacaacgagtacgagaacatcaagctggagagacacgtggtgagcttcgacagcagcagacccaccagcggcaagatgaactgcgacgtgtgcggcctgagctgcatcagcttcaacgtgctgatggtgcacaagagaagccacaccggcgagagacccttccagtgcaaccagtgcggcgccagcttcacccagaagggcaacctgctgagacacatcaagctgcacaccggcgagaagcccttcaagtgccacctgtgcaactacgcctgccagagaagagacgccctgaccggccacctgagaacccacagcgtggagaagccctacaagtgcgagttctgcggcagaagctacaagcagagaagcagcctggaggagcacaaggagagatgcagaaccttcctgcagagcaccgaccccggcgacaccgccagcgccgaggccagacacatcaaggccgagatgggcagcgagagagccctggtgctggacagactggccagcaacgtggccaagagaaagagcagcatgccccagaagttcatcggcgagaagagacactgcttcgacgtgaactacaacagcagctacatgtacgagaaggagagcgagctgatccagaccagaatgatggaccaggccatcaacaacgccatcagctacctgggcgccgaggccctgagacccctggtgcagaccccccccgcccccaccagcgagatggtgcccgtgatcagcagcatgtaccccatcgccctgaccagagccgagatgagcaacggcgccccccaggagctggagaagaagagcatccacctgcccgagaagagcgtgcccagcgagagaggcctgagccccaacaacagcggccacgacagcaccgacaccgacagcaaccacgaggagagacagaaccacatctaccagcagaaccacatggtgctgagcagagccagaaacggcatgcccctgctgaaggaggtgcccagaagctacgagctgctgaagcccccccccatctgccccagagacagcgtgaaggtgatcaacaaggagggcgaggtgatggacgtgtacagatgcgaccactgcagagtgctgttcctggactacgtgatgttcaccatccacatgggctgccacggcttcagagaccccttcgagtgcaacatgtgcggctacagaagccacgacagatacgagttcagcagccacatcgccagaggcgagcacagagccctgctgaagtag

SEQ ID NO: 174843 - DNA, 1530 bp, Artificial Sequence
  derived and/or modified sequence
atggaggatatacagactaacgctgaactgaagtccacacaggaacagtccgtccctgcggagtccgcagccgtgctgaatgattatagcctgacaaagagccacgaaatggaaaacgtcgattccggcgagggccccgcaaatgaggatgaggacatcggcgacgatagtatgaaagtgaaagatgagtatagcgagcgcgatgagaacgtgttgaagtccgaacctatggggaacgccgaggaaccagaaataccatactcatatagcagggagtacaatgaatacgagaatatcaagttagagaggcacgtagtctcatttgactcaagcagaccaacctccggcaaaatgaactgcgatgtctgcggcttgtcctgtatttcattcaatgttctgatggtccataagagatcacacaccggggaaagacctttccaatgtaaccaatgtggggcctcgttcacacagaaaggcaacctccttcgccacatcaaactgcacaccggggagaagccattcaaatgccacctatgcaactatgcctgtcagcggagggatgctctgacgggccatctacggacccacagcgtcgaaaaaccctataagtgcgagttctgtggtaggtcttacaagcagaggtccagcctggaagagcataaggagcggtgtcggactttcctccagtccacagacccaggtgacactgcatcggctgaggcgaggcacattaaagcagagatgggctctgagcgagccttagtactcgatagattagcctcgaacgtggcaaagcggaagtccagtatgccacagaagttcatcggagagaaacgccattgttttgacgtgaattacaatagctcatacatgtatgaaaaggagagcgagctgattcagacccggatgatggaccaggccatcaataatgcaatcagttaccttggtgctgaggcccttcgtcccctggtgcaaactcctcccgcacccacctccgaaatggtccccgtgatttcctccatgtatcccattgccctcacacgagcagagatgtcaaacggtgcgccccaagaactcgaaaagaaatcaatccacctgccagagaagtccgttcccagtgaacgtgggctttcgcccaacaactcgggccacgactctactgacacagacagcaaccatgaagagagacagaaccatatttatcagcagaaccatatggtgctgtccagagctaggaacgggatgcctttactaaaagaggtaccacgctcctatgagcttcttaagccacccccaatctgcccacgggacagcgtcaaggtgatcaataaggagggcgaggtgatggacgtataccgatgcgaccattgtagggtcctgtttctagattatgtgatgtttaccatccatatgggatgtcacggtttcagagatccattcgaatgtaacatgtgcggataccgctcccacgacagatatgagtttagcagtcacatagcccggggggaacaccgggcccttctgaagtag

SEQ ID NO: 174844 - DNA, 1530 bp, Artificial Sequence
  derived and/or modified sequence
atggaggacatccagaccaatgctgagctgaagagcacccaggagcagagcgtgcctgctgagagcgctgctgtgctgaatgactacagcctgaccaagagccatgagatggagaatgtggacagcggggagggccctgccaatgaagatgaagatattggagatgacagcatgaaggtgaaggatgagtacagcgagagagatgaaaatgtgctgaagtctgagcccatgggaaatgctgaggagcctgagatcccctacagctacagccgggagtacaatgaatatgagaacatcaagctggagcggcacgtggtgtcctttgacagcagccggcccaccagcggcaagatgaactgtgatgtgtgtggcctgagctgcatctccttcaacgtgctgatggtgcacaagaggagccacactggagagcggcccttccagtgcaaccagtgtggggccagcttcacccagaagggcaacctgctgcggcacatcaagctgcacactggagagaagcccttcaagtgccacctgtgcaactatgcctgccagaggagagatgccctgaccggccacctgcggacccacagcgtggagaagccctacaagtgtgagttctgtggccgcagctacaagcagaggagcagcctggaggagcacaaggagcgctgcaggaccttcctgcagagcacagatcctggggacacagccagcgctgaggcccggcacatcaaggccgagatgggcagcgagcgggccctggtgctggaccggctggccagcaatgtggccaagaggaagagctccatgccccagaagttcatcggggagaagaggcactgctttgatgtgaactacaacagcagctacatgtatgagaaggagagcgagctgatccagaccaggatgatggaccaggccatcaacaatgccatctcctacctgggcgctgaggccctgcggcccctggtgcagaccccaccagcccccaccagcgagatggtgcctgtgatcagctccatgtaccccatcgccctgaccagggctgagatgagcaatggagccccccaggagctggagaagaagagcatccacctgcctgagaagtctgtgcccagcgagcggggcctgagccccaacaacagcggccatgacagcacagacacagacagcaaccacgaggagcggcagaaccacatctaccagcagaaccacatggtgctgagccgggccagaaatggcatgcccctgctgaaggaggtgcccaggagctatgagctgctgaagcccccacccatctgcccccgggacagcgtgaaggtgatcaacaaggagggggaggtgatggatgtgtaccgctgtgaccactgccgggtgctcttcctggactatgtgatgttcaccatccacatgggctgccacggcttccgggacccctttgagtgcaacatgtgtggctaccgcagccatgacagatatgagttcagcagccacatcgcccggggggagcaccgggccctgctgaagtag

SEQ ID NO: 174845 - DNA, 9667 bp, Artificial Sequence
  derived and/or modified sequence
gcaggagcacgtggagaggccgagtagccacagcggcagctccagcccggcccggcagcgacatggaagatatacaaacaaatgcggaactgaaaagcactcaggagcagtctgtgcccgcagaaagtgcagcggttttgaatgactacagtttaaccaaatctcatgaaatggaaaatgtggacagtggagaaggcccagccaatgaagatgaagacataggagatgattcaatgaaagtgaaagatgaatacagtgaaagagatgagaatgttttaaagtcagaacccatgggaaatgcagaagagcctgaaatcccttacagctattcaagagaatataatgaatatgaaaacattaagttggagagacatgttgtctcattcgatagtagcaggccaaccagtggaaagatgaactgcgatgtgtgtggattatcctgcatcagcttcaatgtcttaatggttcataagcgaagccatactggtgaacgcccattccagtgtaatcagtgtggggcatcttttactcagaaaggtaacctcctccgccacattaaactgcacacaggggaaaaaccttttaagtgtcacctctgcaactatgcatgccaaagaagagatgcgctcacggggcatcttaggacacattctgtggagaaaccctacaaatgtgagttttgtggaaggagttacaagcagagaagttcccttgaggagcacaaggagcgctgccgtacatttcttcagagcactgacccaggggacactgcaagtgcggaggcaagacacatcaaagcagagatgggaagtgaaagagctctcgtactggacagattagcaagcaatgtggcaaaacgaaaaagctcaatgcctcagaaattcattggtgagaagcgccactgctttgatgtcaactataattcaagttacatgtatgagaaagagagtgagctcatacagacccgcatgatggaccaagccatcaataacgccatcagctatcttggcgccgaagccctgcgccccttggtccagacaccgcctgctcccacctcggagatggttccagttatcagcagcatgtatcccatagccctcacccgggctgagatgtcaaacggtgcccctcaagagctggaaaagaaaagcatccaccttccagagaagagcgtgccttctgagagaggcctctctcccaacaatagtggccacgactccacggacactgacagcaaccatgaagaacgccagaatcacatctatcagcaaaatcacatggtcctgtctcgggcccgcaatgggatgccacttctgaaggaggttccccgctcttacgaactcctcaagcccccgcccatctgcccaagagactccgtcaaagtgatcaacaaggaaggggaggtgatggatgtgtatcggtgtgaccactgccgcgtcctcttcctggactatgtgatgttcacgattcacatgggctgccacggcttccgtgaccctttcgagtgtaacatgtgtggatatcgaagccatgatcggtatgagttctcgtctcacatagccagaggagaacacagagccctgctgaagtgaatatctggtctcagggattgctcctatgtattcagcatcgtttctaaaaaccaatgacctcgcctaacagattgctctcaaaacatactcagttccaaacttcttttcataccatttttagctgtgttcacaggggtagccagggaaacactgtcttccttcagaaattattcgcaggtctagcatattattacttttgtgaaacctttgttttcccatcagggacttgaattttatggaatttaaaagccaaaaaggtatttggtcattatcttctacagcagtggaatgagtggtcccggagatgtgctatatgaaacattctttctgagatatatcaaccacacgtggaaaagcctttcagtcatacatgcaaatccacaaagaggaagagctgaccagctgaccttgctgggaagcctcacccttctgcccttcacaggctgaagggttaagatctaatctccctaatctaaatgacagtctaagagtaagtaaaagaacagccataaaataagtatctgttacgagtaactgaagaccccattctccaagcatcagatccatttcctatcacaacatttttaaaaaatgtcatctgatggcacttctgcttctgtcctttaccttcccatctccagtgaaaagctgagctgctttgggctaaaccagttgtctatagaagaaaatctatgccagaagaactcatggttttaaatatagaccatcatcgaaactccagaaatttatccactgtggatgatgacatcgctttcctttggtcaaggttggcagagcaagggtataaagggggaaattgtttggcagcaccaacagaaaacaaacaaacaaaaaacagctacctaaaacttcttgaaagagttcatggagaattggtgatacagacccaaagcaaatttgccaatgatattttccacaaaaaaagtccaaaaagtatggctcagcctccccctccccacaggagaggaattggagatagatggcatgtgtgtttagatcggagttgagctccggaatggggtgaggagggacacctctattgagaggttctccttgatcaggcaggcttcggccctttttttcccatttaaatggaactgctgtattccatgaaaattcctgaaagtctgatcacggttctgcagatgtataagtcatccttgtcactcataatatgtacatactatcaggaggagtgctgttatcatggtaaaattagcactggaataggaggtcacaaaatgctggctaattagctatgtgactttgagaaatcgtttaactttttttttttttttttttttgagacaggatctcactctgttgcccaggctggagtgcagtggtgcaatcatggctcagtgcagcctcgacctccccaggctcaggtgatcctcccacctcagcctcttgagtactgggacaacaagtgcacaccaccatgtctggctacattttgttctttttgtagagataggggtctcactatgttgcccatgctggtcttgaactcctgggctcaagcaatcagcccgcctcagcctcctaaagtgctgggattacaggtgtgagccaccacacccagccttatttaactcttaaaactcagtttccggccaggctcggtggctcacacctgtaatcccaacactttgggaagccgaggcaggcgcatcatttgaggtcaggagttcgagaccagcctgacccacatggtgaaaccctgtctctactaaaaatacaaaaattagctgggcagtagtggcacatgcctgtaatcccagctactccggaggctgaggcagaaaaatcgcttaagcctgggaggttgaggttgcggtgagtggagatcacactactgcactccagtctgggcgacagagtgagaccctgtctcaaacaaaacaaaacaaaaacaaacaaacaaaaacaaaaaaaactcagtttcctcatccataaaataggaattagatttcaatgttctcttaggtcccttctagctttaattcatatgtgattatgcagtaaccacaaggtattttttaaacctcctaatgtatggatattaagcagaagagtatttatatgaatacatgtttcacattcctttggtatgaaaatggtgtgttaagtttttcctttaaccactgagttgtgaatgtgaagaaggtggtggagaggaacaaaaaacagaaaggtattttgatcttgccacaaagcatacacacaaattggcacatgcagctgtttgccaaagccttctttttttttttactttttaagaaattatgttagggaaaataaattctgcttccagggacaacttcatggagcctatttacaaattaagagtcagcttaatttgtaacatttctaccagagccaagaatcccaaattcctggtagattagtgttttatttctaaggggcttatgcattcggctccaactcaactcgtctatgtgctgccagtaattaaaatgttccacctcagactgcacaaatggcttatccttctttgtggcatggcgtctgtctcaggaaaaaaggttttatgaaattccatggcaacagtcccaacatgtttgagacttcagctaaaggaatggatgtattttggtgtgtagtcttcagtatatcactgtatttccgtaatactagactccaagctatgccagattgcttattccctttgtgaaagaggagttgctcattacgttcttgaaatatcgcacatcctgttggttcttcaagggacaagagaaagagaatttggaagcagggattagtagaagagaaaacgagggaaaggaagcctttccaccagattagtgttcaagtctttgcagaggagaccaactttttttgttttcttttgttttgagacagtctctcgctctgttgcccaggctggagtgcagtggcgcgatctcggctcacggcaacctccgcctcccgggttcaagcaattctcctgcctcagcctcccaagtagctgggattacaggtgctcaccaccaagcccggctaatttttgtatttttagtagagacaaggtttcaccatgttggccaggccagtctcaaactcctgacctcaggtgatctgcccgccttggcctcccacagtgctgggattacaggcatgagctaccgcacccagcctgagaccaccttttgcatctcaagattgtgaaaccaaggcccattccaccagcctggggactctttttatagatatgatcctcctttttcctgtgactaatgaatttgctgcatgatttctattcttctgaggttagttttctgagtaaggtgaccactcacaaaggcactttctttgtggcattctgagcctagattggggcccatcaattccagaaaaaatttatgtgtggaaactctgcatccttaagtcttgaagttgaaccagatatgcagtggttaccatcacacagataaacgctgccttctgtacataccccttatgctgtactaattaacaaaccccttgccagggctggggaggtgagggtgaaggagaatcttagcagaagggcagagtcaggacttgcatctgccactgctgggcactgaagccctggagcagcttcagatagtacctgtactttctcatgcagactccctctgaacaagagccttgtaggcccctctccttcatttcccaccagcctcttatcaggcgggctttccaccatacacccaggaggccacggtctgaggaacaaccaaacccatgcaaagggccgggcgcgatagctcacgcctgtaatgccagcactttgggaggctggggcaggcagatcacctgaggttgggagttcgagacctgcctgaccaacatggagaaacccccatctctactaaaaatacaaaattagccgggcgtgatggcacatgcctgtaatcccagctactcaggaggctgaggcaggagaatcgcttgaacccgggaggcggaggttgcggtgagccgagatggcaccactgcactccagcctcggcaacaagagcgaaactctgtctaaaacaaaaacaaacaaacaaacaaaaaaacccaggcaaagtttccttgcagccaaggtgacagaactgggctgagggtggaaaagaaacagaaccagtgctccaggtgttttttaattttttaatttatttttattttttttgtatatgtatatatatgtatgtatattttagaggaccagggtctcactatgttgcctaggccagactcaaactcctgtgctcaagcaatcctgcctcagcctcccaagtagctgggattacaggcatgcacaaacaatgcccagctctccaaatgttttctgtcactacctgaagtgttgcatcggtacttcctacggaaagaaaactaaatagaagtgtctctcccgtgagcccccaccactaccaccagaaaaaaaaaagagagaaaatgaactcatcagtctttagtttcctcaagttattctcccaaaaagacattcgccttggcacagataagccagctaatcttatgctttatgacccactgtgagctgttcctgacacagcttctgactttgtcagtgacaaaatttctcaccttttaaatgcagtgcttaacattttgttaggcccatactcaaaatcggccagatataaaatgacctcagattttgatctcctaggctcaaacaatcctcctacctcagcctcccaagtagctgggactataggcacaccaccatgcacagctaattttttttgtatttttctgcagagatggcgtttcgccatactgcccaggctagtctcaaaatcctgggctcaagcaatctgcccacctcagcctcccaaagtgctggaactacaggcaagagccactgcgcccagccacaacctcagatttctttggcaaacagaaatgtttaaaaacacaaaattttgctcaggtgaaacactgtgttactatcaaatctcacatccacataaagtttttcttttcggctttgtttcgtgaggaacagacagaacaaagtttttccaggtagcatctgtatcactattattctcctatttcctgtaccacccccacctccccaagccctactgaatgtgaggtttagaatgttttaaggagggtcaggtgcggtggctcacgcctgtaatcccagcactttgggaggccaaggcgggcggatcacctgagtttgggagttcgagaccagcctgaccaacatggagaaaccctgtctctactaaaaatacaaaattagccaggcgtggtggcacatgcctgtaatcccagctacttaggaggctgaggcaggagaatcgcttgaacccaggaggaggaggttgtggtgagccgagatcgtgccattgcactccagcctgggtgacagagtgagactccatctcgaaaaaaaaaatacaaaaattagctgggtgtggtggtgcacacctgtaatcccagctactcgggaggctgacgcaggagaattgcttgaacctgggaggtggaggttgcagtgagccgagatcgcgccattgcaatccagcctggacaacagagtgagactccatctcaaaaaaaaaaaaaaaaagaatgttttaaggaaaaaaatagtactgttacatataatcccaggtgataagaccacaatggaaatgtttaagtcctcactttaaagagtaccccactgagaagaggtatgttggactctagcagagatttggaaactctgggacactcaagatgtgaaagagcctggctatctgaggactcaaagagtcagcatcgggacttgtgagctcaagaagagaaaagggagtggtgaaactttgtcctaaaagttagcaccaggaacagaagaaaaaaacccgatatatagtgatacctcatcttttagagaatgggaagctatttttgtgttcacacagaaagtatagttcaaaaaacctctatatccagagttcagacaaggagaatgatttgagatataagtgccgatgaaggaggtcaattttgatctgaaaccagcagctggacctgggccacctcaggaaaaggactctgttctccaaggcagcacgactgaatggttctgagaataagccagggttcaggactcctgaccctttaggaccatggactcagaagagcctgaaggacaattgtgggctttaaacttctgagagcttgtaaagtaacacaagactgtgcctctcccttgccccagctgtagatagtctttgccccaccattgttatgaagatacacagggttttgcagtttgaataaattggatacaagtttcctctttttttttttctttttgagacaaagtctcgctctgtttccccaggctgagtgcagtggcacaatcaaggcttacttgccgcctcaacctcctgggctcaagcaacgagccatcctcccgtcttagcctcccaactagctgagactacaggcgtgggtcaccacacccagctaatttttgtactttttgtagagacagggtctcaccatgttgcccaggctggtcctgaactcctgggctcaagtaatctgcccacctcagcctcccaaagtgttggggttacaggcgtgaggcaccgcggctggcctgagtttcttcttaatactgtatcacaattgtgggctgtcttatgtgttgatatcgattgagctatttgaaataggaatgttaatgggtgtattaaatttttgtaaggatataacaatatctaccttccaaggatgttgtgaggttttccatgattttgtatatgagctaatgttacctttgaggggtggtgtgcattatgttggatgattgtaaattttcagtggaaaatgtaccgtgtcctaaatttaaagacatgaaaaatatcccaagatcatactagatcataatagcaattcctttacaaatgaattatggaggtaactgatctctaacagtttccttcatgttgttttaatgcacaagggcagaggatctgctgacccttggaaccagcgtgagctaaccacgtgctatagacacttcatggtgtcgcacccagggaagtcaaagcgctttgctccctcactgtctgtgagtcctcagccattagtaccccaccccccgctgctccaaaacttgagttatttcaaatgtttctcactgttcatctctccactgaccccactccagaaagcctggagagagtcccaagatgccacccaccttccccaatccctcgccacagatctgtgtctatctcacactctgtaagtgccgctttgcttcttcctctcttgaaaagactgagaacacacattttaacatgttaggaaaatggggcagcctaaaaaatgactgatcccaccgccagtgactcatgtatactccaggctagcagacaaggccctttttggtgggcctgcttctgtgggttcacagaaaccaaattactgtgggttgcaaagaattagcaggtcatttacaaagcagacatcccttcacccagactgtggttttgcatgctcaggttctcagtctatgagctttggtgcaggatcattttggctactggaaaaaccatagcttattttaaatttctggttgccaaagccaccacacgtgtggtctgtggatgaccattgtctgcagaatgacgaggaaggaacagaatgtggtttggggctcagggtggccttcccactgggagggaaggcgggagggagcccttgccctgggttttgacacagcctgtgctcacagcctctcctctcatctgcatttctcagaaatgccctccctgcccagtggtgactttccctcgtcactcctatggagttctacctggagcccagccatgtgtggaactgtgaagtttactcctctgtaaagatggtttaaagaaagtcagcttctgaaatgtaacaatgctaacccttgctggaaccctgtaagaaatagccctgctgatagttttctaggtttatcatgtttgatttttacactgaaaaataaaaaaatcctggtatgtttgaaatta

SEQ ID NO: 174846 - DNA, 1530 bp, Artificial Sequence
  derived and/or modified sequence
atggaggacatccagaccaacgccgagctgaagagcacccaggagcagtctgttcccgctgaaagcgcagccgtgctgaacgattattctctcaccaaatctcacgagatggagaacgttgattctggtgagggccctgctaatgaggatgaggacattggggatgactctatgaaggtcaaagacgagtacagcgagcgcgatgagaatgtgctgaagagcgaacccatgggtaacgccgaggaacctgagatcccatatagctacagcagggagtataatgaatatgagaatatcaagctggagcgccacgttgtctcgtttgacagtagcaggccaactagtggaaaaatgaactgcgacgtgtgcggactgagttgtatctccttcaacgtcctgatggtgcacaaacgtagtcacaccggcgagaggcccttccagtgcaaccagtgcggagcgagtttcacccagaagggcaatctgctccgccatatcaaactgcacaccggtgaaaagccattcaagtgtcacctctgcaattatgcctgccagcgacgcgatgctttgactggccaccttcggacgcacagtgtggagaaaccctataagtgcgaattctgcgggagatcatataaacaaagatcgtcactcgaggaacataaagaacgctgcaggaccttcctacaatcaaccgatcccggagacactgcctcggccgaggccaggcacatcaaagcggagatgggaagcgaacgagctttagttctggataggctggcatcgaacgtcgccaaacgcaagagtagcatgcctcagaagtttatcggggaaaagcgccattgcttcgatgtcaattacaacagtagttacatgtatgaaaaggaatcagagctcattcaaactcgtatgatggatcaagcgatcaataatgccatctcctatctgggggctgaagcccttagacctctggtgcaaactccccctgctcccacgtccgagatggtcccggtcatttcctcaatgtatccaatcgcactgactagggccgagatgtcgaacggcgctccacaggagctggaaaaaaagtccatccacttgccagagaagtctgtcccctctgagaggggtctatcaccaaacaacagtggccacgatagtaccgacacggactccaatcacgaggaacggcagaaccatatttaccagcagaaccacatggtgttaagtcgggcccgtaatggcatgcctctgctcaaagaggtgcctcgatcatatgaacttctcaagccacccccgatttgccccagagacagcgtaaaggttatcaataaagaaggagaagtgatggacgtttatcggtgtgatcattgcagagtgcttttcctcgattatgtgatgttcaccattcacatgggttgccacggctttagagaccctttcgagtgcaacatgtgcggttatagaagccacgatcgttacgagttttcctcccacatagctcgaggagagcacagagcgttattaaagtag

SEQ ID NO: 174847 - DNA, 1530 bp, Artificial Sequence
  derived and/or modified sequence
atggaagacatccagactaatgccgagttaaagagcacccaagagcaaagtgtgcccgcagagtctgctgccgtccttaatgactactcattgacaaagagccatgaaatggagaacgtggatagtggggagggtcccgctaatgaagacgaggatataggcgacgattccatgaaggtcaaagatgaatactccgagagggatgaaaacgtgcttaaaagcgaacctatgggcaacgctgaagaaccagagattccttactcatattctagggagtataatgagtacgagaacatcaaattggaaagacatgtggtcagctttgatagctctcgaccaacctcaggaaagatgaactgtgatgtgtgtggcctgtcctgcattagttttaatgtactgatggtccacaagcgaagccacacaggggaacgcccttttcagtgtaaccagtgtggtgctagttttacgcagaaggggaacctccttcggcatattaaattacacaccggagaaaaacccttcaagtgccacctctgcaactatgcatgtcagcgtcgggacgccttgactggacatctccgaacacactcagttgaaaagccatacaagtgtgagttttgtggacgttcgtacaagcagcgaagctctctggaggagcacaaagagagatgtcgtacttttctccagtccacagaccctggcgatactgcaagcgccgaggcccgacacattaaggctgagatggggtccgagcgggcactggtcctggataggcttgccagcaatgtggcaaaaaggaagtccagcatgccacagaagttcataggggagaagaggcactgttttgacgttaactacaactcaagttatatgtacgaaaaggaatccgaactgatccagaccaggatgatggatcaggctattaacaatgctatctcctaccttggcgctgaagctctcagaccactggtgcagacacctcccgcacccaccagcgagatggtgccggttatttcatcaatgtatcccatagcgctgacaagagccgaaatgtccaatggcgcaccccaagaactggaaaaaaaatccatacacctgcctgaaaagagcgtgccatcagaacggggtctgtcacctaacaattctggccatgactccactgataccgactcaaatcacgaggagcggcaaaaccacatttatcagcaaaatcacatggtgttaagtcgggcacgtaacggaatgcctttgctgaaggaagtgccccgtagctacgagctcctcaaacccccacccatctgtcctcgcgactcagtgaaggtcattaataaagagggggaggtgatggacgtgtacaggtgtgatcattgtcgggtcttattccttgattatgtcatgtttacaattcatatggggtgccacgggttcagagatcctttcgaatgcaacatgtgcgggtacagaagtcacgacagatacgagttttctagtcacatcgctaggggcgagcaccgtgcgctcttaaagtag

SEQ ID NO: 174848 - DNA, 393 bp, Artificial Sequence
  derived and/or modified sequence
atggagggcctggtgttcagcagactgagccccgagtactacgacctggccagagcccacctgagagacgaggagaagagctgcccctgcctggcccaggagggcccccagggcgacctgctgaccaagacccaggagctgggcagagactacagaacctgcctgaccatcgtgcagaagctgaagaagatggtggacaagcccacccagagaagcgtgagcaacgccgccaccagagtgtgcagaaccggcagaagcagatggagagacgtgtgcagaaacttcatgagaagataccagagcagagtgacccagggcctggtggccggcgagaccgcccagcagatctgcgaggacctgagactgtgcatccccagcaccggccccctgtag

SEQ ID NO: 174849 - DNA, 393 bp, Artificial Sequence
  derived and/or modified sequence
atggaaggcctagtattcagccgcttgagtccagagtattacgatctcgcgcgagcccatctccgtgacgaagagaaatcttgtccatgtctggcacaggagggaccacagggagaccttttaaccaaaactcaggaactgggacgggattatcgaacatgcctgaccattgtgcagaagctaaagaagatggtcgataagcccacgcagcggtccgtttccaatgcagcgacccgggtgtgtcggacaggcagatctcggtggagggacgtatgcaggaacttcatgcggaggtaccagagtagagttacccagggactcgtggctggggagaccgcccagcagatttgtgaggatctgcgactgtgtatcccgtcaactggcccattatag

SEQ ID NO: 174850 - DNA, 393 bp, Artificial Sequence
  derived and/or modified sequence
atggagggcctggtgttcagccggctgagccctgagtactatgacctggcccgggcccacctgagagatgaggagaagagctgcccctgcctggcccaggagggcccccagggcgacctgctgaccaagacccaggagctgggccgggactaccgcacctgcctgaccatcgtgcagaagctgaagaagatggtggacaagcccacccagaggtctgtgtccaatgctgccaccagggtgtgcaggacaggccgcagccgctggagagatgtgtgcaggaacttcatgaggcgctaccagagccgggtgacccagggcctggtggccggggagacagcccagcagatctgtgaggacctgcggctgtgcatccccagcacaggccccctgtag

SEQ ID NO: 174851 - DNA, 393 bp, Artificial Sequence
  derived and/or modified sequence
atggagggcctggtgttcagccggctgagccccgagtactacgacctggcaagggcacatcttagggacgaggagaaatcctgtccctgtttggcccaggagggccctcaaggagacctcctgactaagacacaggagttgggacgggactacagaacttgcctaactattgtccaaaagctgaagaaaatggtggacaagcctacgcaaaggtctgtgagcaacgctgctaccagggtgtgtcgcaccgggaggtctaggtggcgggacgtctgccggaactttatgagaaggtaccagtcccgggtcactcagggcctggttgctggtgaaacagctcaacaaatctgcgaagaccttcgtctctgcattcccagtacaggccctctttag

SEQ ID NO: 174852 - DNA, 393 bp, Artificial Sequence
  derived and/or modified sequence
atggagggattggtgttcagccgactgtctccggaatactacgacttggctagggcacaccttcgtgacgaggagaaaagttgtccctgcctcgcacaggagggacctcagggtgaccttcttacaaaaacccaggaattgggaagagattaccggacatgtctgactatcgttcaaaagctcaaaaagatggtcgacaaaccaacacaaaggtccgttagtaacgcagctacacgcgtatgcagaaccgggcgttcaagatggagagatgtttgtcggaacttcatgcgcaggtatcaaagcagggtcacccagggattggttgcaggagagacagctcagcaaatttgcgaagatcttcgactgtgcatcccctcaacagggccactatag

SEQ ID NO: 174853 - DNA, 225 bp, Artificial Sequence
  derived and/or modified sequence
atgggccgagattacaggacctgcctgacaattgtgcagaagttaaagaaaatggtggataagcctactcagcgcagcgtctcaaatgccgccaccagggtctgcagaactgggagatcaaggtggcgagatgtgtgccgtaactttatgcgtcgatatcagtctcgagtgactcagggcctcgttgccggggagactgcccaacagatatgtgaagatctaaga

SEQ ID NO: 174854 - DNA, 225 bp, Artificial Sequence
  derived and/or modified sequence
atgggtcgggattaccgcacctgcctgaccatcgtgcaaaagctgaaaaagatggtggacaagcctacccagcgcagcgtgtcaaacgccgcgacccgcgtgtgtaggacgggacgatcgagatggagagatgtgtgtagaaacttcatgaggcggtaccagtcaagagtgactcagggattggtcgcaggtgagactgcgcaacagatctgcgaagatctccga

SEQ ID NO: 174855 - DNA, 225 bp, Artificial Sequence
  derived and/or modified sequence
atgggacgggactacagaacgtgcctgaccatcgtgcagaagctcaaaaagatggttgataagccgacgcaaaggagcgtgtcaaatgccgcgaccagagtgtgtcgcaccggtcgttcgcgatggagggatgtctgcagaaacttcatgcgccgataccaatcccgggtgactcagggactggtagcgggcgaaactgcacagcagatctgcgaggaccttaga

SEQ ID NO: 174856 - DNA, 225 bp, Artificial Sequence
  derived and/or modified sequence
atggggcgcgactaccgcacttgtctcaccatcgtgcagaaactcaagaaaatggtggacaagccgacccagcggtcggtgtcaaacgccgccacccgcgtctgtcgcactggtcgctcccgctggcgcgacgtgtgccgtaatttcatgcggagataccagtcgagggtcactcaaggactggtggcgggtgagactgcgcagcagatctgcgaggatttgcgc

SEQ ID NO: 174857 - DNA, 225 bp, Artificial Sequence
  derived and/or modified sequence
atggggcgcgactaccggacctgcttgactattgtgcagaagttgaagaaaatggtggataagcctacccaacgctccgtctccaacgcagccactcgcgtgtgtcgcaccggacgttcaagatggcgggatgtctgtaggaactttatgcggcgataccagtccagagtgacccaaggtcttgtggcaggagagactgcccagcagatttgcgaggatctcagg

SEQ ID NO: 174858 - DNA, 225 bp, Artificial Sequence
  derived and/or modified sequence
atgggccgggattataggacatgtctcaccatcgtgcagaaactgaagaaaatggttgacaagcccacgcagcgcagtgtatcaaacgccgcaacaagagtctgtcggacaggacgaagtagatggagggatgtgtgccggaacttcatgcgtcgataccaatctagagtgacccaggggttggtggccggcgaaacggcccagcagatttgcgaggacttgaga

SEQ ID NO: 174859 - DNA, 225 bp, Artificial Sequence
  derived and/or modified sequence
atggggcgggattaccggacctgtctgaccatcgtgcaaaaacttaagaagatggtggataagcctacgcaaagatcagtttccaatgcggcaacccgcgtgtgtcggactggcagaagcagatggagagatgtctgccggaactttatgagacggtaccagtcacgggtgactcagggactcgtcgcaggtgagactgcacaacagatttgtgaagatctgaga

SEQ ID NO: 174860 - DNA, 225 bp, Artificial Sequence
  derived and/or modified sequence
atgggaagagactaccggacctgccttacgatcgtgcagaagctgaaaaagatggtggataagcccactcagagaagcgtctccaacgcagcgacgcgggtgtgccgcaccggacgatcgcgctggagagacgtctgccgcaatttcatgagacggtaccaatcacgggtcactcagggactggtggccggagagactgcccagcagatctgcgaagacctccgg

SEQ ID NO: 174861 - DNA, 225 bp, Artificial Sequence
  derived and/or modified sequence
atgggcagagactatcgtacttgccttacaatcgtgcaaaagctgaagaaaatggtggataagcccactcaaagatccgtctcaaacgcagctaccagggtctgccgcaccggcagatctagatggagggatgtctgtaggaatttcatgagacgttaccagtctagagtgacccagggtctcgtggccggtgagaccgctcaacagatctgtgaagaccttaga

SEQ ID NO: 174862 - DNA, 225 bp, Artificial Sequence
  derived and/or modified sequence
atgggcagagattaccggacctgcttgactattgttcagaagttgaagaagatggtagataaacctacccagcgtagcgtgtcaaacgccgctactcgcgtctgcagaaccggccggtctcggtggcgggacgtttgcagaaacttcatgagacggtatcaatctagggtcactcagggtttggtggcgggcgagactgcccagcagatctgcgaagatttgagg

SEQ ID NO: 174863 - DNA, 225 bp, Artificial Sequence
  derived and/or modified sequence
atggggcgagattataggacatgcctgactatcgtccagaagctgaaaaagatggtggataaacccacacagcgtagtgtcagtaacgctgcaacacgggtgtgtcgcaccggccgttctaggtggcgggacgtgtgcagaaactttatgcggaggtaccagtctcgcgttacccagggtctcgtggctggcgaaaccgctcaacaaatctgcgaggacctgagg

SEQ ID NO: 174864 - DNA, 225 bp, Artificial Sequence
  derived and/or modified sequence
atgggaagagactacagaacctgccttaccatcgtgcaaaaactgaagaagatggtggacaagccgacccagcggtcggttagcaacgctgccactcgggtgtgcaggactgggcgctcccgatggcgcgacgtgtgcaggaatttcatgagacggtaccagtcccgggtcacgcagggattggtggccggagagactgcacagcagatttgtgaggatctgaga

SEQ ID NO: 174865 - DNA, 225 bp, Artificial Sequence
  derived and/or modified sequence
atgggacgagattatagaacctgcctgaccatagtgcagaagctgaagaagatggttgataagcctacccagcgaagtgtctctaacgccgccacccgcgtgtgtcggaccgggcggtccagatggcgggatgtgtgccgcaactttatgcgacgatatcagtccagagtcacccagggtctcgtcgctggcgaaacagctcagcagatctgtgaagacctgcgc

SEQ ID NO: 174866 - DNA, 225 bp, Artificial Sequence
  derived and/or modified sequence
atggggcgagactatcgaacctgtttgacaattgttcagaagctcaagaaaatggttgataagcccactcaaaggtctgtctccaacgcggctacccgggtgtgtcgcacgggtaggtcacgatggagagacgtgtgtcgcaattttatgcggcgctatcagtcaagggtaactcaagggctggtggcaggcgagaccgcacaacagatctgcgaggacttgcgg

SEQ ID NO: 174867 - DNA, 225 bp, Artificial Sequence
  derived and/or modified sequence
atgggaagagattaccgcacctgtcttactatcgtgcagaaactcaaaaagatggtggataaaccaacccaacgctcggtgtcaaacgcagcaacccgcgtgtgccggactgggagaagccgatggcgggatgtgtgtcgcaatttcatgcgtcggtaccagagccgtgtgacgcagggcctggtggctggcgagactgcacagcaaatttgtgaagatctgaga

SEQ ID NO: 174868 - DNA, 225 bp, Artificial Sequence
  derived and/or modified sequence
atgggccgggattaccggacctgcctcactatcgtgcagaagctcaagaagatggtcgacaagcccacccaacgctcggtgtcaaacgccgcaacgcgcgtgtgcaggaccggccgcagcaggtggcgcgatgtctgccggaacttcatgcgccgctaccagtcgcgggtgacccaaggactggtcgccggggaaactgcgcaacagatctgcgaggacctcagg

SEQ ID NO: 174869 - DNA, 225 bp, Artificial Sequence
  derived and/or modified sequence
atgggacgggactatcgcacttgtcttactatagttcagaaactcaagaagatggtcgacaagcccacacaacggtctgtgtccaatgcggctactagggtgtgcaggacagggaggagtcggtggcgcgatgtgtgtcggaactttatgcggaggtaccagtcacgcgttacacaagggctagtcgcgggggaaacagcccagcagatatgtgaggatctccgg

SEQ ID NO: 174870 - DNA, 225 bp, Artificial Sequence
  derived and/or modified sequence
atgggtcgtgattatcgtacgtgtctaacgatagtacaaaaactaaaaaaaatggttgataaaccgacgcaacgatcggtatcgaatgcggcgacgcgagtatgtcgaacgggtcgatcgcgttggcgtgatgtttgtcgaaattttatgcgacgttatcaatcgcgtgttacgcaaggtttagtagcgggtgaaacggcgcaacaaatatgtgaagatttacgt

SEQ ID NO: 174871 - DNA, 225 bp, Artificial Sequence
  derived and/or modified sequence
atgggacgggactaccgcacttgtctgaccattgtgcaaaaactgaagaagatggtcgacaagccgactcagcggagcgtttcaaacgcagctacgagggtttgtcgaactggtagatcgcggtggcgcgacgtgtgccggaatttcatgagacgttaccaaagcagagtcacccagggacttgtggcgggcgaaacggcccagcagatctgcgaggatctccgg

SEQ ID NO: 174872 - DNA, 225 bp, Artificial Sequence
  derived and/or modified sequence
atgggacgagattatcggacgtgcttaactatagtccaaaaacttaagaagatggtcgacaagcctacacagcgctccgtgagtaatgctgcgaccagagtgtgtcggacggggcggagcaggtggcgggatgtttgccggaacttcatgaggcgttatcagtcacgggtgacccagggactggtggcaggagaaaccgcgcagcagatctgtgaggatctccgg

SEQ ID NO: 174873 - DNA, 225 bp, Artificial Sequence
  derived and/or modified sequence
atgggccgtgactaccgcacatgtcttaccatcgtgcagaaacttaaaaagatggtggataagcctacacagcggtccgtgagtaacgcagctacacgcgtctgtagaacgggccggtctaggtggcgtgatgtctgccgcaattttatgagaagataccagagtcgcgtgacgcaggggttagtggcaggagagacagcccagcagatatgcgaagatctccgg

SEQ ID NO: 174874 - DNA, 225 bp, Artificial Sequence
  derived and/or modified sequence
atggggcgagactaccgaacgtgcctgactattgtgcaaaagttgaagaagatggtggataagccaactcagcggtcggtgagcaacgccgcaactcgcgtgtgcagaaccggcagatcccgctggcgtgatgtctgtagaaacttcatgcggaggtaccagagcagagtgacccaaggactggtggcgggagaaaccgctcaacagatttgtgaggatttgcgt

SEQ ID NO: 174875 - DNA, 225 bp, Artificial Sequence
  derived and/or modified sequence
atggggcgcgattaccggacatgtctgactatagttcagaagctgaaaaagatggtggataagccaactcagagatcggtgtctaatgctgccactcgcgtgtgtaggacaggaaggtctagatggcgcgatgtgtgtcgaaatttcatgagaagataccagtcaagggtaacgcagggactggttgccggggagacagctcagcagatctgtgaggacctgcgc

SEQ ID NO: 174876 - DNA, 225 bp, Artificial Sequence
  derived and/or modified sequence
atgggaagagattaccggacctgtttgactatcgtccagaagttgaagaaaatggttgataagcctactcagcgctctgtatcgaacgccgctacaagagtctgccggaccgggagaagccggtggcgggatgtgtgtcgcaactttatgaggagataccagtcccgggtgacccagggactggtcgctggagaaaccgcccaacagatctgtgaagatttgaga

SEQ ID NO: 174877 - DNA, 225 bp, Artificial Sequence
  derived and/or modified sequence
atgggaagggattatcgaacgtgcttgacaatagttcagaagctgaaaaaaatggtggacaagccgacccagagaagtgtgagcaatgccgcaactcgcgtgtgcaggacaggtaggtcaaggtggagggatgtgtgccggaacttcatgcgcagatatcagagccgcgtgactcagggcttggtggccggtgagaccgcacaacaaatctgcgaggacctgagg

SEQ ID NO: 174878 - DNA, 225 bp, Artificial Sequence
  derived and/or modified sequence
atgggtagggattataggacatgtttgaccatcgtccaaaagttgaagaagatggtagacaagccaacacaaagaagtgtctccaacgccgctacacgcgtttgccgcacaggccgcagtagatggagagacgtgtgtaggaatttcatgcgcagataccaatcaagagttacgcaaggcctggtggctggagaaactgcgcagcagatctgcgaagatttgagg

SEQ ID NO: 174879 - DNA, 225 bp, Artificial Sequence
  derived and/or modified sequence
atgggacgggattacaggacctgtcttaccatcgtccagaagctaaagaagatggttgataaaccaactcagcggagtgtaagtaacgcggctacacgggtgtgcaggactggccgctctcggtggcgggatgtatgtagaaactttatgagacgttatcagtccagagtgactcaaggacttgtagcgggtgaaaccgctcagcaaatatgcgaagatctaagg

SEQ ID NO: 174880 - DNA, 225 bp, Artificial Sequence
  derived and/or modified sequence
atgggtcgcgattacaggacgtgcctcacgatagttcagaagttgaaaaagatggtggacaagcctacccaacgatcagtctcaaatgccgcaacccgcgtgtgtagaactggtagatcccggtggcgagatgtgtgtcggaactttatgaggagataccaatcccgggtgactcagggactggtggcaggagagactgcacaacaaatatgtgaagatcttagg

SEQ ID NO: 174881 - DNA, 225 bp, Artificial Sequence
  derived and/or modified sequence
atgggtagggattatcgaacctgtttgactatcgtccagaagctcaagaaaatggtggacaaaccaacacaacgatccgtgagcaatgccgctacgcgtgtatgcaggacgggccgatcccgatggcgcgatgtatgtagaaatttcatgcggcgataccagagtcgagttacacaaggcctggtggctggtgaaaccgcgcagcagatctgtgaagaccttcga

SEQ ID NO: 174882 - DNA, 225 bp, Artificial Sequence
  derived and/or modified sequence
atgggacgggactatcgtacttgcctgactattgtccagaaactgaagaagatggttgacaagcccactcaacggtccgtctctaacgcggcaacacgggtgtgccgaactgggcgttcacgctggcgggacgtgtgtcgtaattttatgcgtcgctatcagagtagggtgacccagggcctcgtcgccggagaaactgcgcagcagatatgtgaagacctgaga

SEQ ID NO: 174883 - DNA, 225 bp, Artificial Sequence
  derived and/or modified sequence
atgggtcgggattaccgcacttgcttgacgatcgtgcagaagctgaaaaagatggtggataagccgacccaacggtccgtatcgaatgctgcaactcgggtttgtaggaccggcagatcgaggtggcgggacgtctgcagaaacttcatgcgaaggtaccagagcagggtgacccaggggcttgtcgccggagaaacggcgcagcaaatctgcgaggacctcagg

SEQ ID NO: 174884 - DNA, 225 bp, Artificial Sequence
  derived and/or modified sequence
atgggtagagactacagaacgtgcttgactatcgtgcaaaaactcaagaagatggtagataagccgacccagcgatcagtttctaatgcagcgaccagggtgtgtcggaccggacgctcgcggtggcgcgacgtgtgccgtaacttcatgcgtaggtaccagtcccgggtcactcaggggctggtggctggcgaaaccgcccaacagatctgcgaggaccttcgc

SEQ ID NO: 174885 - DNA, 225 bp, Artificial Sequence
  derived and/or modified sequence
atgggccgcgattatcgaacatgcctcacgattgtacaaaagctcaagaaaatggttgataaaccaacgcagcgaagcgtgagcaacgcggcaacacgggtgtgtcgaaccggtagaagccgttggcgggatgtgtgtcgcaacttcatgcgccgttatcaaagccgtgtgacccagggcttagtggcaggggagacggcccagcagatttgcgaggacctcaga

SEQ ID NO: 174886 - DNA, 225 bp, Artificial Sequence
  derived and/or modified sequence
atgggacgggattatcgcacttgcctgaccatagtgcagaaacttaagaagatggtggacaagcctactcaaaggagcgtctcgaacgctgcaactcgagtgtgtcggaccgggcgtagcaggtggcgggatgtgtgtcgcaactttatgcgaaggtaccagtccagagtcactcaaggactggtcgcgggggaaaccgcacaacagatttgtgaggatctgcgt

SEQ ID NO: 174887 - DNA, 225 bp, Artificial Sequence
  derived and/or modified sequence
atgggccgggactacagaacttgcctgaccatcgtgcagaaactcaagaagatggtggataaaccgactcagcgctcggtgagcaacgccgcgacccgcgtctgcaggactggccggagcaggtggagagacgtgtgtcgcaatttcatgcgccggtaccaatcccgcgtgacgcagggactggtggccggggagactgcccagcagatttgcgaagatctcaga

SEQ ID NO: 174888 - DNA, 225 bp, Artificial Sequence
  derived and/or modified sequence
atgggaagggactatcgtacttgtctgacgatcgtacagaaactcaaaaagatggtcgataaaccaacacaacggagcgtgtctaatgccgctactcgcgtgtgtcggactggcagaagtcggtggagagatgtctgtcggaattttatgcgtcggtatcagtcaagggtaactcaggggctcgtagccggcgaaaccgcccagcagatctgtgaagatctgagg

SEQ ID NO: 174889 - DNA, 225 bp, Artificial Sequence
  derived and/or modified sequence
atggggcgagactatcgaacttgcctgacaattgtgcagaagctaaagaagatggtggataaacctacgcagagaagcgtgtccaatgctgctactcgcgtctgcaggaccggaaggtcaagatggcgagatgtatgccggaacttcatgcggcggtaccagagtcgcgttacgcaaggcctggtagctggagaaacagctcaacagatctgtgaagatctgcgg

SEQ ID NO: 174890 - DNA, 225 bp, Artificial Sequence
  derived and/or modified sequence
atgggacgggattatcggacttgtctcacaatagtgcagaaactcaaaaaaatggtggataagcccactcagagatccgtgagtaacgctgctacaagggtttgcaggactggacgatctaggtggcgagacgtgtgtcgcaactttatgagaagatatcagtctcgggttacacagggactagtggctggggaaacagcccagcagatttgtgaagaccttagg

SEQ ID NO: 174891 - DNA, 225 bp, Artificial Sequence
  derived and/or modified sequence
atggggagagactaccgcacctgtctgactatcgttcagaaacttaagaagatggtggacaaacccacccagcgcagcgtctcaaacgccgcgacaagagtttgtcgtacgggccggtctcggtggcgcgatgtgtgtagaaacttcatgagaaggtaccagtcgcgcgtgactcagggcctagtggctggcgagaccgcccagcagatctgtgaggatctgaga

SEQ ID NO: 174892 - DNA, 225 bp, Artificial Sequence
  derived and/or modified sequence
atgggccgtgattaccgtacctgtttaaccatagttcagaagctgaaaaagatggttgacaagccaacccagcggtcagtatccaatgccgcaacgcgtgtgtgccgtacgggtcggagtcgctggcgggatgtatgtcgcaacttcatgcgacgctaccagtcccgcgtgacgcagggcctcgttgccggagagacagcccagcaaatatgtgaggaccttcgt

SEQ ID NO: 174893 - DNA, 225 bp, Artificial Sequence
  derived and/or modified sequence
atgggaagggactacagaacctgcttgactattgtgcagaagcttaagaagatggtggataaacccacgcagagaagcgtctctaatgctgccacccgcgtctgccggacaggtcgatcacgctggcgcgatgtatgtaggaattttatgaggaggtatcaatcccgcgtgacccagggcttggttgctggggaaaccgctcaacaaatctgtgaggatcttcga

SEQ ID NO: 174894 - DNA, 225 bp, Artificial Sequence
  derived and/or modified sequence
atgggacgcgactacagaacttgtctgaccatcgtgcagaagctcaaaaagatggtggacaagccaactcagcggagcgtttcgaacgcggccactcgtgtgtgtcggacgggccggtcacgctggagggacgtgtgccgcaacttcatgcggcggtaccagtcgcgggtcactcaggggctggtggccggagaaactgcgcagcaaatctgcgaggatctccgg

SEQ ID NO: 174895 - DNA, 225 bp, Artificial Sequence
  derived and/or modified sequence
atgggacgcgattaccgaacttgcctgactatcgtccaaaagctgaaaaagatggtcgacaagccaacgcaaaggtccgtgtccaacgcagcgaccagagtctgtcgcaccggacgtagccgctggagggacgtctgtagaaactttatgcggcgctaccagtcccgtgtgactcagggtcttgtggccggggaaaccgcacagcaaatctgcgaggatctgcgg

SEQ ID NO: 174896 - DNA, 225 bp, Artificial Sequence
  derived and/or modified sequence
atgggtcgtgattaccgtacttgtctaaccatagtccaaaagcttaagaaaatggtcgataagcccactcaacggagtgtgagcaacgctgccacacgcgtttgcaggaccggaagaagcaggtggcgggacgtatgtcgcaactttatgcgaaggtatcagagcagggttacacaagggctggtcgccggtgaaaccgcgcagcaaatatgcgaagatctcaga

SEQ ID NO: 174897 - DNA, 225 bp, Artificial Sequence
  derived and/or modified sequence
atggggcgcgactacagaacttgtttgacgatcgtgcaaaagctcaaaaagatggtcgataaaccgacccagagatcagtctccaatgccgcaaccagggtgtgccgaactggccgctcccggtggagagacgtgtgccgcaacttcatgcggcggtaccaatcgcgtgtgacccagggacttgtcgcaggagaaaccgctcagcagatttgcgaggatctgcgg

SEQ ID NO: 174898 - DNA, 225 bp, Artificial Sequence
  derived and/or modified sequence
atggggagagattacagaacgtgcctgacaattgttcagaagctgaaaaagatggtggacaaacccactcaacgcagcgtctcaaatgctgccacaagagtgtgtcggactgggcgatcaaggtggcgggatgtgtgtcgcaattttatgaggcgctaccagtctcgcgtgacccagggtctggtcgctggggaaacagctcaacagatctgcgaggatcttaga

SEQ ID NO: 174899 - DNA, 225 bp, Artificial Sequence
  derived and/or modified sequence
atgggccgagattaccggacgtgtctgactatcgttcagaaattgaaaaagatggtggataagcccactcagcggtccgtcagtaatgcagccacccgtgtgtgtcgcactggccggagtcgttggcgcgatgtgtgtagaaatttcatgcgtagatatcaatcacgcgtgactcaggggctggtggccggtgaaactgcccagcaaatctgcgaggatctgcga

SEQ ID NO: 174900 - DNA, 225 bp, Artificial Sequence
  derived and/or modified sequence
atgggtagggattacagaacatgcctcacaatagtgcaaaagctcaaaaagatggtggacaagcccacgcagaggtcggtttcaaatgccgctactcgtgtatgccgcactggcaggagtcggtggagagacgtttgtagaaacttcatgaggcgataccagtctcgagtgacccagggccttgttgccggcgaaactgcccagcaaatctgcgaggacttgagg

SEQ ID NO: 174901 - DNA, 225 bp, Artificial Sequence
  derived and/or modified sequence
atgggccgggactaccgtacttgcctgaccatcgtccagaagctgaaaaagatggtcgataagccgactcaaagaagcgtgtcaaacgcagcgacgagagtgtgtcgcaccggacggtcgcgctggcgcgatgtgtgccgaaatttcatgcggaggtaccagtcccgggttactcagggattggtggccggggaaaccgctcaacagatctgcgaggacctccgc

SEQ ID NO: 174902 - DNA, 225 bp, Artificial Sequence
  derived and/or modified sequence
atgggaagggactatcgtacctgtttgactattgttcaaaagctcaagaaaatggtggataagccaacccaacgttcagtgagcaacgcagcaactcgcgtgtgtcgcacgggtaggtccagatggcgagatgtctgcagaaatttcatgagacggtaccaatcaagagtgacccagggactggttgccggagaaaccgcccagcagatatgtgaggatcttcgc

SEQ ID NO: 174903 - DNA, 225 bp, Artificial Sequence
  derived and/or modified sequence
atgggaagggactaccggacgtgtctcacaatagtgcagaagcttaaaaagatggttgacaagccgacccagaggagcgtttcaaatgccgccacccgggtttgccggacggggcggagcaggtggcgggatgtgtgtagaaatttcatgaggagatatcaatccagagtgacacaggggcttgtggctggtgagaccgcccagcaaatatgcgaggacctgagg

SEQ ID NO: 174904 - DNA, 225 bp, Artificial Sequence
  derived and/or modified sequence
atgggtcgcgattaccggacctgtctgactattgtgcagaaactgaaaaagatggtggataagcctacccaaaggagcgtttccaatgcagcaactcgcgtgtgtaggacggggcggtccagatggagagacgtgtgtcggaactttatgaggagataccagtcccgggtcacgcagggcctcgtcgccggagagacggctcaacagatttgcgaggatttgaga

SEQ ID NO: 174905 - DNA, 225 bp, Artificial Sequence
  derived and/or modified sequence
atgggacgagattacaggacatgtctgacaatcgtacaaaaacttaaaaaaatggtggataaaccgacacaacgctctgtctctaatgcggctacacgtgtttgtagaacaggacgctcacgttggcgtgatgtttgtaggaactttatgcgtcgctaccaaagccgtgttacccagggcctcgtcgctggggagacggcccagcagatctgcgaagatctaagg

SEQ ID NO: 174906 - DNA, 225 bp, Artificial Sequence
  derived and/or modified sequence
atgggacgggattatcggacctgtctgaccattgtgcaaaagcttaagaaaatggtagacaagcctacgcaacggagcgtatccaatgccgcgaccagagtctgtcggacgggacgcagccgttggcgagatgtttgcagaaactttatgcgtagataccagagcagggtcacacaggggctggtagcaggcgagaccgcccagcagatctgcgaagacctgagg

SEQ ID NO: 174907 - DNA, 225 bp, Artificial Sequence
  derived and/or modified sequence
atgggccgggattataggacctgtctgaccattgtccagaagctgaaaaaaatggtagacaagcctacacaaaggtctgttagtaacgcagctactagagtctgcaggacaggtcgctcaagatggcgcgatgtgtgtagaaactttatgagacgatatcagagccgcgtgacacaaggcctggtcgccggagagaccgcccaacagatttgcgaagacctgcgc

SEQ ID NO: 174908 - DNA, 225 bp, Artificial Sequence
  derived and/or modified sequence
atgggaagggactaccgtacttgtctgacaatcgttcagaagctcaagaaaatggtggataaaccgacccaacggagtgtgagtaatgctgcaactcgcgtgtgccggacgggaaggtccaggtggcgggatgtgtgtcggaacttcatgaggcgctaccagtctcgcgttacccaagggctggtagctggtgaaactgctcagcagatatgtgaggatctccgc

SEQ ID NO: 174909 - DNA, 225 bp, Artificial Sequence
  derived and/or modified sequence
atggggcgggactaccgcacttgcctgacgattgtgcagaaacttaagaagatggtggacaagccaactcaaagatctgtttcgaacgctgccaccagagtgtgccgcaccggacgcagccgctggcgggatgtgtgcaggaatttcatgcggcgttaccaatcgcgggtcacccagggtctggtggccggcgaaaccgcgcagcagatctgtgaggatctgcgg

SEQ ID NO: 174910 - DNA, 225 bp, Artificial Sequence
  derived and/or modified sequence
atgggtcgggattaccgcacttgtcttaccattgtgcagaagttgaaaaagatggtggataagcctacccagcgaagcgtctcgaatgccgctactagagtctgtaggactgggaggtcacgctggcgggatgtgtgtcggaactttatgaggaggtaccagagcagggtgactcaagggcttgtggcaggagaaaccgcgcaacagatctgcgaggatcttcgc

SEQ ID NO: 174911 - DNA, 225 bp, Artificial Sequence
  derived and/or modified sequence
atggggagagattatcgcacatgtttaactattgtccaaaaactaaaaaaaatggttgacaaacctacacagagatctgttagtaatgctgccacgcgcgtgtgcaggacaggacggtcacgatggcgggatgtatgtagaaattttatgcggcgatatcagtcccgcgtaactcaggggctggtggcaggagagacggcacagcagatctgtgaagatctcaga

SEQ ID NO: 174912 - DNA, 225 bp, Artificial Sequence
  derived and/or modified sequence
atgggccgtgactacagaacctgcctcactatcgtccaaaaacttaagaagatggtggacaagcccacgcagcgttctgtctctaacgcagcaacccgggtgtgtcgtaccggacgctcccgctggagagatgtgtgtaggaacttcatgcggcggtaccaatcgagggtcactcagggccttgtggcaggggagactgctcaacagatttgtgaagatctgcgc

SEQ ID NO: 174913 - DNA, 225 bp, Artificial Sequence
  derived and/or modified sequence
atgggtagagattaccgcacttgtcttactatcgtccaaaagctgaaaaagatggtggataagccaactcagcgctctgtaagcaacgcagcaactcgcgtgtgtagaaccggccgttcgagatggcgggatgtgtgccgaaactttatgaggagataccagtcacgggtgacgcagggtcttgtggcaggagaaactgcccaacagatttgtgaggacctgcgg

SEQ ID NO: 174914 - DNA, 225 bp, Artificial Sequence
  derived and/or modified sequence
atggggagagactaccggacctgcctcaccatcgtgcaaaaactgaagaaaatggtggacaagccgactcagcggtcggtgtccaatgccgctacccgagtatgccggactggccgatcacggtggagagatgtctgcaggaacttcatgcggcgctaccagtcccgcgtgactcagggactggtggctggagaaacggcacaacagatttgtgaggatttgcgc

SEQ ID NO: 174915 - DNA, 225 bp, Artificial Sequence
  derived and/or modified sequence
atgggtagagattacagaacctgtctgaccatcgtgcaaaaacttaagaagatggtggacaagccgactcagagatcggtttccaacgctgccaccagagtctgtcggactggacgaagccggtggcgggatgtgtgccgcaactttatgaggcgctaccaatccagggtgactcagggactggtagccggggaaacggcgcagcagatctgtgaggacttgagg

SEQ ID NO: 174916 - DNA, 225 bp, Artificial Sequence
  derived and/or modified sequence
atgggtagagattataggacctgtttgacgatcgtccagaagcttaagaagatggtggataagcctactcagcggagtgtatctaacgccgccacacgcgtttgtaggaccggaaggagccgatggcgggacgtttgtcggaatttcatgaggcggtaccagagcagagtgacccagggtttggtggccggggagacagctcagcagatctgtgaagatctcaga

SEQ ID NO: 174917 - DNA, 225 bp, Artificial Sequence
  derived and/or modified sequence
atgggaagagattatagaacttgtcttactatcgtacaaaaactaaaaaaaatggttgataaacctactcagaggagtgtatctaacgcagcaaccagggtatgtaggacggggcgttctcgatggagggacgtttgtaggaattttatgagacgatatcaatcgcgagttacacagggccttgtggctggagaaaccgcacagcaaatctgtgaggatctcagg

SEQ ID NO: 174918 - DNA, 225 bp, Artificial Sequence
  derived and/or modified sequence
atgggaagggattaccgcacttgtttaacaattgttcaaaagttaaaaaagatggtcgacaaacccacgcagcgttctgttagcaacgcagcaactagagtttgtcgaactggaagatccagatggcgagacgtctgtcgtaatttcatgcgacgatatcagagccgagttacacaaggactagtagctggcgaaacggcacaacaaatatgcgaagacttaaga

SEQ ID NO: 174919 - DNA, 225 bp, Artificial Sequence
  derived and/or modified sequence
atgggacgcgattaccgcacatgcctgaccatagtacaaaaactgaaaaagatggtcgacaagccaactcaaagatccgtctccaatgccgcaacaagagtctgtaggactggccgcagtcgctggcgcgatgtgtgtaggaacttcatgaggcggtatcagagtcgggttacccagggcttggtagccggggagacagcccagcagatttgcgaggacctgaga

SEQ ID NO: 174920 - DNA, 225 bp, Artificial Sequence
  derived and/or modified sequence
atgggccgggattacagaacatgtcttaccattgtacagaaattgaagaagatggtcgataagcccacccagagatctgtcagcaacgccgctacccgcgtatgcagaaccggaagaagtcggtggcgcgatgtgtgccgtaacttcatgagacggtatcagtcccgcgtcacacagggccttgttgccggggagacagcccagcagatttgtgaggatctaaga

SEQ ID NO: 174921 - DNA, 225 bp, Artificial Sequence
  derived and/or modified sequence
atggggcgggactaccgtacatgtctcaccattgttcagaaattgaaaaagatggttgataaacccacgcagcgcagtgtgtcaaatgctgcgacacgcgtctgccggacaggtaggagccggtggcgggacgtgtgtcgcaattttatgaggagatatcagtcccgcgtgacccaaggcctagttgcgggcgagacagcgcaacagatatgcgaggacctccgg

SEQ ID NO: 174922 - DNA, 225 bp, Artificial Sequence
  derived and/or modified sequence
atggggagagactaccgcacgtgcctgaccatcgtgcagaaactgaagaaaatggtcgacaaaccaacccagcggtcggtgtcaaacgcagcgacccgggtgtgccgcaccggacgcagcagatggagagacgtgtgccggaatttcatgaggagataccagtcgcgcgtcacgcaaggactggtggccggcgaaactgctcagcagatctgtgaggatttgcga

SEQ ID NO: 174923 - DNA, 225 bp, Artificial Sequence
  derived and/or modified sequence
atgggaagagactatcgcacctgtctaacaatcgtgcagaagcttaaaaaaatggtggacaagcctacacaaaggtctgtctccaacgccgccacacgtgtgtgcagaacaggccgttcgcgttggagagatgtttgcagaaattttatgcgtcgctaccagtctcgagtgacccagggtctagttgccggagaaacagcccagcaaatctgtgaagatttgagg

SEQ ID NO: 174924 - DNA, 225 bp, Artificial Sequence
  derived and/or modified sequence
atggggagagattacaggacgtgccttacgattgttcagaagctaaaaaagatggtggacaagcccactcagaggtctgtgtctaacgcggcgactagggtctgtcgcaccggcagaagcagatggcgggacgtctgcaggaatttcatgcggcggtatcagtcccgtgttacccaggggctggtggcaggggagacagcccagcagatctgcgaggaccttaga

SEQ ID NO: 174925 - DNA, 225 bp, Artificial Sequence
  derived and/or modified sequence
atgggccgcgactaccggacatgcctcaccatcgtccaaaagctgaagaagatggtggataaacccacgcagagatcagtgtcaaatgccgccactcgggtctgtcgaacaggtcggtcacgctggcgagacgtgtgcagaaattttatgcggagataccagtcacgggtgacacagggtctggtcgccggggagaccgcccagcagatttgtgaggatttgaga

SEQ ID NO: 174926 - DNA, 225 bp, Artificial Sequence
  derived and/or modified sequence
atgggccgggattacaggacatgtttgactattgtgcaaaaattgaaaaaaatggtggataaaccgacacagagaagtgtgtccaacgctgcgaccagagtttgccggacgggaaggtcccgatggagagacgtttgtcgaaatttcatgcgccggtaccagtctcgcgtgactcagggacttgtcgcaggggagacagctcagcagatctgtgaggacttgaga

SEQ ID NO: 174927 - DNA, 225 bp, Artificial Sequence
  derived and/or modified sequence
atgggcagggactatcggacttgcttgactatcgtccagaagttgaaaaagatggtcgacaagcccactcagcgttccgtctccaacgccgcgacaagagtttgtcgcacaggtcggtcccgatggcgtgacgtgtgccgtaattttatgcgtcgctatcaatcgcgcgtcacccagggactggttgctggcgagaccgcacagcaaatctgcgaggacctgcgt

SEQ ID NO: 174928 - DNA, 225 bp, Artificial Sequence
  derived and/or modified sequence
atgggaagagattaccggacttgtcttactattgtccaaaaactgaagaagatggtcgataagccaacccaacggtctgtgtcaaatgccgccacccgggtgtgtcggaccggaaggtccagatggcgcgacgtttgtcgtaacttcatgagacgctaccagtccagagtgacccagggcctggtggcaggagaaactgcccagcagatctgtgaagatctcaga

SEQ ID NO: 174929 - DNA, 225 bp, Artificial Sequence
  derived and/or modified sequence
atgggccgggactaccgtacctgtctgacgatcgtgcagaagctcaagaaaatggtggacaagccaacccagcggagcgtcagcaatgccgccacccgggtgtgtagaaccggacgcagccggtggagagacgtgtgccgaaacttcatgagacggtaccagtcgagggtgacccagggactcgtcgctggcgaaaccgcacaacaaatttgcgaggacctgcgg

SEQ ID NO: 174930 - DNA, 225 bp, Artificial Sequence
  derived and/or modified sequence
atgggaagagactaccgaacgtgtcttactatagtgcaaaagctgaagaaaatggtggataagcctacccaacgttcagtgtccaatgctgcaaccagagtgtgtcgcactggtaggagccgatggcgggatgtctgcagaaacttcatgcgtcgatatcagtcacgagttactcaagggttggtcgcgggcgaaaccgcacaacagatctgtgaagatctgcga

SEQ ID NO: 174931 - DNA, 225 bp, Artificial Sequence
  derived and/or modified sequence
atgggacgcgattacagaacttgcctgaccatcgtgcagaagctcaaaaagatggttgacaagccgacccagcggagtgtctctaacgccgcgaccagggtgtgccgcaccggtcggagccgctggcgcgacgtgtgcagaaatttcatgcgtcggtaccaatcgagagtgactcagggcttggtcgctggggaaactgcccagcaaatctgtgaggacctccgc

SEQ ID NO: 174932 - DNA, 225 bp, Artificial Sequence
  derived and/or modified sequence
atgggcagagattaccgaacctgtctcaccattgtgcagaagctcaagaagatggtcgacaaacccacgcaacggtcagtctcgaacgccgctactagggtttgtcggacggggaggagcagatggcgtgacgtgtgccgcaactttatgagacggtaccaaagccgagtgacccagggacttgtggcaggtgaaaccgcacaacagatctgtgaagatctgcgt

SEQ ID NO: 174933 - DNA, 225 bp, Artificial Sequence
  derived and/or modified sequence
atgggacgggattatcggacctgcctgacgatcgtgcaaaagctgaagaaaatggtcgacaagcccacacaaaggtcagtgtccaacgcagctacgagggtgtgtcgaacagggcgcagtcgttggcgtgatgtttgtcgtaatttcatgcgaaggtaccaatccagagtgacccagggactggtagccggtgaaaccgcccaacagatttgcgaggacctcaga

SEQ ID NO: 174934 - DNA, 225 bp, Artificial Sequence
  derived and/or modified sequence
atgggaagggattaccggacttgtctcactatcgtccagaagctgaagaaaatggttgacaagccaacccaacggtcggtgtccaatgcagctacgcgcgtctgtaggaccggtcgttcacggtggcgtgacgtgtgccgcaactttatgagaagataccaatcgcgcgtcactcaaggcctggtggcaggcgaaacggcccagcagatatgcgaggatctccgg

SEQ ID NO: 174935 - DNA, 225 bp, Artificial Sequence
  derived and/or modified sequence
atgggccgggactaccgcacttgcctgactattgtccaaaagctgaagaaaatggtggataagccgactcagcgtagcgtctcaaatgccgcgacccgggtgtgcaggaccggacggtccagatggagagatgtgtgccgtaatttcatgcggcgctaccaatcgcgggtgactcagggactggtggctggggaaactgcgcagcagatctgcgaagatctgagg

SEQ ID NO: 174936 - DNA, 225 bp, Artificial Sequence
  derived and/or modified sequence
atgggccgagactacagaacgtgcttgacgattgttcagaaactcaagaagatggtggacaagcctacgcaaaggtccgtgagcaatgcagccaccagagtttgcagaactgggagatctagatggcgggacgtgtgccggaatttcatgagaagataccagtcaagggtgactcagggtctggttgcaggggagaccgcacagcagatttgtgaagacctccgc

SEQ ID NO: 174937 - DNA, 225 bp, Artificial Sequence
  derived and/or modified sequence
atgggtagagattatagaacttgtttaacaatagttcaaaaattaaaaaaaatggtagataagccaactcaacgatcagtatctaacgctgctacaagggtatgtagaacaggaagatctagatggagagatgtttgtcgaaatttcatgagacgttatcaatcccgagttacacaaggtcttgttgctggagaaacagcacaacaaatttgtgaagacttaaga

SEQ ID NO: 174938 - DNA, 225 bp, Artificial Sequence
  derived and/or modified sequence
atggggagagactaccgcacttgcctgacaatcgttcagaaactcaaaaagatggtcgataagcctacgcaacgttcggtgtctaacgcagccacgagagtttgccgaactggacgaagtcgttggcgcgatgtttgtcgcaatttcatgcggagatatcagtccagagtcactcagggcctcgtcgctggggaaacagcccagcagatttgcgaagatctccgt

SEQ ID NO: 174939 - DNA, 390 bp, Artificial Sequence
  derived and/or modified sequence
atggagggcctggtgttcagccgcctgagccccgagtactacgacctggcccgcgcccacctgcgcgacgaggagaagagctgcccctgcctggcccaggagggcccccagggcgacctgctgaccaagacccaggagctgggccgcgactaccgcacctgcctgaccatcgtgcagaagctgaagaagatggtggacaagcccacccagcgcagcgtgagcaacgccgccacccgcgtgtgccgcaccggccgcagccgctggcgcgacgtgtgccgcaacttcatgcgccgctaccagagccgcgtgacccagggcctggtggccggcgagaccgcccagcagatctgcgaggacctgcgcctgtgcatccccagcaccggccccctg

SEQ ID NO: 174940 - DNA, 225 bp, Artificial Sequence
  derived and/or modified sequence
atgggccgcgactaccgcacctgcctgaccatcgtgcagaagctgaagaagatggtggacaagcccacccagcgcagcgtgagcaacgccgccacccgcgtgtgccgcaccggccgcagccgctggcgcgacgtgtgccgcaacttcatgcgccgctaccagagccgcgtgacccagggcctggtggccggcgagaccgcccagcagatctgcgaggacctgcgc

SEQ ID NO: 174941 - DNA, 414 bp, Artificial Sequence
  derived and/or modified sequence
taatacgactcactatagggaaataagagagaaaagaagagtaagaagaaatataagagccaccatgggaagagattaccggacctgtctgactatcgtgcaaaaactgaagaagatggtggacaagccgacccagcggtccgtgagcaacgctgccacgagggtctgccgcactgggcggtcgcgctggagggacgtgtgcagaaatttcatgcgccgctaccagtcaagagtgactcagggactcgtcgcaggcgaaaccgcgcagcaaatctgcgaggatttgcggtgataataggctggagcctcggtggccatgcttcttgccccttgggcctccccccagcccctcctccccttcctgcacccgtacccccgtggtctttgaataaagtctgagtgggcggctctaga

SEQ ID NO: 174942 - DNA, 477 bp, Artificial Sequence
  derived and/or modified sequence
taatacgactcactatagggaaataagagagaaaagaagagtaagaagaaatataagagccaccatggccacttgggctctccttctcctggcggcgatgctgctgggtaacccagggctggtgtttagcggacgcgactaccggacgtgcctcactatcgtccagaaactgaagaagatggtcgataagccgactcagaggtcggtgtccaacgccgccaccagagtgtgccgcaccggcagatcgaggtggcgggacgtctgtcgcaatttcatgcgcagataccagtcacgggtgacccaaggattggtggcaggagaaaccgcacaacagatttgcgaggatctgcggtgataataggctggagcctcggtggccatgcttcttgccccttgggcctccccccagcccctcctccccttcctgcacccgtacccccgtggtctttgaataaagtctgagtgggcggctctaga

SEQ ID NO: 174943 - protein, 724 aa, Artificial Sequence
  derived and/or modified sequence
MSFPKAPLKRFNDPSGCAPSPGAYDVKTLEVLKGPVSFQKSQRFKQQKESKQNLNVDKDTTLPASARKVKSSESKESQKNDKDLKILEKEIRVLLQERGAQDRRIQDLETELEKMEARLNAALREKTSLSANNATLEKQLIELTRTNELLKSKFSENGNQKNLRILSLELMKLRNKRETKMRGMMAKQEGMEMKLQVTQRSLEESQGKIAQLEGKLVSIEKEKIDEKSETEKLLEYIEEISCASDQVEKYKLDIAQLEENLKEKNDEILSLKQSLEENIVILSKQVEDLNVKCQLLEKEKEDHVNRNREHNENLNAEMQNLKQKFILEQQEREKLQQKELQIDSLLQQEKELSSSLHQKLCSFQEEMVKEKNLFEEELKQTLDELDKLQQKEEQAERLVKQLEEEAKSRAEELKLLEEKLKGKEAELEKSSAAHTQATLLLQEKYDSMVQSLEDVTAQFESYKALTASEIEDLKLENSSLQEKAAKAGKNAEDVQHQILATESSNQEYVRMLLDLQTKSALKETEIKEITVSFLQKITDLQNQLKQQEEDFRKQLEDEEGRKAEKENTTAELTEEINKWRLLYEELYNKTKPFQLQLDAFEVEKQALLNEHGAAQEQLNKIRDSYAKLLGHQNLKQKIKHVVKLKDENSQLKSEVSKLRCQLAKKKQSETKLQEELNKVLGIKHFDPSKAFHHESKENFALKTPLKEGNTNCYRAPMECQESWK

SEQ ID NO: 174944 - DNA, 2175 bp, Artificial Sequence
  derived and/or modified sequence
atgagcttccccaaggcccccctgaagagattcaacgaccccagcggctgcgcccccagccccggcgcctacgacgtgaagaccctggaggtgctgaagggccccgtgagcttccagaagagccagagattcaagcagcagaaggagagcaagcagaacctgaacgtggacaaggacaccaccctgcccgccagcgccagaaaggtgaagagcagcgagagcaaggagagccagaagaacgacaaggacctgaagatcctggagaaggagatcagagtgctgctgcaggagagaggcgcccaggacagaagaatccaggacctggagaccgagctggagaagatggaggccagactgaacgccgccctgagagagaagaccagcctgagcgccaacaacgccaccctggagaagcagctgatcgagctgaccagaaccaacgagctgctgaagagcaagttcagcgagaacggcaaccagaagaacctgagaatcctgagcctggagctgatgaagctgagaaacaagagagagaccaagatgagaggcatgatggccaagcaggagggcatggagatgaagctgcaggtgacccagagaagcctggaggagagccagggcaagatcgcccagctggagggcaagctggtgagcatcgagaaggagaagatcgacgagaagagcgagaccgagaagctgctggagtacatcgaggagatcagctgcgccagcgaccaggtggagaagtacaagctggacatcgcccagctggaggagaacctgaaggagaagaacgacgagatcctgagcctgaagcagagcctggaggagaacatcgtgatcctgagcaagcaggtggaggacctgaacgtgaagtgccagctgctggagaaggagaaggaggaccacgtgaacagaaacagagagcacaacgagaacctgaacgccgagatgcagaacctgaagcagaagttcatcctggagcagcaggagagagagaagctgcagcagaaggagctgcagatcgacagcctgctgcagcaggagaaggagctgagcagcagcctgcaccagaagctgtgcagcttccaggaggagatggtgaaggagaagaacctgttcgaggaggagctgaagcagaccctggacgagctggacaagctgcagcagaaggaggagcaggccgagagactggtgaagcagctggaggaggaggccaagagcagagccgaggagctgaagctgctggaggagaagctgaagggcaaggaggccgagctggagaagagcagcgccgcccacacccaggccaccctgctgctgcaggagaagtacgacagcatggtgcagagcctggaggacgtgaccgcccagttcgagagctacaaggccctgaccgccagcgagatcgaggacctgaagctggagaacagcagcctgcaggagaaggccgccaaggccggcaagaacgccgaggacgtgcagcaccagatcctggccaccgagagcagcaaccaggagtacgtgagaatgctgctggacctgcagaccaagagcgccctgaaggagaccgagatcaaggagatcaccgtgagcttcctgcagaagatcaccgacctgcagaaccagctgaagcagcaggaggaggacttcagaaagcagctggaggacgaggagggcagaaaggccgagaaggagaacaccaccgccgagctgaccgaggagatcaacaagtggagactgctgtacgaggagctgtacaacaagaccaagcccttccagctgcagctggacgccttcgaggtggagaagcaggccctgctgaacgagcacggcgccgcccaggagcagctgaacaagatcagagacagctacgccaagctgctgggccaccagaacctgaagcagaagatcaagcacgtggtgaagctgaaggacgagaacagccagctgaagagcgaggtgagcaagctgagatgccagctggccaagaagaagcagagcgagaccaagctgcaggaggagctgaacaaggtgctgggcatcaagcacttcgaccccagcaaggccttccaccacgagagcaaggagaacttcgccctgaagacccccctgaaggagggcaacaccaactgctacagagcccccatggagtgccaggagagctggaagtag

SEQ ID NO: 174945 - DNA, 2175 bp, Artificial Sequence
  derived and/or modified sequence
atgtcatttccaaaggcacccttgaagcgcttcaatgacccctccggctgtgcaccctcaccaggcgcatacgatgtcaagactctagaggtgttaaaaggaccggtttctttccagaagtcccagaggttcaagcaacagaaggagtcaaagcagaatttgaacgtggacaaagacactactctccccgcatcagctaggaaggtcaagagcagtgaatctaaggagtcccagaagaatgacaaagacttgaaaattttggaaaaggagatcagggttctactccaggaacggggcgcacaagataggcggatccaggatctggagacggagttggaaaagatggaagcccgcttgaatgccgccctgcgagagaaaactagtctatcagccaataatgctactcttgagaaacagctcatcgaactgacccgcactaacgaattactgaagtccaagttctctgaaaatgggaaccaaaagaacctcagaattctgtctttagaactgatgaaactacgcaacaagagggagacaaagatgaggggtatgatggccaagcaggaaggcatggaaatgaagctgcaagtcacccagcgtagcctcgaagagtcacagggcaagatagcgcagctagagggcaaactggtgtctattgaaaaggagaaaatcgatgaaaagtctgaaacagaaaaattgctggagtacattgaggaaatcagctgcgcttccgatcaggtcgagaagtacaagctcgatattgcccagctggaggagaacctgaaagagaagaacgacgagatactctccttgaagcaatccctcgaagaaaacatcgtcattttgagcaagcaagtggaagacctcaatgttaagtgtcagcttctcgaaaaggagaaggaagatcacgttaacagaaacagagaacacaatgagaacctgaacgctgaaatgcagaatttaaagcaaaagtttatccttgagcagcaagagcgggagaagctgcaacagaaagaactgcaaatcgacagcttgctgcagcaagaaaaagagctgagttcatccctccatcagaaactgtgttcgttccaggaagagatggtgaaagaaaaaaaccttttcgaagaggagttgaagcaaactctcgacgaattggataagctccagcagaaagaagaacaagccgagcgactggtcaagcagcttgaggaggaagcaaaatcaagggctgaggagctgaagctgttagaagagaagctcaaggggaaagaagcagagttagaaaagtcctctgccgcccacacccaggctacgctactgttgcaggaaaaatatgattctatggtccagtcactcgaggacgtgaccgctcaatttgaaagctataaagccttgacagccagcgagattgaggacctgaagctggagaactcttccctccaggagaaagccgccaaagccgggaagaatgcggaggatgtccagcatcagattttggccaccgaatcatccaatcaggaatacgtgaggatgctcctagacctgcagacgaaatctgcgctgaaagagaccgagataaaagagatcaccgtttcctttctccagaaaattaccgatcttcagaaccaactcaagcagcaagaggaagattttcggaaacagctagaggacgaggaaggaagaaaagcggaaaaagagaacacaactgcagagctcaccgaagagatcaataagtggagactcctgtatgaggaactttataataaaaccaagccatttcagctgcagttggatgccttcgaagtagagaagcaggccctgcttaatgagcatggggctgcgcaggaacagttgaacaagatcagggattcttatgcgaagttgctgggtcaccaaaatctaaagcagaaaatcaagcacgttgtcaaactgaaagatgagaattcccagttgaaaagtgaggtgtctaagcttcggtgccagttggcgaagaagaaacaatctgagacaaagctccaagaggagctgaataaggtgcttggcatcaagcacttcgatccgtctaaggcctttcaccatgagagcaaagagaacttcgccctgaagaccccactcaaggagggcaatactaattgctacagggcaccaatggagtgtcaggagtcgtggaagtag

SEQ ID NO: 174946 - DNA, 2988 bp, Artificial Sequence
  derived and/or modified sequence
gccagtcaccttcagtttctggagctggccgtcaacatgtcctttcctaaggcgcccttgaaacgattcaatgacccttctggttgtgcaccatctccaggtgcttatgatgttaaaactttagaagtattgaaaggaccagtatcctttcagaaatcacaaagatttaaacagcaaaaagaatctaaacaaaatcttaatgttgacaaagatactaccttgcctgcttcagctagaaaagttaagtcttcggaatcaaaggaatctcaaaagaatgataaagatttgaagatattagagaaagagattcgtgttcttctacaggaacgtggtgcccaggacaggcggatccaggatctggaaactgagttggaaaagatggaagcaaggctaaatgctgcactaagggaaaaaacatctctctctgcaaataatgctacactggaaaaacaacttattgaattgaccaggactaatgaactactaaaatctaagttttctgaaaatggtaaccagaagaatttgagaattctaagcttggagttgatgaaacttagaaacaaaagagaaacaaagatgaggggtatgatggctaagcaagaaggcatggagatgaagctgcaggtcacccaaaggagtctcgaagagtctcaagggaaaatagcccaactggagggaaaacttgtttcaatagagaaagaaaagattgatgaaaaatctgaaacagaaaaactcttggaatacatcgaagaaattagttgtgcttcagatcaagtggaaaaatacaagctagatattgcccagttagaagaaaatttgaaagagaagaatgatgaaattttaagccttaagcagtctcttgaggagaatattgttatattatctaaacaagtagaagatctaaatgtgaaatgtcagctgcttgaaaaagaaaaagaagaccatgtcaacaggaatagagaacacaacgaaaatctaaatgcagagatgcaaaacttaaaacagaagtttattcttgaacaacaggaacgtgaaaagcttcaacaaaaagaattacaaattgattcacttctgcaacaagagaaagaattatcttcgagtcttcatcagaagctctgttcttttcaagaggaaatggttaaagagaagaatctgtttgaggaagaattaaagcaaacactggatgagcttgataaattacagcaaaaggaggaacaagctgaaaggctggtcaagcaattggaagaggaagcaaaatctagagctgaagaattaaaactcctagaagaaaagctgaaagggaaggaggctgaactggagaaaagtagtgctgctcatacccaggccaccctgcttttgcaggaaaagtatgacagtatggtgcaaagccttgaagatgttactgctcaatttgaaagctataaagcgttaacagccagtgagatagaagatcttaagctggagaactcatcattacaggaaaaagcggccaaggctgggaaaaatgcagaggatgttcagcatcagattttggcaactgagagctcaaatcaagaatatgtaaggatgcttctagatctgcagaccaagtcagcactaaaggaaacagaaattaaagaaatcacagtttcttttcttcaaaaaataactgatttgcagaaccaactcaagcaacaggaggaagactttagaaaacagctggaagatgaagaaggaagaaaagctgaaaaagaaaatacaacagcagaattaactgaagaaattaacaagtggcgtctcctctatgaagaactatataataaaacaaaaccttttcagctacaactagatgcttttgaagtagaaaaacaggcattgttgaatgaacatggtgcagctcaggaacagctaaataaaataagagattcatatgctaaattattgggtcatcagaatttgaaacaaaaaatcaagcatgttgtgaagttgaaagatgaaaatagccaactcaaatcggaagtatcaaaactccgctgtcagcttgctaaaaaaaaacaaagtgagacaaaacttcaagaggaattgaataaagttctaggtatcaaacactttgatccttcaaaggcttttcatcatgaaagtaaagaaaattttgccctgaagaccccattaaaagaaggcaatacaaactgttaccgagctcctatggagtgtcaagaatcatggaagtaaacatctgagaaacctgttgaagattatttcattcgtcttgttgttattgatgttgctgttattatatttgacatgggtattttataatgttgtatttaattttaactgccaatccttaaatatgtgaaaggaacattttttaccaaagtgtcttttgacattttattttttcttgcaaatacctcctccctaatgctcacctttatcacctcattctgaaccctttcgctggctttccagcttagaatgcatctcatcaacttaaaagtcagtatcatattattatcctcctgttctgaaaccttagtttcaagagtctaaaccccagattcttcagcttgatcctggaggtcttttctagtctgagcttctttagctaggctaaaacaccttggcttgttattgcctctactttgattctgataatgctcacttggtcctacctattatccttctacttgtccagttcaaataagaaataaggacaagcctaacttcatagaaacctctctatttttaatcagttgtttaataatttacaggttcttaggctccatcctgtttgtatgaaattataatctgtggattggcctttaagcctgcattcttaacaaactcttcagttaattcttagatacactaaaaatctgagaaactctacatgtaactatttcttcagagtttgtcatatactgcttgtcatctgcatgtctactcagcatttgattaacatttgtgtaatatgaaataaaattacacagtaagtcatttaaccaa

SEQ ID NO: 174947 - DNA, 2175 bp, Artificial Sequence
  derived and/or modified sequence
atgtccttccccaaggcccccctgaagcgcttcaatgaccccagcggctgtgcccccagccctggggcctatgatgtgaagaccctggaggtgctgaagggccctgtgtccttccagaagagccagcgcttcaagcagcagaaggagagcaagcagaacctgaatgtggacaaggacaccaccctgcctgccagcgccaggaaggtgaagagcagcgagagcaaggagagccagaagaatgacaaggacctgaagatcctggagaaggagatccgggtgctgctgcaggagcggggggcccaggaccggcgcatccaggacctggagacagagctggagaagatggaggcccggctgaatgctgccctgcgggagaagaccagcctgagcgccaacaatgccaccctggagaagcagctgattgagctgaccaggaccaatgagctgctgaagagcaagttctctgaaaatggaaaccagaagaacctgcgcatcctgagcctggagctgatgaagctgaggaacaagcgggagaccaagatgaggggcatgatggccaagcaggagggcatggagatgaagctgcaggtgacccagaggagcctggaggagagccagggcaagatcgcccagctggagggcaagctggtgtccattgagaaggagaagattgatgagaagtcagaaacagagaagctgctggagtacatcgaggagatcagctgtgccagtgaccaggtggagaagtacaagctggacatcgcccagctggaggagaacctgaaggagaagaatgatgagatcctgagcctgaagcagagcctggaggagaacatcgtcatcctgagcaagcaggtggaggacctgaatgtgaagtgccagctgctggagaaggagaaggaggaccacgtgaacagaaaccgggagcacaatgaaaacctgaatgctgagatgcagaacctgaagcagaagttcatcctggagcagcaggagcgggagaagctgcagcagaaggagctgcagattgacagcctgctgcagcaggagaaggagctgagcagcagcctgcaccagaagctgtgcagcttccaggaggagatggtgaaggagaagaacctgtttgaggaggagctgaagcagaccctggatgagctggacaagctgcagcagaaggaggagcaggccgagcggctggtgaagcagctggaggaggaggccaagagcagagctgaggagctgaagctgctggaggagaagctgaagggcaaggaggccgagctggagaagagcagcgctgcccacacccaggccaccctgctgctgcaggagaagtatgacagcatggtgcagagcctggaggatgtgacagcccagtttgagagctacaaggccctgacagccagcgagattgaggacctgaagctggagaacagcagcctgcaggagaaggccgccaaggccggcaagaatgcagaagatgtgcagcaccagatcctggccacagagagcagcaaccaggagtatgtgaggatgctgctggacctgcagaccaagagcgccctgaaggagacagagatcaaggagatcaccgtgtccttcctgcagaagatcacagacctgcagaaccagctgaagcagcaggaggaggacttcaggaagcagctggaggatgaggagggcaggaaggccgagaaggagaacaccacagctgagctgacagaggagatcaacaagtggaggctgctgtatgaggagctgtacaacaagaccaagcccttccagctgcagctggatgcctttgaggtggagaagcaggccctgctgaatgaacatggagctgcccaggagcagctgaacaagatccgggacagctatgccaagctgctgggccaccagaacctgaagcagaagatcaagcacgtggtgaagctgaaggatgagaacagccagctgaagtctgaggtgtccaagctgcgctgccagctggccaagaagaagcagagcgagaccaagctgcaggaggagctgaacaaggtgctgggcatcaagcactttgaccccagcaaggccttccaccacgagagcaaagaaaattttgccctgaagacccccctgaaggagggcaacaccaactgctaccgggcccccatggagtgccaggagagctggaagtag

SEQ ID NO: 174948 - DNA, 2175 bp, Artificial Sequence
  derived and/or modified sequence
atgagcttccccaaggcccccctgaagcggttcaacgaccccagcggttgtgccccaagtcctggtgcatatgatgtgaaaacccttgaggtgcttaaagggcccgtctcctttcagaagagccagagattcaagcagcagaaagaatcaaaacagaatcttaacgtggataaagacaccaccttacctgctagtgcgcggaaggtcaagagctccgaaagcaaagaaagccagaagaatgataaagacctcaagatcctggagaaagagatcagagtgcttttgcaggagcggggggcccaggatcgccggatacaggatcttgagaccgaactcgagaagatggaagctaggctgaatgccgccttaagggaaaagacatccctctcagcgaacaacgccacactggaaaagcagctcattgaactgacaagaaccaatgagttactgaagtctaagttcagtgagaacgggaaccagaaaaacttgcggatcctgtccctggagctcatgaagttgaggaacaagagggagacaaaaatgcgagggatgatggcaaaacaggagggaatggagatgaagttgcaggtgacccagcgcagtctcgaggaaagtcaaggcaaaatcgcccagttagaggggaaacttgtgtctatagaaaaagaaaagattgacgaaaagtccgagactgagaagctgctcgagtacattgaggaaatatcctgcgctagtgatcaggtagaaaaatataagctggacatcgcccagctggaggagaatttgaaggaaaagaatgatgagatactgagtctgaaacagagtttagaagaaaatatcgtcattctgtcaaaacaggtcgaggaccttaatgtgaaatgccaactgctggaaaaggagaaagaggaccatgtgaaccgcaaccgcgagcacaatgagaatctcaatgctgagatgcaaaatctgaagcaaaaattcatcctagagcagcaggagagggagaagctccagcaaaaggaacttcagattgactccttgctgcagcaggaaaaggaactcagctcatccctacatcagaagctctgcagttttcaggaagaaatggtaaaggaaaagaacctctttgaagaagagctgaaacagacacttgatgagcttgataaactacagcagaaggaggagcaagcagagcgcctggtaaagcaactggaggaagaagcgaaatcccgtgcggaagaacttaagctgctggaagagaagctaaagggaaaggaagctgagctggagaaatcaagcgccgctcacacacaggccacgttgctactgcaggagaagtatgatagcatggtccaatccttagaggacgtgaccgcccagttcgagagctataaggctttgaccgcctctgagatcgaagatctgaaactggagaattcgagccttcaggagaaggcagccaaagcaggcaagaatgctgaagatgttcaacaccagattcttgctactgaatcctctaaccaggaatatgtgagaatgctcctggatctgcagactaagtcagccctcaaggaaacagaaattaaagagataactgtttccttcctccagaaaatcaccgacctgcagaatcagcttaagcagcaagaagaggactttcgcaaacagcttgaagacgaggagggacgcaaggcggaaaaggagaacacaacagccgaattgacggaggagataaacaaatggcgtttgttgtacgaggagttgtacaataagacgaaaccattccagctgcagctggatgcgttcgaggtcgagaagcaggccctgttaaatgaacatggagcggctcaggaacagctgaacaagattagagattcatacgctaaactgctggggcatcagaatctcaagcagaagataaaacatgtcgtcaagttgaaggacgaaaactcgcagctgaaatccgaagtgagcaagctgaggtgtcagctggccaagaaaaaacagtctgaaaccaaattacaggaggagctaaacaaggtgctcggaattaagcacttcgaccctagtaaggcttttcaccatgaaagcaaagaaaacttcgcactgaaaacaccacttaaggaaggtaacaccaattgctatcgagcccccatggagtgccaggagtcatggaagtag

SEQ ID NO: 174949 - DNA, 2175 bp, Artificial Sequence
  derived and/or modified sequence
atgtcctttccaaaggctccactgaagcgcttcaacgacccatctgggtgcgcaccctcaccaggcgcttacgacgtaaaaacactggaggtactcaagggacctgtgtctttccaaaagagtcagagattcaagcaacagaaagagtcaaagcagaacttgaacgttgataaggacaccacactccccgcatccgcaagaaaggttaaatccagcgaatctaaggagtctcaaaagaatgataaagatctcaaaattctggaaaaggagattcgtgtcctgctgcaggagagaggcgctcaggatcgtcgtattcaggacctggaaactgagctagagaaaatggaagccagactgaacgccgcactaagggagaagaccagcctgtccgcaaacaatgcaaccctcgagaaacagctcattgagctgacccgcaccaatgagctgttgaagagtaaattttcagaaaatggcaatcaaaaaaacctgagaattttgagtctcgagctaatgaaacttcgaaacaagcgagagaccaagatgcgaggcatgatggctaaacaagaagggatggaaatgaaactgcaagttacccaacgctccctggaagaatcgcaagggaagatcgcccaattagaaggaaagttggtttcaattgaaaaagaaaaaatcgacgagaaatcagaaacggaaaaactcctcgaatacatagaggaaatcagctgtgcgagtgaccaagtcgagaaatataagctcgatatcgcccagctggaagagaatctgaaagaaaaaaatgatgagattctcagccttaagcagtctcttgaggagaatatcgtgatcctttccaagcaggtcgaagatctcaacgttaagtgccagctgttggagaaagaaaaagaagaccatgttaaccggaacagggagcataacgagaacttgaacgcggagatgcagaacctcaaacagaagttcatcctcgagcagcaggagcgagagaaactgcaacagaaggagcttcagatcgattctctcctccagcaggagaaagagctctcctcctccctccatcagaaactgtgttccttccaggaagaaatggtgaaggagaagaacctctttgaagaagagctgaagcagaccctagacgaactagataagctgcagcagaaggaagaacaggccgaacgcctcgttaagcagctggaagaagaggccaaatcccgcgctgaagagcttaagttactagaggagaagctgaagggaaaagaggcagaattggagaagagtagtgccgctcatacacaggccaccctgcttctccaggagaagtatgactcgatggtgcagagtctcgaagatgtcacagcccaattcgaatcttataaggccctcacagcatccgaaattgaagatctaaagttggaaaattctagcctccaagagaaggcggctaaagccggtaagaacgcagaggacgtgcaacatcaaatccttgcgacagaatccagtaaccaagagtacgtgaggatgctgctcgatcttcagaccaaatcagcactgaaggaaaccgagattaaagagataacagtgtcttttctgcagaagattaccgacctccagaatcagctcaagcagcaggaggaggactttagaaagcaactcgaagatgaagagggcaggaaggccgaaaaggaaaacacgaccgctgaactgaccgaggagatcaataaatggcggttactgtacgaggagctatataataagaccaagcctttccagctgcaactggatgcatttgaagttgagaaacaggctctgctgaatgagcacggggctgcgcaggagcaactgaacaagatcagggactcttatgccaaactcctcgggcatcagaacttgaagcagaagattaaacacgtcgtcaaactgaaggatgagaactcccaactgaaatccgaggtgagcaagctgcggtgccagctggctaaaaaaaagcaatccgaaaccaagctgcaggaggagctcaacaaggtactggggattaaacactttgatccttctaaggcattccatcatgaatctaaagagaacttcgccctgaagactccactgaaggaagggaacaccaattgttatcgggcacctatggagtgccaagaatcatggaagtag

SEQ ID NO: 174950 - protein, 709 aa, Artificial Sequence
  derived and/or modified sequence
MSFPKAPLKRFNDPSGCAPSPGAYDVKTLEVLKGPVSFQKSQRFKQQKESKQNLNVDKDTTLPASARKVKSSESKIRVLLQERGAQDRRIQDLETELEKMEARLNAALREKTSLSANNATLEKQLIELTRTNELLKSKFSENGNQKNLRILSLELMKLRNKRETKMRGMMAKQEGMEMKLQVTQRSLEESQGKIAQLEGKLVSIEKEKIDEKSETEKLLEYIEEISCASDQVEKYKLDIAQLEENLKEKNDEILSLKQSLEENIVILSKQVEDLNVKCQLLEKEKEDHVNRNREHNENLNAEMQNLKQKFILEQQEREKLQQKELQIDSLLQQEKELSSSLHQKLCSFQEEMVKEKNLFEEELKQTLDELDKLQQKEEQAERLVKQLEEEAKSRAEELKLLEEKLKGKEAELEKSSAAHTQATLLLQEKYDSMVQSLEDVTAQFESYKALTASEIEDLKLENSSLQEKAAKAGKNAEDVQHQILATESSNQEYVRMLLDLQTKSALKETEIKEITVSFLQKITDLQNQLKQQEEDFRKQLEDEEGRKAEKENTTAELTEEINKWRLLYEELYNKTKPFQLQLDAFEVEKQALLNEHGAAQEQLNKIRDSYAKLLGHQNLKQKIKHVVKLKDENSQLKSEVSKLRCQLAKKKQSETKLQEELNKVLGIKHFDPSKAFHHESKENFALKTPLKEGNTNCYRAPMECQESWK

SEQ ID NO: 174951 - protein, 331 aa, Artificial Sequence
  derived and/or modified sequence
MSFPKAPLKRFNDPSGCAPSPGAYDVKTLEVLKGPVSFQKSQRFKQQKESKQNLNVDKDTTLPASARKVKSSESKIRVLLQERGAQDRRIQDLETELEKMEARLNAALREKTSLSANNATLEKQLIELTRTNELLKSKFSENGNQKNLRILSLELMKLRNKRETKMRGMMAKQEGMEMKLQVTQRSLEESQGKIAQLEGKLVSIEKEKIDEKSETEKLLEYIEEISCASDQVEKYKLDIAQLEENLKEKNDEILSLKQSLEENIVILSKQVEDLNVKCQLLEKEKEDHVNRNREHNENLNAEMQNLKQKFILEQQEREKLQQKKKQMRRKK

SEQ ID NO: 174952 - DNA, 2130 bp, Artificial Sequence
  derived and/or modified sequence
atgagcttccccaaggcccccctgaagagattcaacgaccccagcggctgcgcccccagccccggcgcctacgacgtgaagaccctggaggtgctgaagggccccgtgagcttccagaagagccagagattcaagcagcagaaggagagcaagcagaacctgaacgtggacaaggacaccaccctgcccgccagcgccagaaaggtgaagagcagcgagagcaagatcagagtgctgctgcaggagagaggcgcccaggacagaagaatccaggacctggagaccgagctggagaagatggaggccagactgaacgccgccctgagagagaagaccagcctgagcgccaacaacgccaccctggagaagcagctgatcgagctgaccagaaccaacgagctgctgaagagcaagttcagcgagaacggcaaccagaagaacctgagaatcctgagcctggagctgatgaagctgagaaacaagagagagaccaagatgagaggcatgatggccaagcaggagggcatggagatgaagctgcaggtgacccagagaagcctggaggagagccagggcaagatcgcccagctggagggcaagctggtgagcatcgagaaggagaagatcgacgagaagagcgagaccgagaagctgctggagtacatcgaggagatcagctgcgccagcgaccaggtggagaagtacaagctggacatcgcccagctggaggagaacctgaaggagaagaacgacgagatcctgagcctgaagcagagcctggaggagaacatcgtgatcctgagcaagcaggtggaggacctgaacgtgaagtgccagctgctggagaaggagaaggaggaccacgtgaacagaaacagagagcacaacgagaacctgaacgccgagatgcagaacctgaagcagaagttcatcctggagcagcaggagagagagaagctgcagcagaaggagctgcagatcgacagcctgctgcagcaggagaaggagctgagcagcagcctgcaccagaagctgtgcagcttccaggaggagatggtgaaggagaagaacctgttcgaggaggagctgaagcagaccctggacgagctggacaagctgcagcagaaggaggagcaggccgagagactggtgaagcagctggaggaggaggccaagagcagagccgaggagctgaagctgctggaggagaagctgaagggcaaggaggccgagctggagaagagcagcgccgcccacacccaggccaccctgctgctgcaggagaagtacgacagcatggtgcagagcctggaggacgtgaccgcccagttcgagagctacaaggccctgaccgccagcgagatcgaggacctgaagctggagaacagcagcctgcaggagaaggccgccaaggccggcaagaacgccgaggacgtgcagcaccagatcctggccaccgagagcagcaaccaggagtacgtgagaatgctgctggacctgcagaccaagagcgccctgaaggagaccgagatcaaggagatcaccgtgagcttcctgcagaagatcaccgacctgcagaaccagctgaagcagcaggaggaggacttcagaaagcagctggaggacgaggagggcagaaaggccgagaaggagaacaccaccgccgagctgaccgaggagatcaacaagtggagactgctgtacgaggagctgtacaacaagaccaagcccttccagctgcagctggacgccttcgaggtggagaagcaggccctgctgaacgagcacggcgccgcccaggagcagctgaacaagatcagagacagctacgccaagctgctgggccaccagaacctgaagcagaagatcaagcacgtggtgaagctgaaggacgagaacagccagctgaagagcgaggtgagcaagctgagatgccagctggccaagaagaagcagagcgagaccaagctgcaggaggagctgaacaaggtgctgggcatcaagcacttcgaccccagcaaggccttccaccacgagagcaaggagaacttcgccctgaagacccccctgaaggagggcaacaccaactgctacagagcccccatggagtgccaggagagctggaagtag

SEQ ID NO: 174953 - DNA, 996 bp, Artificial Sequence
  derived and/or modified sequence
atgagcttccccaaggcccccctgaagagattcaacgaccccagcggctgcgcccccagccccggcgcctacgacgtgaagaccctggaggtgctgaagggccccgtgagcttccagaagagccagagattcaagcagcagaaggagagcaagcagaacctgaacgtggacaaggacaccaccctgcccgccagcgccagaaaggtgaagagcagcgagagcaagatcagagtgctgctgcaggagagaggcgcccaggacagaagaatccaggacctggagaccgagctggagaagatggaggccagactgaacgccgccctgagagagaagaccagcctgagcgccaacaacgccaccctggagaagcagctgatcgagctgaccagaaccaacgagctgctgaagagcaagttcagcgagaacggcaaccagaagaacctgagaatcctgagcctggagctgatgaagctgagaaacaagagagagaccaagatgagaggcatgatggccaagcaggagggcatggagatgaagctgcaggtgacccagagaagcctggaggagagccagggcaagatcgcccagctggagggcaagctggtgagcatcgagaaggagaagatcgacgagaagagcgagaccgagaagctgctggagtacatcgaggagatcagctgcgccagcgaccaggtggagaagtacaagctggacatcgcccagctggaggagaacctgaaggagaagaacgacgagatcctgagcctgaagcagagcctggaggagaacatcgtgatcctgagcaagcaggtggaggacctgaacgtgaagtgccagctgctggagaaggagaaggaggaccacgtgaacagaaacagagagcacaacgagaacctgaacgccgagatgcagaacctgaagcagaagttcatcctggagcagcaggagagagagaagctgcagcagaagaagaagcagatgagaagaaagaagtag

SEQ ID NO: 174954 - DNA, 2130 bp, Artificial Sequence
  derived and/or modified sequence
atgtcattcccaaaagccccgctgaagcggtttaacgacccctctggctgcgccccaagtccaggcgcctatgacgtcaagacgctggaggtcttaaaggggcccgtaagcttccagaagtcccagcgcttcaagcagcaaaaagagtctaaacagaacctgaacgtggacaaagacaccactctgcccgccagtgcccgtaaggtgaagtccagcgagtccaagataagggtgcttctccaagagcgaggagcacaggaccgtagaattcaggacttggaaacagagctcgagaaaatggaggcccgcctgaatgctgccctacgggaaaagacttctctttctgctaacaatgctacacttgagaaacagttgattgagctcacaagaaccaacgagctgctaaagtccaaattcagcgaaaacggaaaccagaaaaatttacggatcctttctctggaacttatgaagttacggaacaaacgcgaaaccaaaatgagggggatgatggccaaacaagagggcatggagatgaaattacaagttactcagagatctctggaagagagccagggaaagattgcccagctcgaaggcaaactggtcagcattgagaaggagaaaatcgatgagaagtcagagacagagaagcttctggaatatattgaggaaataagttgtgccagcgaccaggtcgaaaagtataagcttgatatcgcccagctggaggagaatctgaaagaaaagaacgacgagatcctttcgctgaagcagtctctggaagaaaacatagtgatcctcagcaagcaggtggaggatctgaacgttaagtgccagctcctggagaaagagaaagaagatcacgtgaatagaaatcgagagcataatgagaatctaaatgccgaaatgcagaatctgaagcagaagttcatcctggaacagcaagaacgcgagaagctgcagcagaaggagttacagatcgacagcttactgcagcaagaaaaggaattgtcttcttccctgcaccaaaagctgtgttcctttcaggaggagatggtaaaggaaaagaatctatttgaggaggagctgaagcagaccctcgacgaactagacaaacttcagcagaaggaagagcaagctgaaagactagtaaagcagttagaagaagaagcaaaaagccgcgctgaagaattaaagcttctagaggagaagctcaaggggaaggaagccgagttagagaaatccagcgcagcacacacacaggccacgctcctactacaggagaagtatgatagtatggtgcagtcccttgaagacgtgacagctcagtttgaatcttataaggccctgacagcaagcgagatcgaggatctcaagcttgagaactcctcactgcaggagaaggccgctaaggcaggcaaaaatgcggaagacgtgcagcatcagatcctcgcaacagagtcatcaaatcaggagtacgttcgaatgttattggatttgcagactaaatctgccctaaaagagacggagataaaggaaatcactgtatccttcttacaaaagatcacagatcttcagaaccagctcaagcagcaggaggaggacttccgtaagcaactggaagacgaagagggccgaaaggctgaaaaggagaacactacggcagagctgacggaggagattaataagtggaggctgttgtacgaggagctctataacaaaaccaagccattccagctccaactagatgccttcgaggtggaaaagcaggccctgttgaatgaacatggcgcggcccaggaacagttgaacaagatacgggatagttacgcaaagctgttgggccaccagaacctcaagcagaagatcaaacacgtagttaaactcaaggatgagaatagccagctcaagtccgaggtgtcgaaattgagatgtcagctggctaagaagaaacagtctgagactaagctgcaggaagaactaaacaaagtcctgggtattaagcatttcgatccttctaaagccttccatcacgagagcaaagaaaacttcgccctgaagactcccctaaaagaaggcaacacgaattgctacagagcaccaatggaatgccaggagagctggaagtag

SEQ ID NO: 174955 - DNA, 996 bp, Artificial Sequence
  derived and/or modified sequence
atgtcatttcctaaggctccactcaaacgcttcaacgatccatctggatgtgctccaagcccaggcgcctacgacgtcaaaacgttggaggttcttaaagggcccgtatcatttcagaaaagccaaagattcaagcagcagaaagaatctaagcagaatctgaacgtggacaaagacacaacccttcccgctagcgcacggaaagtgaaatctagcgaatccaagattcgcgttctgctgcaggaacggggcgcgcaagatagacggatccaggatttagaaaccgagcttgagaaaatggaggcgcggcttaacgccgcacttagggaaaagacttccctttccgccaacaacgccacactagagaaacagttaattgagcttaccaggacgaacgagctcctcaaatctaagttctcagagaatggcaaccagaaaaacctccggattctatcactcgagttaatgaaactgagaaataaaagagagactaaaatgcgggggatgatggcaaagcaggagggtatggagatgaaactccaggtcactcagcggagccttgaggaatctcagggcaagatcgcccagttagaaggtaaattggtgtctatcgagaaggaaaagatcgacgagaaatcagagacggagaaactcttggagtacatcgaagaaatctcatgcgctagcgaccaagtggaaaaatacaaactggacattgcccagctggaagagaatcttaaggagaaaaatgatgagatcctgtctctgaaacagtctctcgaagagaacatagtcattctgagtaaacaagtagaagacctgaacgtcaaatgtcagctcctcgagaaggagaaggaggaccacgtcaataggaatagagaacacaacgaaaacctcaacgctgaaatgcaaaaccttaagcagaagttcatactggaacagcaggaacgtgagaagttacagcagaagaagaagcagatgcggaggaaaaagtag

SEQ ID NO: 174956 - DNA, 2872 bp, Artificial Sequence
  derived and/or modified sequence
gggaagtgcgcttgcgcaaatgctaggttacacttgagtaactccgggaatgactgggtgggtggggcggggaacagtaacggtctcctattggatggcagcctaaactcgcaggccagctaattggacgcaatcagaacccagcattctttcttcgtgttcctgtgcgggattggtgtgcccaggggtttggctttccaattggctaacgccggggtgggtggggaatgtggggagatttgaatttgaaaccggtagggagtgataatccgcattcagttgtcgaggagtgccagtcaccttcagtttctggagctggccgtcaacatgtcctttcctaaggcgcccttgaaacgattcaatgacccttctggttgtgcaccatctccaggtgcttatgatgttaaaactttagaagtattgaaaggaccagtatcctttcagaaatcacaaagatttaaacagcaaaaagaatctaaacaaaatcttaatgttgacaaagatactaccttgcctgcttcagctagaaaagttaagtcttcggaatcaaagattcgtgttcttctacaggaacgtggtgcccaggacaggcggatccaggatctggaaactgagttggaaaagatggaagcaaggctaaatgctgcactaagggaaaaaacatctctctctgcaaataatgctacactggaaaaacaacttattgaattgaccaggactaatgaactactaaaatctaagttttctgaaaatggtaaccagaagaatttgagaattctaagcttggagttgatgaaacttagaaacaaaagagaaacaaagatgaggggtatgatggctaagcaagaaggcatggagatgaagctgcaggtcacccaaaggagtctcgaagagtctcaagggaaaatagcccaactggagggaaaacttgtttcaatagagaaagaaaagattgatgaaaaatctgaaacagaaaaactcttggaatacatcgaagaaattagttgtgcttcagatcaagtggaaaaatacaagctagatattgcccagttagaagaaaatttgaaagagaagaatgatgaaattttaagccttaagcagtctcttgaggagaatattgttatattatctaaacaagtagaagatctaaatgtgaaatgtcagctgcttgaaaaagaaaaagaagaccatgtcaacaggaatagagaacacaacgaaaatctaaatgcagagatgcaaaacttaaaacagaagtttattcttgaacaacaggaacgtgaaaagcttcaacaaaaagaattacaaattgattcacttctgcaacaagagaaagaattatcttcgagtcttcatcagaagctctgttcttttcaagaggaaatggttaaagagaagaatctgtttgaggaagaattaaagcaaacactggatgagcttgataaattacagcaaaaggaggaacaagctgaaaggctggtcaagcaattggaagaggaagcaaaatctagagctgaagaattaaaactcctagaagaaaagctgaaagggaaggaggctgaactggagaaaagtagtgctgctcatacccaggccaccctgcttttgcaggaaaagtatgacagtatggtgcaaagccttgaagatgttactgctcaatttgaaagctataaagcgttaacagccagtgagatagaagatcttaagctggagaactcatcattacaggaaaaagcggccaaggctgggaaaaatgcagaggatgttcagcatcagattttggcaactgagagctcaaatcaagaatatgtaaggatgcttctagatctgcagaccaagtcagcactaaaggaaacagaaattaaagaaatcacagtttcttttcttcaaaaaataactgatttgcagaaccaactcaagcaacaggaggaagactttagaaaacagctggaagatgaagaaggaagaaaagctgaaaaagaaaatacaacagcagaattaactgaagaaattaacaagtggcgtctcctctatgaagaactatataataaaacaaaaccttttcagctacaactagatgcttttgaagtagaaaaacaggcattgttgaatgaacatggtgcagctcaggaacagctaaataaaataagagattcatatgctaaattattgggtcatcagaatttgaaacaaaaaatcaagcatgttgtgaagttgaaagatgaaaatagccaactcaaatcggaagtatcaaaactccgctgtcagcttgctaaaaaaaaacaaagtgagacaaaacttcaagaggaattgaataaagttctaggtatcaaacactttgatccttcaaaggcttttcatcatgaaagtaaagaaaattttgccctgaagaccccattaaaagaaggcaatacaaactgttaccgagctcctatggagtgtcaagaatcatggaagtaaacatctgagaaacctgttgaagattatttcattcgtcttgttgttattgatgttgctgttattatatttgacatgggtattttataatgttgtatttaattttaactgccaatccttaaatatgtgaaaggaacattttttaccaaagtgtcttttgacattttattttttcttgcaaatacctcctccctaatgctcacctttatcacctcattctgaaccctttcgctggctttccagcttagaatgcatctcatcaacttaaaagtcagtatcatattattatcctcctgttctgaaaccttagtttcaagagtctaaaccccagattcttcagcttgatcctggaggtcttttctagtctgagcttctttagctaggctaaaacaccttggcttgttattgcctctacttt

SEQ ID NO: 174957 - DNA, 1175 bp, Artificial Sequence
  derived and/or modified sequence
attctttcttcgtgttcctgtgcgggattggtgtgcccaggggtttggctttccaattggctaacgccggggtgggtggggaatgtggggagatttgaatttgaaaccggtagggagtgataatccgcattcagttgtcgaggagtgccagtcaccttcagtttctggagctggccgtcaacatgtcctttcctaaggcgcccttgaaacgattcaatgacccttctggttgtgcaccatctccaggtgcttatgatgttaaaactttagaagtattgaaaggaccagtatcctttcagaaatcacaaagatttaaacagcaaaaagaatctaaacaaaatcttaatgttgacaaagatactaccttgcctgcttcagctagaaaagttaagtcttcggaatcaaagattcgtgttcttctacaggaacgtggtgcccaggacaggcggatccaggatctggaaactgagttggaaaagatggaagcaaggctaaatgctgcactaagggaaaaaacatctctctctgcaaataatgctacactggaaaaacaacttattgaattgaccaggactaatgaactactaaaatctaagttttctgaaaatggtaaccagaagaatttgagaattctaagcttggagttgatgaaacttagaaacaaaagagaaacaaagatgaggggtatgatggctaagcaagaaggcatggagatgaagctgcaggtcacccaaaggagtctcgaagagtctcaagggaaaatagcccaactggagggaaaacttgtttcaatagagaaagaaaagattgatgaaaaatctgaaacagaaaaactcttggaatacatcgaagaaattagttgtgcttcagatcaagtggaaaaatacaagctagatattgcccagttagaagaaaatttgaaagagaagaatgatgaaattttaagccttaagcagtctcttgaggagaatattgttatattatctaaacaagtagaagatctaaatgtgaaatgtcagctgcttgaaaaagaaaaagaagaccatgtcaacaggaatagagaacacaacgaaaatctaaatgcagagatgcaaaacttaaaacagaagtttattcttgaacaacaggaacgtgaaaagcttcaacaaaaaaagaaacaaatgagaagaaagaaa

SEQ ID NO: 174958 - DNA, 2130 bp, Artificial Sequence
  derived and/or modified sequence
atgtccttccccaaggcccccctgaagcgcttcaatgaccccagcggctgtgcccccagccctggggcctatgatgtgaagaccctggaggtgctgaagggccctgtgtccttccagaagagccagcgcttcaagcagcagaaggagagcaagcagaacctgaatgtggacaaggacaccaccctgcctgccagcgccaggaaggtgaagagcagcgagagcaagatccgggtgctgctgcaggagcggggggcccaggaccggcgcatccaggacctggagacagagctggagaagatggaggcccggctgaatgctgccctgcgggagaagaccagcctgagcgccaacaatgccaccctggagaagcagctgattgagctgaccaggaccaatgagctgctgaagagcaagttctctgaaaatggaaaccagaagaacctgcgcatcctgagcctggagctgatgaagctgaggaacaagcgggagaccaagatgaggggcatgatggccaagcaggagggcatggagatgaagctgcaggtgacccagaggagcctggaggagagccagggcaagatcgcccagctggagggcaagctggtgtccattgagaaggagaagattgatgagaagtcagaaacagagaagctgctggagtacatcgaggagatcagctgtgccagtgaccaggtggagaagtacaagctggacatcgcccagctggaggagaacctgaaggagaagaatgatgagatcctgagcctgaagcagagcctggaggagaacatcgtcatcctgagcaagcaggtggaggacctgaatgtgaagtgccagctgctggagaaggagaaggaggaccacgtgaacagaaaccgggagcacaatgaaaacctgaatgctgagatgcagaacctgaagcagaagttcatcctggagcagcaggagcgggagaagctgcagcagaaggagctgcagattgacagcctgctgcagcaggagaaggagctgagcagcagcctgcaccagaagctgtgcagcttccaggaggagatggtgaaggagaagaacctgtttgaggaggagctgaagcagaccctggatgagctggacaagctgcagcagaaggaggagcaggccgagcggctggtgaagcagctggaggaggaggccaagagcagagctgaggagctgaagctgctggaggagaagctgaagggcaaggaggccgagctggagaagagcagcgctgcccacacccaggccaccctgctgctgcaggagaagtatgacagcatggtgcagagcctggaggatgtgacagcccagtttgagagctacaaggccctgacagccagcgagattgaggacctgaagctggagaacagcagcctgcaggagaaggccgccaaggccggcaagaatgcagaagatgtgcagcaccagatcctggccacagagagcagcaaccaggagtatgtgaggatgctgctggacctgcagaccaagagcgccctgaaggagacagagatcaaggagatcaccgtgtccttcctgcagaagatcacagacctgcagaaccagctgaagcagcaggaggaggacttcaggaagcagctggaggatgaggagggcaggaaggccgagaaggagaacaccacagctgagctgacagaggagatcaacaagtggaggctgctgtatgaggagctgtacaacaagaccaagcccttccagctgcagctggatgcctttgaggtggagaagcaggccctgctgaatgagcacggggccgcccaggagcagctgaacaagatccgggacagctatgccaagctgctgggccaccagaacctgaagcagaagatcaagcacgtggtgaagctgaaggatgagaacagccagctgaagtctgaggtgtccaagctgcgctgccagctggccaagaagaagcagagcgagaccaagctgcaggaggagctgaacaaggtgctgggcatcaagcactttgaccccagcaaggccttccaccacgagagcaaggagaactttgccctgaagacccccctgaaggagggcaacaccaactgctaccgggcccccatggagtgccaggagagctggaagtag

SEQ ID NO: 174959 - DNA, 996 bp, Artificial Sequence
  derived and/or modified sequence
atgtccttccccaaggcccccctgaagcgcttcaatgaccccagcggctgtgcccccagccctggggcctatgatgtgaagaccctggaggtgctgaagggccctgtgtccttccagaagagccagcgcttcaagcagcagaaggagagcaagcagaacctgaatgtggacaaggacaccaccctgcctgccagcgccaggaaggtgaagagcagcgagagcaagatccgggtgctgctgcaggagcggggggcccaggaccggcgcatccaggacctggagacagagctggagaagatggaggcccggctgaatgctgccctgcgggagaagaccagcctgagcgccaacaatgccaccctggagaagcagctgattgagctgaccaggaccaatgagctgctgaagagcaagttctctgaaaatggaaaccagaagaacctgcgcatcctgagcctggagctgatgaagctgaggaacaagcgggagaccaagatgaggggcatgatggccaagcaggagggcatggagatgaagctgcaggtgacccagaggagcctggaggagagccagggcaagatcgcccagctggagggcaagctggtgtccattgagaaggagaagattgatgagaagtcagaaacagagaagctgctggagtacatcgaggagatcagctgtgccagtgaccaggtggagaagtacaagctggacatcgcccagctggaggagaacctgaaggagaagaatgatgagatcctgagcctgaagcagagcctggaggagaacatcgtcatcctgagcaagcaggtggaggacctgaatgtgaagtgccagctgctggagaaggagaaggaggaccacgtgaacagaaaccgggagcacaatgaaaacctgaatgctgagatgcagaacctgaagcagaagttcatcctggagcagcaggagcgggagaagctgcagcagaagaagaagcagatgaggaggaagaagtag

SEQ ID NO: 174960 - DNA, 2130 bp, Artificial Sequence
  derived and/or modified sequence
atgagcttccccaaggcccccctgaagcggttcaacgaccccagcgggtgtgccccttcccccggagcttacgacgtgaagactttggaagtcctgaagggcccagtgtcctttcagaagagtcagcggtttaagcagcaaaaggagtctaagcagaacctcaatgtagataaggataccacccttccagcttccgcaagaaaggtgaaaagtagcgaatccaaaatccgcgtgctgctgcaggagagaggtgcccaagaccgaaggatacaggatttggaaaccgagttggaaaagatggaggcaaggcttaacgccgccctcagggaaaaaacgtcactctctgccaacaatgcaacattggaaaagcagctgatcgagcttacccgcactaatgagctgctgaaatcaaagttcagcgagaatggcaaccagaaaaatctgaggatcctctcacttgagctgatgaagctgcgaaacaagagggagactaaaatgcgtggcatgatggccaagcaggagggcatggagatgaagttgcaagttacccagcgctccctagaggaaagccaaggtaagatcgcacaactggagggaaaattagtctccattgaaaaggaaaagattgatgagaagtcagagacggaaaagctgctagagtatatcgaggaaatcagctgtgcctctgatcaggtcgagaaatacaagctcgacatcgcacaactggaggaaaacctcaaagagaagaacgatgaaattctctctttgaaacagtccctggaggagaacattgtgatcttgagtaagcaagtcgaagatctgaatgtgaaatgccagctgctggagaaggagaaagaagaccatgtcaatagaaaccgggaacataacgaaaatctgaatgcagagatgcaaaacctgaagcaaaaatttattttagagcagcaggaacgggaaaaactccagcagaaggagcttcagatcgacagtcttctgcaacaggaaaaagagcttagttccagtctgcaccagaagctttgtagtttccaagaggagatggttaaggaaaagaatctcttcgaagaggaactcaagcaaactctggacgaactggataagctgcaacagaaggaggagcaagctgagagactcgtgaagcagctggaagaggaggctaagtctcgggctgaagagcttaaactgctggaggaaaagcttaaggggaaggaggctgaattggagaagtcttcagccgcacatacacaagcaactctgcttctccaggaaaagtacgactcaatggttcagtcactggaggatgtcaccgcacaattcgaatcttacaaggcgctgacagccagtgagattgaagatcttaagctggagaacagtagcttgcaagagaaggctgctaaggccggcaagaatgccgaggacgttcagcaccagatcttggccacagagtccagcaatcaggagtatgtaagaatgttgctggacctgcagacgaaatccgcccttaaggaaacagagattaaggagatcacggtgtccttcttgcagaagatcacggacttacagaaccaattaaagcaacaagaggaggattttaggaaacaactggaagatgaggaaggtcgaaaggccgagaaagaaaacaccacagccgagctgacggaggagattaacaaatggcgtttgctttatgaggagctttacaacaagaccaaaccttttcaactgcaacttgacgccttcgaggtagaaaagcaggctctcctaaacgaacacggggcagcccaggagcagttaaacaaaatacgcgattcctatgccaaactcctgggtcatcagaacctcaaacagaagattaaacacgtggtaaaattaaaggacgagaacagccaacttaagtctgaggtgtccaagctgcggtgtcagctggccaagaagaagcaatccgaaactaagttacaggaggagcttaataaggtgctcggaatcaaacacttcgatcctagcaaggccttccaccatgagtccaaagaaaacttcgcgcttaaaacacctcttaaggagggcaacaccaactgctaccgagcgccaatggaatgccaggagtcctggaaatag

SEQ ID NO: 174961 - DNA, 996 bp, Artificial Sequence
  derived and/or modified sequence
atgagcttccccaaggcccccctgaagcggttcaacgaccccagcggatgtgcacctagtcctggagcctatgacgtgaaaacactcgaagtcctgaagggcccggtgagttttcagaagagtcagcggttcaagcaacagaaagaatctaagcagaacttaaacgtcgataaagacacaacactgccagcttcagccagaaaagtgaaatcatctgaatcaaagattagagtactgttacaggagaggggggcccaggatcggcgaatacaagatctggaaaccgagctagagaaaatggaagccaggctaaacgccgctctgcgagagaagacatcgctgtccgccaacaatgccacacttgagaaacaactgattgagctcacccggacaaacgagctgttgaagagcaagttctcagaaaacgggaaccagaaaaacctccggatcctcagtctagaactcatgaagctccgcaataaaagggaaacaaagatgagggggatgatggccaagcaggaaggtatggaaatgaaacttcaggttacacagcggtccctagaagagtctcagggcaaaatcgctcagctcgaaggcaagctggtgtccattgagaaggagaagattgacgagaagtcagagaccgagaagctgctggagtacattgaggagatctcgtgcgcaagtgaccaggttgaaaagtataagctcgacatagcacagctggaagagaacctgaaggagaaaaatgatgagatcctgagcctgaagcagagcttggaggaaaacattgtgattctgtcaaagcaggttgaggatctcaacgttaaatgtcagttattggaaaaggaaaaggaagatcatgttaaccgtaatagagaacataatgagaatttaaatgcagagatgcagaacttgaaacagaaatttatcctcgaacagcaggagagagaaaaactgcagcagaaaaaaaagcaaatgaggagaaaaaagtag

SEQ ID NO: 174962 - DNA, 2130 bp, Artificial Sequence
  derived and/or modified sequence
atgtcattccctaaagctccccttaagcgctttaacgacccgtctggctgtgctccatctcctggcgcttatgatgttaaaacactggaagtcctcaaggggcctgtgagcttccagaagtcccagagatttaagcagcagaaagaatctaagcagaatttaaacgttgacaaagataccacgctgcccgcatccgctcgtaaggtcaaatcctccgaatcaaaaatccgagtgcttctgcaggagagaggggcacaggaccggaggatccaagatctcgagacggaactcgaaaagatggaagcgagactgaatgcggctctgcgcgagaagacaagtctgagcgccaataatgcgactctagaaaaacaactgatagagctgacacggaccaatgagctgctcaaatcaaagttcagcgagaatggcaatcagaagaatctccgcattctgagcctggagctgatgaaactgcgtaataagagggaaaccaaaatgcgaggaatgatggccaaacaagagggaatggagatgaagcttcaggtcacccagagatcacttgaagaatcccaaggtaaaatcgcccagctggagggcaaactcgtgagtatcgaaaaagagaaaatagacgagaaaagcgaaacagagaaactgctggaatacatcgaggagatctcgtgcgcctcagaccaggttgagaagtacaagctggacatcgctcagctggaagaaaatctgaaggagaaaaacgacgaaatcttatcactcaaacaatccctcgaggaaaatatcgtcatactgtctaagcaggtggaggatttgaacgtgaaatgccagctgctggagaaagaaaaagaggaccatgtgaatagaaaccgcgagcacaatgaaaacttgaacgccgagatgcagaacctgaagcagaagtttatcctcgagcagcaggagagggagaagctgcaacagaaagagctgcagatcgatagtctactgcagcaggagaaggaactgagttcgagtctgcaccagaagttatgttcgttccaggaggagatggtcaaagaaaaaaatttattcgaagaagagcttaagcagacactcgacgagctcgacaaattgcagcagaaggaagagcaggcagaacgactggttaaacagctcgaggaggaagccaaatcccgcgcagaggaattgaaactgctggaggagaaactcaagggcaaggaggctgaactagaaaaatcctctgctgcacatacccaggctacgttgctgttacaagagaagtatgatagcatggtgcaaagccttgaagacgtaacagcccagttcgaatcttataaagcactgactgcctccgagatcgaggatctcaagctcgagaattcctcactgcaagaaaaagctgccaaagcaggtaaaaacgcggaggacgttcagcaccaaatcctggcaacggaatccagcaaccaggagtatgtgagaatgctccttgatctccagacaaaatcagctctgaaagaaacagagatcaaggaaattaccgtgagttttctgcaaaagatcaccgatctgcagaaccaacttaagcagcaggaggaggacttcaggaagcaactggaggatgaagaaggtagaaaggctgagaaggagaataccactgcggaactcaccgaggaaatcaacaaatggcgtctcctctacgaggagctttataacaaaaccaagcccttccaacttcagctcgatgcctttgaagtcgagaagcaggcgttacttaatgagcacggagcggcacaggaacagctcaacaaaatccgcgattcttacgcaaaactgctcgggcaccagaacttgaagcagaaaattaaacatgttgtcaagctgaaagacgaaaattcacaactgaaaagtgaagtcagtaagttaagatgccaattagcgaagaagaagcaatctgagacgaagttacaagaggaacttaacaaagtgcttggaatcaagcactttgatccttctaaagcttttcaccacgagtcaaaagagaactttgctctcaagacaccactaaaagagggcaacactaactgttatcgggctcctatggagtgtcaagaatcctggaagtag

SEQ ID NO: 174963 - DNA, 996 bp, Artificial Sequence
  derived and/or modified sequence
atgagttttcccaaggcgcctctaaagcgttttaacgatccctccggttgcgccccaagtcccggagcttacgatgtcaaaaccctggaagttctcaaaggtcccgtatcatttcagaagagtcagaggttcaagcagcagaaagaatccaaacagaacctgaacgttgataaagatacgactttacccgcatctgcaaggaaagtgaagtctagcgaaagcaaaataagagtgctgcttcaagaacgaggggcacaagacaggagaatccaagacctggagaccgaattggagaaaatggaagctcgcctcaatgcagccctgcgtgagaagacctcactcagcgccaataatgccaccctggagaaacagctcatcgagctgacaaggaccaatgagttactgaagtcaaaattcagcgagaacggtaatcaaaaaaacctgagaatcttatcactggagctcatgaagctgagaaataagagagagaccaagatgagaggcatgatggctaagcaggaggggatggaaatgaaacttcaagtcacgcagagaagcctcgaggagagtcaggggaagattgcgcagctcgagggtaaactggtgagtatagaaaaggagaaaatagatgaaaaaagcgaaaccgagaagctcctggagtacattgaagaaatttcatgtgcttccgatcaggttgagaaatataagctggatattgcccagctggaagagaatttaaaagagaaaaacgacgagatcctgagcctgaagcaaagtctcgaggagaacatagtcatactgagcaagcaggtggaagaccttaacgtcaagtgccagctcctggaaaaggagaaggaggatcacgttaataggaaccgtgagcacaatgaaaacctgaatgcggaaatgcagaatttgaaacagaagtttatcctggagcagcaggagagggaaaaactccagcagaagaagaaacaaatgcgtcgcaaaaaatag

SEQ ID NO: 174964 - protein, 447 aa, Artificial Sequence
  derived and/or modified sequence
MLTFMASDSEEEVCDERTSLMSAESPTPRSCQEGRQGPEDGENTAQWRSQENEEDGEEDPDRYVCSGVPGRPPGLEEELTLKYGAKHVIMLFVPVTLCMIVVVATIKSVRFYTEKNGQLIYTPFTEDTPSVGQRLLNSVLNTLIMISVIVVMTIFLVVLYKYRCYKFIHGWLIMSSLMLLFLFTYIYLGEVLKTYNVAMDYPTLLLTVWNFGAVGMVCIHWKGPLVLQQAYLIMISALMALVFIKYLPEWSAWVILGAISVYDLVAVLCPKGPLRMLVETAQERNEPIFPALIYSSAMVWTVGMAKLDPSSQGALQLPYDPEMEDSYDSFGEPSYPEVFEPPLTGYPGEELEEEEERGVKLGLGDFIFYSVLVGKAAATGSGDWNTTLACFVAILIGLCLTLLLLAVFKKALPALPISITFGLIFYFSTDNLVRPFMDTLASHQLYI

SEQ ID NO: 174965 - DNA, 2299 bp, Artificial Sequence
  derived and/or modified sequence
ggggcctgggccggcgccgggtccggccgggcgctcagccagctgcgtaaactccgctggagcgcggcggcagagcaggcatttccagcagtgaggagacagccagaagcaagcttttggagctgaaggaacctgagacagaagctagtcccccctctgaattttactgatgaagaaactgaggccacagagctaaagtgacttttcccaaggtcgcccagcgaggacgtgggacttctcagacgtcaggagagtgatgtgagggagctgtgtgaccatagaaagtgacgtgttaaaaaccagcgctgccctctttgaaagccagggagcatcattcatttagcctgctgagaagaagaaaccaagtgtccgggattcagacctctctgcggccccaagtgttcgtggtgcttccagaggcagggctatgctcacattcatggcctctgacagcgaggaagaagtgtgtgatgagcggacgtccctaatgtcggctgagagccccacgccgcgctcctgccaggagggcaggcagggcccagaggatggagagaacactgcccagtggagaagccaggagaacgaggaggacggtgaggaggaccctgaccgctatgtctgtagtggggttcccgggcggccgccaggcctggaggaagagctgaccctcaaatacggagcgaagcacgtgatcatgctgtttgtgcctgtcactctgtgcatgatcgtggtggtagccaccatcaagtctgtgcgcttctacacagagaagaatggacagctcatctacacgccattcactgaggacacaccctcggtgggccagcgcctcctcaactccgtgctgaacaccctcatcatgatcagcgtcatcgtggttatgaccatcttcttggtggtgctctacaagtaccgctgctacaagttcatccatggctggttgatcatgtcttcactgatgctgctgttcctcttcacctatatctaccttggggaagtgctcaagacctacaatgtggccatggactaccccaccctcttgctgactgtctggaacttcggggcagtgggcatggtgtgcatccactggaagggccctctggtgctgcagcaggcctacctcatcatgatcagtgcgctcatggccctagtgttcatcaagtacctcccagagtggtccgcgtgggtcatcctgggcgccatctctgtgtatgatctcgtggctgtgctgtgtcccaaagggcctctgagaatgctggtagaaactgcccaggagagaaatgagcccatattccctgccctgatatactcatctgccatggtgtggacggttggcatggcgaagctggacccctcctctcagggtgccctccagctcccctacgacccggagatggaagactcctatgacagttttggggagccttcataccccgaagtctttgagcctcccttgactggctacccaggggaggagctggaggaagaggaggaaaggggcgtgaagcttggcctcggggacttcatcttctacagtgtgctggtgggcaaggcggctgccacgggcagcggggactggaataccacgctggcctgcttcgtggccatcctcattggcttgtgtctgaccctcctgctgcttgctgtgttcaagaaggcgctgcccgccctccccatctccatcacgttcgggctcatcttttacttctccacggacaacctggtgcggccgttcatggacaccctggcctcccatcagctctacatctgagggacatggtgtgccacaggctgcaagctgcagggaattttcattggatgcagttgtatagttttacactctagtgccatatatttttaagacttttctttccttaaaaaataaagtacgtgtttacttggtgaggaggaggcagaaccagctctttggtgccagctgtttcatcaccagactttggctcccgctttggggagcgcctcgcttcacggacaggaagcacagcaggtttatccagatgaactgagaaggtcagattagggcggggagaagagcatccggcatgagggctgagatgcgcaaagagtgtgctcgggagtggcccctggcacctgggtgctctggctggagaggaaaagccagttccctacgaggagtgttcccaatgctttgtccatgatgtccttgttattttattgcctttagaaactgagtcctgttcttgttacggcagtcacactgctgggaagtggcttaatagtaatatcaataaatagatgagtcctgttagaatcttgaaaa

SEQ ID NO: 174966 - DNA, 1344 bp, Artificial Sequence
  derived and/or modified sequence
atgctaacattcatggcaagcgattctgaggaagaggtctgcgacgaaaggacatcactgatgtccgcggagagcccgacaccaaggtcgtgtcaagagggtcgccaagggccggaagatggggagaataccgcacagtggcggagtcaggaaaatgaggaagacggagaagaggaccccgaccggtatgtgtgtagtggggttccaggtcgccctccaggtctcgaagaggaactcaccctaaaatacggcgccaaacacgtgattatgttgtttgtccccgtgactctctgtatgattgtcgtggtcgctaccataaagtctgtccgtttttacaccgaaaaaaacggacagctaatctatacacccttcaccgaggacaccccatccgtcggccagcgcctactgaacagcgtgttgaacaccctgatcatgatttcagtaattgtcgttatgactatcttcttggtagtcctatataaataccggtgctacaagttcatccacggttggcttatcatgtcctcgcttatgcttctgttcctctttacctatatttacttgggcgaagtactcaagacgtacaatgtcgccatggattacccaacgttgctactcactgtctggaattttggggccgtgggtatggtgtgtatccactggaaaggccctctggttttgcagcaagcatatttgatcatgatctctgctctgatggccctggtttttatcaaatacctgccagagtggtctgcctgggtgatacttggggccatcagcgtgtacgacctggtagccgtgttgtgcccgaaggggccccttcggatgctagtggaaaccgcccaagaacgcaatgaaccaattttccccgcccttatatacagtagcgcaatggtctggacagtaggaatggccaagcttgatcctagcagccagggcgccctacaactgccttacgaccccgaaatggaggactcatacgactccttcggcgaaccatcttacccagaggtatttgaacctcccctgacaggatacccaggagaagaactggaggaagaggaagaaagaggtgtcaaactggggttaggagatttcatcttttattccgtccttgtcggaaaggccgcggctaccgggtctggtgactggaacacaaccctcgcttgtttcgtagccattctgattggactatgtttgacactgctactcctggctgtctttaagaaagccttgcctgccctgcctatctccatcaccttcggattaatcttttactttagcaccgataatcttgtccggccgttcatggatacgctagcaagccaccagctgtacatctag

SEQ ID NO: 174967 - DNA, 390 bp, Artificial Sequence
  derived and/or modified sequence
atgctgacatttatggcctccgattccgaggaggaagtttgtgacgaaagaacttctctgatgagcgctgagagcccaactcccagatcatgccaggaaggccggcaggggcccgaggacggggagaatacagcgcagtggcgaagtcaggagaatgaagaagacggcgaagaggaccctgatcgatacgtctgcagcggggtgcctggacggccacccggacttgaagaagagctaactttgaaatacggggcgaaacatgttatcatgctgttcgtgcccgtcactctatgtatgattgttgtggtggctactatcaagtctgtgcgattctatactgagaaaaatggccagcttatttacactcctttcacagaggacacaccatag

SEQ ID NO: 174968 - DNA, 1344 bp, Artificial Sequence
  derived and/or modified sequence
atgctgaccttcatggccagtgacagcgaggaggaggtgtgtgatgagaggaccagcctgatgtctgctgagagccccacccccaggagctgccaggagggccggcagggcccagaagatggagagaacacagcccagtggaggagccaggagaatgaggaggatggagaggaggaccctgacagatatgtgtgcagcggcgtgcccggccggcccccaggcctggaggaggagctgaccctgaagtatggagccaagcacgtgatcatgctgtttgtgcctgtgaccctgtgcatgattgtggtggtggccaccatcaagtctgtgcgcttctacacagagaagaatggccagctgatctacacccccttcacagaggacacccccagcgtgggccagaggctgctgaacagcgtgctgaacaccctcatcatgatctctgtgattgtggtgatgaccatcttcctggtggtgctgtacaagtaccgctgctacaagttcatccacggctggctgatcatgagcagcctgatgctgctcttcctgttcacctacatctacctgggggaggtgctgaagacctacaacgtggccatggactaccccaccctgctgctgactgtgtggaactttggagctgtgggcatggtgtgcatccactggaagggccccctggtgctgcagcaggcctacctgatcatgatcagcgccctgatggccctggtgttcatcaagtacctgcctgagtggagcgcctgggtgatcctgggcgccatctctgtgtatgacctggtggccgtgctgtgccccaagggccccctgaggatgctggtggagacagcccaggagagaaatgagcccatcttccctgccctgatctacagcagcgccatggtgtggacagtgggcatggccaagctggaccccagcagccagggcgccctgcagctgccctatgaccctgagatggaggacagctatgacagctttggagagcccagctacccagaggtgtttgagccccccctgaccggctacccaggagaggagctggaggaggaggaggagcggggcgtgaagctgggcctgggggacttcatcttctacagcgtgctggtgggcaaggctgctgccactggaagtggggactggaacaccaccctggcctgctttgtggccatcctgattggcctgtgcctgaccctgctgctgctggccgtgttcaagaaggccctgcctgccctgcccatcagcatcaccttcggcctcatcttctacttcagcacagacaacctggtgcggcccttcatggacaccctggccagccaccagctgtacatctag

SEQ ID NO: 174969 - DNA, 390 bp, Artificial Sequence
  derived and/or modified sequence
atgctgaccttcatggccagtgacagcgaggaggaggtgtgtgatgagaggaccagcctgatgtctgctgagagccccacccccaggagctgccaggagggccggcagggcccagaagatggagagaacacagcccagtggaggagccaggagaatgaggaggatggagaggaggaccctgacagatatgtgtgcagcggcgtgcccggccggcccccaggcctggaggaggagctgaccctgaagtatggagccaagcacgtgatcatgctgtttgtgcctgtgaccctgtgcatgattgtggtggtggccaccatcaagtctgtgcgcttctacacagagaagaatggccagctgatctacacccccttcacagaggacaccccctag

SEQ ID NO: 174970 - DNA, 1344 bp, Artificial Sequence
  derived and/or modified sequence
atgctgaccttcatggccagcgacagcgaggaggaggtgtgcgacgaacgcacttccctcatgagcgcggaaagcccaacccccaggtcctgccaggagggccggcagggccccgaggatggagagaatacggcccaatggagatctcaggagaacgaagaagacggcgaagaggatcccgaccgatatgtgtgctctggggtgccgggcaggccaccaggactggaagaagaactcactttgaagtacggagctaaacatgtgatcatgctgtttgtgccagtcaccctgtgcatgatcgtggtggttgcaactattaaatccgtgcggttttatacggaaaagaatggacaattaatctacacacccttcacagaagatacgccaagcgtggggcagaggctgttgaactcagtgctcaatactctcatcatgatatccgtaatcgttgtgatgaccatctttctggtagtgctctataagtatcggtgctataagttcattcatggctggctgataatgagtagtctgatgctgctgttcctctttacctacatttacctgggcgaagttttgaaaacttacaacgtcgcaatggattaccctactctcttgcttaccgtctggaacttcggagccgtgggcatggtctgcattcattggaaaggccccctggtgcttcagcaggcatatctgatcatgatttcggccctgatggctctggttttcattaaatacctgccggagtggagtgcctgggtgattcttggggctatctccgtctatgatctcgtggccgttttatgtccaaaagggccacttagaatgttagtcgagactgcgcaagagcgaaatgaacccatttttcctgccttgatctactcctccgcaatggtgtggacagtaggaatggccaaactggacccctctagccagggcgccctgcagttgccttatgaccctgagatggaggattcatacgattccttcggcgaaccttcatacccggaagtattcgaaccacctctgacaggatatcccggcgaggaactggaagaagaagaggaacgaggagtgaaactgggtctaggggacttcattttctacagcgtgcttgttgggaaggctgcagccacgggttcgggcgactggaacacgaccctggcctgtttcgttgccattctgatcggtctttgcctaaccctcctcctcctggccgtttttaagaaggccctcccagcactccccataagtattaccttcggactgattttctacttcagtactgataatctggtgagaccctttatggatacactggcgtcacaccaactctatatctag

SEQ ID NO: 174971 - DNA, 390 bp, Artificial Sequence
  derived and/or modified sequence
atgctgaccttcatggccagcgacagcgaggaggaggtgtgcgacgagcgcacgagtcttatgtcagccgagagcccaacccctcggtcctgccaagaggggcgccaaggcccagaagacggcgaaaacaccgcacaatggcgcagccaggagaatgaggaggacggagaggaagatcctgacaggtacgtgtgtagcggagtgccaggtaggccacccgggctggaagaggagctcaccttgaaatacggcgcaaagcacgttatcatgctgtttgtgccagtcactctttgcatgattgtggtagtagccaccatcaaatccgttcgattctacactgaaaagaacggacagttaatatataccccttttacagaagacacaccatag

SEQ ID NO: 174972 - DNA, 1947 bp, Artificial Sequence
  derived and/or modified sequence
aaactccgctggagcgcggcggcagagcaggcatttccagcagtgaggagacagccagaagcaagcttttggagctgaaggaacctgagacagaagctagtcccccctctgaattttactgatgaagaaactgaggccacagagctaaagtgacttttcccaaggtcgcccagcgaggacgtgggacttctcagacgtcaggagagtgatgtgagggagctgtgtgaccatagaaagtgacgtgttaaaaaccagcgctgccctctttgaaagccagggagcatcattcatttagcctgctgagaagaagaaaccaagtgtccgggattcagacctctctgcggccccaagtgttcgtggtgcttccagaggcagggctatgctcacattcatggcctctgacagcgaggaagaagtgtgtgatgagcggacgtccctaatgtcggctgagagccccacgccgcgctcctgccaggagggcaggcagggcccagaggatggagagaacactgcccagtggagaagccaggagaacgaggaggacggtgaggaggaccctgaccgctatgtctgtagtggggttcccgggcggccgccaggcctggaggaagagctgaccctcaaatacggagcgaagcacgtgatcatgctgtttgtgcctgtcactctgtgcatgatcgtggtggtagccaccatcaagtctgtgcgcttctacacagagaagaatggacagctcatctacacgccattcactgaggacacaccctcggtgggccagcgcctcctcaactccgtgctgaacaccctcatcatgatcagcgtcatcgtggttatgaccatcttcttggtggtgctctacaagtaccgctgctacaagttcatccatggctggttgatcatgtcttcactgatgctgctgttcctcttcacctatatctaccttggggaagtgctcaagacctacaatgtggccatggactaccccaccctcttgctgactgtctggaacttcggggcagtgggcatggtgtgcatccactggaagggccctctggtgctgcagcaggcctacctcatcatgatcagtgcgctcatggccctagtgttcatcaagtacctcccagagtggtccgcgtgggtcatcctgggcgccatctctgtgtatgatctcgtggctgtgctgtgtcccaaagggcctctgagaatgctggtagaaactgcccaggagagaaatgagcccatattccctgccctgatatactcatctgccatggtgtggacggttggcatggcgaagctggacccctcctctcagggtgccctccagctcccctacgacccggagatggaagactcctatgacagttttggggagccttcataccccgaagtctttgagcctcccttgactggctacccaggggaggagctggaggaagaggaggaaaggggcgtgaagcttggcctcggggacttcatcttctacagtgtgctggtgggcaaggcggctgccacgggcagcggggactggaataccacgctggcctgcttcgtggccatcctcattggcttgtgtctgaccctcctgctgcttgctgtgttcaagaaggcgctgcccgccctccccatctccatcacgttcgggctcatcttttacttctccacggacaacctggtgcggccgttcatggacaccctggcctcccatcagctctacatctgagggacatggtgtgccacaggctgcaagctgcagggaattttcattggatgcagttgtatagttttacactctagtgccatatatttttaagacttttctttccttaaaaaataaagtacgtgtttacttggtgaggaggaggcagaaccagctctttggtgccagctgtttcatcaccagactttggctcccgctttggggagcgcctcgcttcacggacagga

SEQ ID NO: 174973 - DNA, 627 bp, Artificial Sequence
  derived and/or modified sequence
gcgtaaactccgctggagcgcggcggcagagcagcgaggacgtgggacttctcagacgtcaggagagtgatgtgagggagctgtgtgaccatagaaagtgacgtgttaaaaaccagcgctgccctctttgaaagccagggagcatcattcatttagcctgctgagaagaagaaaccaagtgtccgggattcagacctctctgcggccccaagtgttcgtggtgcttccagaggcagggctatgctcacattcatggcctctgacagcgaggaagaagtgtgtgatgagcggacgtccctaatgtcggctgagagccccacgccgcgctcctgccaggagggcaggcagggcccagaggatggagagaacactgcccagtggagaagccaggagaacgaggaggacggtgaggaggaccctgaccgctatgtctgtagtggggttcccgggcggccgccaggcctggaggaagagctgaccctcaaatacggagcgaagcacgtgatcatgctgtttgtgcctgtcactctgtgcatgatcgtggtggtagccaccatcaagtctgtgcgcttctacacagagaagaatggacagctcatctacacgccattcactgaggacacaccc

SEQ ID NO: 174974 - DNA, 734 bp, Artificial Sequence
  derived and/or modified sequence
aattttatgcagagctcctggtggctctgaagcgccctagggaacagaccaggaacattctcatggtgttagctcacattgggccattagtgctcctttaatgtgagaacaaccgggaggaggaggggatgtggacccaaaactacaagaaagagtgtcctcgaagcctatgtcctaccgccccacgctgctgccaggcccgcaggaagatgacaggcccggcctccactccttctaaggtcgtcgcttagttccgacgtcgggatgaccctgtcatccacgcggcgtgaaggccaccctccccgcgcgcccgggactccaggcatttccagcagtgaggagacagccagaagcaagcttttggagctgaaggaacctgagacagaagctagtcccccctctgaattttactgatgaagaaactgaggccacagagctaaagtgacttttcccaaggtcgcccagcgaggacgtgggacttctcagacgtcaggagagtgatgtgagggagctgtgtgaccatagaaagtgacgtgttaaaaaccagcgctgccctctttgaaagccagggagcatcattcatttagcctgctgagaagaagaaaccaagtgtccgggattcagacctctctgcggccccaagtgttcgtggtgcttccagaggcagggctatgctcacattcatggcctctgacagcgaggaagaagtgtgtgatgagcggacgtccctaatg

SEQ ID NO: 174975 - DNA, 1344 bp, Artificial Sequence
  derived and/or modified sequence
atgttgacattcatggcaagcgactcagaagaggaggtgtgtgacgagagaacatcgctaatgtctgcagaaagtcctactccacgtagctgtcaggagggacgccagggccctgaggacggtgaaaacacagcccagtggagatcccaggagaacgaagaagatggagaggaggatcctgatagatatgtatgtagtggggtcccaggcagacccccaggtctcgaagaggaattaactttgaagtacggtgcaaaacacgtgattatgctgttcgtcccggtgacattatgcatgattgtcgtggtcgctacaataaaaagcgtgagattctacactgaaaaaaatggccagctgatatacacaccctttacggaagatacccctagtgttggccagaggctgctcaactcagtactgaacaccctgatcatgattagcgtgatcgtagtgatgaccattttcttggtcgtgctgtacaaatacaggtgctacaagttcattcatggctggctcattatgagctccctgatgttactgttccttttcacgtatatctatcttggggaagtactcaagacttacaatgttgcaatggattatccaaccctcctgctgacagtgtggaatttcggcgctgtgggcatggtgtgcatccactggaaaggcccactggtacttcagcaagcttatctgattatgatctcagccctgatggccctcgtgttcattaagtacctgccagaatggagcgcctgggtgatcctcggcgctataagcgtatacgacctggtggctgttctttgcccgaagggccctctcagaatgctggttgaaacagcccaggagcggaacgagcccatattcccagccctcatatattcctctgctatggtatggactgttggtatggccaaactagatccaagttcacagggtgcattgcagctcccgtacgatcccgagatggaagacagctacgactcttttggagaaccctcataccctgaggtgttcgagcctccactgaccgggtacccaggcgaggaacttgaggaagaggaagaaagaggcgtgaagctgggcctgggagatttcatcttctatagcgtcctggtaggcaaagctgccgctaccggcagtggcgactggaatactacacttgcgtgctttgtcgccatcctcataggcctctgtctgacactcctgctccttgccgtatttaaaaaggcactgcctgccctgcctatcagcattacttttgggcttatcttctacttttcgaccgacaatcttgtccggccttttatggacacactcgctagtcaccagctttacatctag

SEQ ID NO: 174976 - DNA, 390 bp, Artificial Sequence
  derived and/or modified sequence
atgctcacatttatggctagtgatagcgaggaggaggtatgcgacgagcgaacatccctcatgtctgctgagtccccgacaccccgtagttgccaggagggcagacagggccctgaggacggagagaatactgcccagtggcgctcgcaggaaaatgaggaggacggagaggaagaccccgaccgctacgtctgctctggagtacctggacggcctcctggacttgaggaagagctcactttgaagtatggcgctaaacacgtgatcatgctgtttgtacccgtgacgctctgtatgattgtggtggtcgcaacaattaaaagtgtgaggttctatacagagaagaacggccagctgatctatacccccttcaccgaggataccccgtag

SEQ ID NO: 174977 - DNA, 1344 bp, Artificial Sequence
  derived and/or modified sequence
atgctgaccttcatggccagcgacagcgaggaggaggtgtgcgacgagagaaccagcctgatgagcgccgagagccccacccccagaagctgccaggagggcagacagggccccgaggacggcgagaacaccgcccagtggagaagccaggagaacgaggaggacggcgaggaggaccccgacagatacgtgtgcagcggcgtgcccggcagaccccccggcctggaggaggagctgaccctgaagtacggcgccaagcacgtgatcatgctgttcgtgcccgtgaccctgtgcatgatcgtggtggtggccaccatcaagagcgtgagattctacaccgagaagaacggccagctgatctacacccccttcaccgaggacacccccagcgtgggccagagactgctgaacagcgtgctgaacaccctgatcatgatcagcgtgatcgtggtgatgaccatcttcctggtggtgctgtacaagtacagatgctacaagttcatccacggctggctgatcatgagcagcctgatgctgctgttcctgttcacctacatctacctgggcgaggtgctgaagacctacaacgtggccatggactaccccaccctgctgctgaccgtgtggaacttcggcgccgtgggcatggtgtgcatccactggaagggccccctggtgctgcagcaggcctacctgatcatgatcagcgccctgatggccctggtgttcatcaagtacctgcccgagtggagcgcctgggtgatcctgggcgccatcagcgtgtacgacctggtggccgtgctgtgccccaagggccccctgagaatgctggtggagaccgcccaggagagaaacgagcccatcttccccgccctgatctacagcagcgccatggtgtggaccgtgggcatggccaagctggaccccagcagccagggcgccctgcagctgccctacgaccccgagatggaggacagctacgacagcttcggcgagcccagctaccccgaggtgttcgagccccccctgaccggctaccccggcgaggagctggaggaggaggaggagagaggcgtgaagctgggcctgggcgacttcatcttctacagcgtgctggtgggcaaggccgccgccaccggcagcggcgactggaacaccaccctggcctgcttcgtggccatcctgatcggcctgtgcctgaccctgctgctgctggccgtgttcaagaaggccctgcccgccctgcccatcagcatcaccttcggcctgatcttctacttcagcaccgacaacctggtgagacccttcatggacaccctggccagccaccagctgtacatctag

SEQ ID NO: 174978 - DNA, 390 bp, Artificial Sequence
  derived and/or modified sequence
atgctgaccttcatggccagcgacagcgaggaggaggtgtgcgacgagagaaccagcctgatgagcgccgagagccccacccccagaagctgccaggagggcagacagggccccgaggacggcgagaacaccgcccagtggagaagccaggagaacgaggaggacggcgaggaggaccccgacagatacgtgtgcagcggcgtgcccggcagaccccccggcctggaggaggagctgaccctgaagtacggcgccaagcacgtgatcatgctgttcgtgcccgtgaccctgtgcatgatcgtggtggtggccaccatcaagagcgtgagattctacaccgagaagaacggccagctgatctacacccccttcaccgaggacaccccctag

SEQ ID NO: 174979 - protein, 67 aa, Artificial Sequence
  derived and/or modified sequence
DIDFSTCARMDVPILKKAAQGLCITSCSMQNCGTGSCKKRSGRPTCVCYRCANGGGDIPLGALIKRG

SEQ ID NO: 174980 - protein, 2416 aa, Artificial Sequence
  derived and/or modified sequence
MTTLLWVFVTLRVITAAVTVETSDHDNSLSVSIPQPSPLRVLLGTSLTIPCYFIDPMHPVTTAPSTAPLAPRIKWSRVSKEKEVVLLVATEGRVRVNSAYQDKVSLPNYPAIPSDATLEVQSLRSNDSGVYRCEVMHGIEDSEATLEVVVKGIVFHYRAISTRYTLDFDRAQRACLQNSAIIATPEQLQAAYEDGFHQCDAGWLADQTVRYPIHTPREGCYGDKDEFPGVRTYGIRDTNETYDVYCFAEEMEGEVFYATSPEKFTFQEAANECRRLGARLATTGQLYLAWQAGMDMCSAGWLADRSVRYPISKARPNCGGNLLGVRTVYVHANQTGYPDPSSRYDAICYTGEDFVDIPENFFGVGGEEDITVQTVTWPDMELPLPRNITEGEARGSVILTVKPIFEVSPSPLEPEEPFTFAPEIGATAFAEVENETGEATRPWGFPTPGLGPATAFTSEDLVVQVTAVPGQPHLPGGVVFHYRPGPTRYSLTFEEAQQACLRTGAVIASPEQLQAAYEAGYEQCDAGWLRDQTVRYPIVSPRTPCVGDKDSSPGVRTYGVRPSTETYDVYCFVDRLEGEVFFATRLEQFTFQEALEFCESHNATLATTGQLYAAWSRGLDKCYAGWLADGSLRYPIVTPRPACGGDKPGVRTVYLYPNQTGLPDPLSRHHAFCFRGISAVPSPGEEEGGTPTSPSGVEEWIVTQVVPGVAAVPVEEETTAVPSGETTAILEFTTEPENQTEWEPAYTPVGTSPLPGILPTWPPTGAATEESTEGPSATEVPSASEEPSPSEVPFPSEEPSPSEEPFPSVRPFPSVELFPSEEPFPSKEPSPSEEPSASEEPYTPSPPVPSWTELPSSGEESGAPDVSGDFTGSGDVSGHLDFSGQLSGDRASGLPSGDLDSSGLTSTVGSGLPVESGLPSGDEERIEWPSTPTVGELPSGAEILEGSASGVGDLSGLPSGEVLETSASGVGDLSGLPSGEVLETTAPGVEDISGLPSGEVLETTAPGVEDISGLPSGEVLETTAPGVEDISGLPSGEVLETTAPGVEDISGLPSGEVLETTAPGVEDISGLPSGEVLETAAPGVEDISGLPSGEVLETAAPGVEDISGLPSGEVLETAAPGVEDISGLPSGEVLETAAPGVEDISGLPSGEVLETAAPGVEDISGLPSGEVLETAAPGVEDISGLPSGEVLETAAPGVEDISGLPSGEVLETAAPGVEDISGLPSGEVLETAAPGVEDISGLPSGEVLETAAPGVEDISGLPSGEVLETAAPGVEDISGLPSGEVLETTAPGVEEISGLPSGEVLETTAPGVDEISGLPSGEVLETTAPGVEEISGLPSGEVLETSTSAVGDLSGLPSGGEVLEISVSGVEDISGLPSGEVVETSASGIEDVSELPSGEGLETSASGVEDLSRLPSGEEVLEISASGFGDLSGLPSGGEGLETSASEVGTDLSGLPSGREGLETSASGAEDLSGLPSGKEDLVGSASGDLDLGKLPSGTLGSGQAPETSGLPSGFSGEYSGVDLGSGPPSGLPDFSGLPSGFPTVSLVDSTLVEVVTASTASELEGRGTIGISGAGEISGLPSSELDISGRASGLPSGTELSGQASGSPDVSGEIPGLFGVSGQPSGFPDTSGETSGVTELSGLSSGQPGISGEASGVLYGTSQPFGITDLSGETSGVPDLSGQPSGLPGFSGATSGVPDLVSGTTSGSGESSGITFVDTSLVEVAPTTFKEEEGLGSVELSGLPSGEADLSGKSGMVDVSGQFSGTVDSSGFTSQTPEFSGLPSGIAEVSGESSRAEIGSSLPSGAYYGSGTPSSFPTVSLVDRTLVESVTQAPTAQEAGEGPSGILELSGAHSGAPDMSGEHSGFLDLSGLQSGLIEPSGEPPGTPYFSGDFASTTNVSGESSVAMGTSGEASGLPEVTLITSEFVEGVTEPTISQELGQRPPVTHTPQLFESSGKVSTAGDISGATPVLPGSGVEVSSVPESSSETSAYPEAGFGASAAPEASREDSGSPDLSETTSAFHEANLERSSGLGVSGSTLTFQEGEASAAPEVSGESTTTSDVGTEAPGLPSATPTASGDRTEISGDLSGHTSQLGVVISTSIPESEWTQQTQRPAETHLEIESSSLLYSGEETHTVETATSPTDASIPASPEWKRESESTAAAPARSCAEEPCGAGTCKETEGHVICLCPPGYTGEHCNIDQEVCEEGWNKYQGHCYRHFPDRETWVDAERRCREQQSHLSSIVTPEEQEFVNNNAQDYQWIGLNDRTIEGDFRWSDGHPMQFENWRPNQPDNFFAAGEDCVVMIWHEKGEWNDVPCNYHLPFTCKKGTVACGEPPVVEHARTFGQKKDRYEINSLVRYQCTEGFVQRHMPTIRCQPSGHWEEPQITCTDPTTYKRRLQKRSSRHPRRSRPSTAH

SEQ ID NO: 174981 - protein, 2530 aa, Artificial Sequence
  derived and/or modified sequence
MTTLLWVFVTLRVITAAVTVETSDHDNSLSVSIPQPSPLRVLLGTSLTIPCYFIDPMHPVTTAPSTAPLAPRIKWSRVSKEKEVVLLVATEGRVRVNSAYQDKVSLPNYPAIPSDATLEVQSLRSNDSGVYRCEVMHGIEDSEATLEVVVKGIVFHYRAISTRYTLDFDRAQRACLQNSAIIATPEQLQAAYEDGFHQCDAGWLADQTVRYPIHTPREGCYGDKDEFPGVRTYGIRDTNETYDVYCFAEEMEGEVFYATSPEKFTFQEAANECRRLGARLATTGQLYLAWQAGMDMCSAGWLADRSVRYPISKARPNCGGNLLGVRTVYVHANQTGYPDPSSRYDAICYTGEDFVDIPENFFGVGGEEDITVQTVTWPDMELPLPRNITEGEARGSVILTVKPIFEVSPSPLEPEEPFTFAPEIGATAFAEVENETGEATRPWGFPTPGLGPATAFTSEDLVVQVTAVPGQPHLPGGVVFHYRPGPTRYSLTFEEAQQACLRTGAVIASPEQLQAAYEAGYEQCDAGWLRDQTVRYPIVSPRTPCVGDKDSSPGVRTYGVRPSTETYDVYCFVDRLEGEVFFATRLEQFTFQEALEFCESHNATLATTGQLYAAWSRGLDKCYAGWLADGSLRYPIVTPRPACGGDKPGVRTVYLYPNQTGLPDPLSRHHAFCFRGISAVPSPGEEEGGTPTSPSGVEEWIVTQVVPGVAAVPVEEETTAVPSGETTAILEFTTEPENQTEWEPAYTPVGTSPLPGILPTWPPTGAATEESTEGPSATEVPSASEEPSPSEVPFPSEEPSPSEEPFPSVRPFPSVELFPSEEPFPSKEPSPSEEPSASEEPYTPSPPVPSWTELPSSGEESGAPDVSGDFTGSGDVSGHLDFSGQLSGDRASGLPSGDLDSSGLTSTVGSGLPVESGLPSGDEERIEWPSTPTVGELPSGAEILEGSASGVGDLSGLPSGEVLETSASGVGDLSGLPSGEVLETTAPGVEDISGLPSGEVLETTAPGVEDISGLPSGEVLETTAPGVEDISGLPSGEVLETTAPGVEDISGLPSGEVLETTAPGVEDISGLPSGEVLETTAPGVEDISGLPSGEVLETAAPGVEDISGLPSGEVLETAAPGVEDISGLPSGEVLETAAPGVEDISGLPSGEVLETAAPGVEDISGLPSGEVLETAAPGVEDISGLPSGEVLETAAPGVEDISGLPSGEVLETAAPGVEDISGLPSGEVLETAAPGVEDISGLPSGEVLETAAPGVEDISGLPSGEVLETAAPGVEDISGLPSGEVLETAAPGVEDISGLPSGEVLETAAPGVEDISGLPSGEVLETAAPGVEDISGLPSGEVLETAAPGVEDISGLPSGEVLETAAPGVEDISGLPSGEVLETAAPGVEDISGLPSGEVLETTAPGVEEISGLPSGEVLETTAPGVDEISGLPSGEVLETTAPGVEEISGLPSGEVLETSTSAVGDLSGLPSGGEVLEISVSGVEDISGLPSGEVVETSASGIEDVSELPSGEGLETSASGVEDLSRLPSGEEVLEISASGFGDLSGLPSGGEGLETSASEVGTDLSGLPSGREGLETSASGAEDLSGLPSGKEDLVGSASGDLDLGKLPSGTLGSGQAPETSGLPSGFSGEYSGVDLGSGPPSGLPDFSGLPSGFPTVSLVDSTLVEVVTASTASELEGRGTIGISGAGEISGLPSSELDISGRASGLPSGTELSGQASGSPDVSGEIPGLFGVSGQPSGFPDTSGETSGVTELSGLSSGQPGISGEASGVLYGTSQPFGITDLSGETSGVPDLSGQPSGLPGFSGATSGVPDLVSGTTSGSGESSGITFVDTSLVEVAPTTFKEEEGLGSVELSGLPSGEADLSGKSGMVDVSGQFSGTVDSSGFTSQTPEFSGLPSGIAEVSGESSRAEIGSSLPSGAYYGSGTPSSFPTVSLVDRTLVESVTQAPTAQEAGEGPSGILELSGAHSGAPDMSGEHSGFLDLSGLQSGLIEPSGEPPGTPYFSGDFASTTNVSGESSVAMGTSGEASGLPEVTLITSEFVEGVTEPTISQELGQRPPVTHTPQLFESSGKVSTAGDISGATPVLPGSGVEVSSVPESSSETSAYPEAGFGASAAPEASREDSGSPDLSETTSAFHEANLERSSGLGVSGSTLTFQEGEASAAPEVSGESTTTSDVGTEAPGLPSATPTASGDRTEISGDLSGHTSQLGVVISTSIPESEWTQQTQRPAETHLEIESSSLLYSGEETHTVETATSPTDASIPASPEWKRESESTAAAPARSCAEEPCGAGTCKETEGHVICLCPPGYTGEHCNIDQEVCEEGWNKYQGHCYRHFPDRETWVDAERRCREQQSHLSSIVTPEEQEFVNNNAQDYQWIGLNDRTIEGDFRWSDGHPMQFENWRPNQPDNFFAAGEDCVVMIWHEKGEWNDVPCNYHLPFTCKKGTVACGEPPVVEHARTFGQKKDRYEINSLVRYQCTEGFVQRHMPTIRCQPSGHWEEPQITCTDPTTYKRRLQKRSSRHPRRSRPSTAH

SEQ ID NO: 174982 - DNA, 216 bp, Artificial Sequence
  derived and/or modified sequence
atgaagatcgtgcacgttaacgtcatgggcgtaggcggatggggtgccgttttcctggacatgtggcatgttactcaggagagcaagcgtcctattatatccaagatgccggcctggattttcccctgtcatcccctggatgagcagacataccacatggcgctcaatgctgccacatttcccaagaatgccacatggattggaccgctgtggtag

SEQ ID NO: 174983 - DNA, 7251 bp, Artificial Sequence
  derived and/or modified sequence
atgacaacactcctctgggtgtttgttactctccgagtcatcactgctgcggtgaccgttgagacgtccgaccacgacaatagtctctcagtttccatcccacagccctcaccactgcgcgtgctgctgggcacctctttgacaatcccttgttatttcattgatcccatgcaccccgtgactaccgctccgtccacagcgcccctggccccaagaattaagtggagtcgggtgtcgaaggagaaggaagttgttctgttagtggccaccgagggcagggtgcgggttaactcagcgtatcaggacaaagttagcctgcctaattacccggccatcccaagtgacgccaccctcgaagttcagagcctccgtagcaatgactctggggtgtatcgctgcgaagtgatgcacgggattgaagattctgaagcgactctggaggtggtggtaaaagggattgtgttccattaccgggctatctctacaaggtacaccctggatttcgacagagcccagagggcctgccttcagaactccgcaattatcgcaactccagagcagcttcaagccgcttatgaagacggtttccaccaatgtgacgcaggctggctcgcagaccaaaccgtgcggtatccaattcatacaccccgcgaaggctgttacggagataaggatgagtttcccggagtcagaacttatggtatcagggacaccaatgaaacttacgatgtgtactgttttgctgaggagatggagggagaagtgttctatgccacatctccggagaagttcacatttcaggaagcggcaaacgaatgcagacgcctgggagctcgattagcaacaacagggcagctgtatctagcctggcaggccggaatggatatgtgctctgcaggttggctcgccgatagatccgtcaggtaccctattagcaaggctcgacccaactgcggcgggaatctgctcggagtgaggactgtgtacgtgcatgccaaccagacgggctatccagacccctcaagcaggtacgatgcaatctgctacacgggcgaggatttcgtggatataccagaaaattttttcggtgtcggcggggaggaggacataactgtacagacagtgacgtggccagacatggaactgcccctgcctaggaacataaccgagggggaggcccgtggttccgtgattctcaccgttaaacctattttcgaggtatctcccagtccactggaacctgaagagcctttcactttcgcacctgaaatcggtgctacagccttcgccgaagtggaaaacgagaccggagaagccacgaggccctggggctttcctacgcctgggctggggccagctaccgctttcactagcgaggacctagttgttcaggtgactgcagttcctggacagcctcatctccccggcggcgtggttttccactatcggcctggaccaacccggtacagtcttacattcgaagaagctcagcaggcatgcctgaggacgggagccgtgattgcctcacctgagcagttgcaggccgcttatgaggcaggctacgaacagtgcgatgctggctggctccgcgaccagaccgtcagatacccaatcgtctcccccagaacgccatgcgtcggagataaagattccagccccggtgttcgcacatatggcgttcgtccttcaaccgaaacttacgacgtttactgctttgtcgaccgattggagggagaggtcttttttgccacccggttggagcagttcaccttccaagaagcgttggaattttgcgaatcacacaatgctaccctggctaccactggccagctctacgcagcctggtctagagggctggataagtgctatgccgggtggctggctgacggcagtttgaggtatcccatcgtcacaccccgacctgcctgcggaggcgataagcccggggtgaggacagtctatctgtatccaaaccaaactggactgccagaccccctgtctcgccatcatgccttctgttttagggggatctccgccgttccttccccgggggaggaagagggcggaacccctacatccccaagtggtgtggaggaatggatagtcacacaggtggtgccgggggtggctgcggtgcctgtcgaggaagaaactacagctgtgccaagcggcgagaccactgctatcctagaatttacaaccgaacctgaaaatcagaccgagtgggagcctgcctacacacccgtgggcaccagcccgctgcccgggatcctgcctacttggccccctactggggccgcaaccgaggagtctacagagggtccgagcgccactgaagtcccatctgcctcggaggagccctcaccttctgaggtgcctttcccttctgaggaaccctcaccatccgaggaacctttcccctcagttaggcctttcccatccgtggaattatttccttccgaggaacctttcccctccaaggagccgtcaccatcagaagagccatcagcatccgaagagccttacacaccgtcccccccggtgccatcttggacagagctgccgtcctctggtgaggaatcaggggcccctgatgtgtccggcgacttcactggctctggggacgtgtccggacacttggacttcagcggccagctcagcggcgaccgcgcatctggattaccctccggggatctcgactcaagcggcctgactagtactgtcggatctgggctgccagttgagtcaggactgccctcgggcgacgaagagcggatcgaatggccatctacccctaccgtcggcgaactcccttcaggcgccgagatcctggaggggtcggccagcggcgtgggtgacctctcgggtctgccgagcggcgaagtgctggagacatctgcaagcggagtcggtgacctttcaggcctgccctccggagaagtgctagagactaccgcccctggcgtagaggacatatccggcctccctagtggggaggttttggagacaacagcccctggcgtagaagatatcagtggcttgccatccggcgaagtccttgaaaccacagcaccaggtgttgaagatatctctggactgccatccggagaggtgctcgaaacaacggcaccaggcgtggaggatatctccggcctgcccagcggtgaagtacttgagaccacagctcccggcgtcgaggatatcagcggactgccctctggagaagtgctcgagaccgcagctcccggagtggaggacatcagcgggctcccgtcaggtgaggtgctggagaccgctgccccaggggttgaagatatttccgggttgccaagtggagaagtattagaaacggccgcacccggcgtcgaagatatctctgggctcccgtcaggagaggtactggaaacagcagccccaggggtggaagacatcagcggattaccaagtggtgaggtgctggaaaccgccgctccaggcgtagaggatattagcggcctaccctcgggcgaggtgttagagaccgcggcaccgggggtcgaagatatatctgggcttccctctggggaggtgctggagaccgccgctcccggagtggaggacatctccgggctgccctctggcgaggtgctcgagaccgccgcaccgggtgttgaggacatctctggtctgccttctggagaggtactggaaacggctgctcccggcgtggaggatatcagtggattgcctagcggagaggtgcttgaaaccgccgcacctggcgtcgaggacatcagcggattaccgagcggcgaagtgctggagacggctgcaccaggagtcgaggatattagcggcttaccctccggggaggtgctcgaaacaactgcaccaggcgtcgaggaaattagtggcctacctagtggggaagtgctggagaccaccgctcccggggttgacgaaatctccggactaccctccggcgaggtcctggaaacgacagcccccggcgtggaggaaatctctggcctgccttctggcgaagtactggaaaccagtacttctgcggtcggcgatctgtctgggctgccgagcggaggagaggtgctggagatctccgtttccggggtggaggacatttcggggctcccctcgggggaggtcgttgagacctccgcctcaggaatcgaggatgtttctgaactcccttccggtgaggggctggagaccagtgcatcgggtgtggaggatctgtcccggttgcctagtggtgaagaggttctggaaatcagtgccagtggtttcggagacctgtccggcctgccctcgggcggtgaaggcctggaaacaagtgcatctgaggtgggaacagacttgtccggcctcccttcagggcgagagggcctggaaacgtcggccagtggggccgaggacctcagcggcctgccctcaggaaaggaggaccttgttggatctgcatccggcgatctggatcttgggaaattgccatcaggcaccttgggctcaggccaagccccggaaacaagcggcctcccttccgggttcagcggcgagtactctggcgtcgatctagggagcggaccaccttctggactgccagatttctctggcctcccctcagggtttcctactgtatcgttagtcgacagtacattagtggaggtcgtaactgcttctactgcctctgagctggagggtaggggcacaattgggattagtggcgctggtgagatctccggtcttccatccagtgagctggacatctcaggacgcgcatcagggctgccaagcggcaccgaactgtccggccaagcctctggctcccccgacgtatccggcgaaataccaggactttttggggtatccggtcagccctctggtttcccagatacatcgggcgagactagcggagtgactgaactcagcggcctgagctccggccagcctgggatcagcggagaagcttcaggcgtgctgtacgggacctctcagccttttgggatcactgatctgtctggcgagacctcaggagtacctgatctgagtgggcagccatctggcctcccaggcttttcgggcgctactagtggcgttccagatttagtgtccggcaccacatctggctctggggagagttcagggatcacattcgtcgatacttccctggttgaggtggcgcccactacttttaaggaggaagaaggattggggtctgtggagctgtccggcctcccttctggcgaagccgacttaagcgggaagagtggcatggtagatgtctccggacagttctccggtaccgtggacagttcaggtttcacgtcccagacaccagaatttagcggcctgccttcgggcatagcagaggtgtcaggtgaaagctcgcgagctgagatcggctcctcacttccctctggggcctattatggctcaggaactcccagctcgttccccacagtctcgctggtcgacagaactctcgtggagtccgtgacccaagcccccaccgcacaagaggctggggaagggccatccggcattcttgaactgagcggggcccacagcggcgcacctgatatgagtggtgagcacagtggcttcctggatttgtccggcctgcagtcgggtctgatcgagccatctggcgagccgcccggtacgccatacttttctggggatttcgcatccaccaccaatgtgtctggcgagagttcggtggccatggggactagcggggaagccagtggtctgccagaagtgaccctgataacaagcgaattcgttgaaggcgtaactgaaccaaccattagtcaagagttggggcaacgaccacccgtcacacacaccccccagctattcgagtcctccgggaaagtcagcaccgccggggacattagcggcgccactccagtgctcccaggatctggggtcgaagtcagctcagtgcccgaaagtagcagtgaaacttccgcgtaccccgaagcgggatttggtgccagcgctgcacccgaggcctcgcgcgaggatagtggaagtccggatctgtccgagacgacaagcgcatttcatgaggccaatctcgagaggtctagtggcctcggagtttccggatctactctgacattccaggagggagaggcttctgcggcacccgaagtgagcggcgagagcactaccacctcagacgtaggtacagaagcacctggactgccaagtgccacccccaccgcatccggggaccgaactgaaatttcaggtgatctatcgggacacacctcccagctgggcgtggtcatctccacatctatacctgaaagtgaatggacgcagcagacacagcgtccggccgagacacacctggaaatcgagtcctcctcattgctctacagtggcgaggagacccacaccgtggagaccgcaacttccccaactgatgcaagtatccctgcatctcccgagtggaagagggaaagcgagtctaccgctgctgcccctgcccgatcctgcgcagaggagccttgtggtgccggaacctgtaaggaaacagaaggacatgtcatatgcctctgtcctcccggttatactggggaacattgcaacatagatcaagaggtgtgcgaagaagggtggaataaataccaggggcattgctaccggcacttccccgatcgagagacatgggtcgatgctgaacgtcgttgcagggaacagcagtctcacttaagcagtatcgtgacacccgaagagcaggagttcgttaataataacgctcaggactatcaatggataggcctcaatgaccgaactattgaaggtgattttcgttggtctgatggccacccaatgcagttcgagaactggcgccccaaccagcccgataacttcttcgcggccggcgaggattgcgtggtgatgatctggcacgagaaaggggagtggaacgatgttccctgtaactatcatttgccattcacatgcaagaaagggactgttgcgtgtggagaaccacctgtcgtcgagcatgccagaacatttgggcagaaaaaagatcgatacgagatcaatagtctagttcggtaccagtgcacggaggggtttgtccagcgacacatgcccactatccgctgtcaaccatctggccattgggaagagcctcagatcacgtgtacagatcccacgacttataaacggcgtttgcagaaaagaagctctaggcatcccagaagatcccggcctagcactgcccattag

SEQ ID NO: 174984 - DNA, 7593 bp, Artificial Sequence
  derived and/or modified sequence
atgacgactctcctgtgggtgtttgtcactctgcgtgtcatcacggcagcagtaaccgtggaaactagcgatcacgataattcattgagtgtgtccatccctcaaccatcccctctgcgagtgctactcggaacatcgttaaccattccctgttacttcattgatcccatgcatcctgttacaacagcccccagcactgcacctctcgctcctcgcatcaagtggagcagagtctccaaggagaaagaagtggtcctgctggtcgcaacagagggacgcgtgagagtgaatagtgcctatcaggacaaggtgtcgctcccaaattatcccgccatccccagcgatgccacactggaggtgcagtctctgaggagtaacgactctggcgtttacagatgtgaagtgatgcacggaatagaagatagtgaagccacgctcgaagtagtcgttaaagggatcgtgttccattatagggccatatcgacccgctacacactggacttcgaccgcgcccagagggcttgcctgcagaattcagccatcattgccaccccagagcagcttcaggccgcatacgaagacggttttcatcaatgtgatgccggctggctggctgatcagaccgtgaggtatcccattcacacacccagagagggttgctatggagacaaagacgagttcccaggggtacgtacctatggtatccgggataccaatgagacatatgacgtgtactgcttcgcagaggagatggaaggcgaggtgttctacgctacttcccctgaaaagtttaccttccaggaggctgcaaacgaatgtcggcgcctcggcgcccggctagcgacgaccggacagctatatctggcctggcaggcgggaatggacatgtgtagcgctggatggctcgccgaccgctcggtgcgctaccccatctcaaaagcccgacctaactgcggtggtaacttgctcggtgtaagaacagtttacgtgcacgctaaccagactggatatccggaccctagttcacgatatgacgcaatttgctataccggggaagactttgtggatatccctgaaaatttttttggtgtgggcggtgaggaggacatcacagtgcaaaccgttacctggccagacatggaactgcctctgccccggaatatcaccgagggcgaggcgcgcggtagtgtgattctgaccgttaaaccaatttttgaggtgtcacctagcccactcgagccggaggaaccgttcaccttcgcccccgagatcggcgcaaccgcttttgccgaagtggagaacgagaccggcgaggcaactagaccctgggggtttcccacacccggcttaggacctgccacagcctttacttcagaagatctagtcgtgcaggtcaccgcagtgccaggacagcctcatttaccaggcggggtggtgtttcactaccgccccggccccactcggtattctttgacattcgaggaggcacaacaggcctgtctccggactggagctgttatcgcctctccagaacagctgcaagcagcttacgaggccggttacgagcagtgcgacgccgggtggctccgcgaccaaaccgtgcgctacccaatcgtgtctccacgcactccttgtgttggggacaaagactcgtcacctggtgtccgcacctacggtgttcggccgagcacggagacctacgacgtgtactgttttgtcgacaggttagagggcgaggtgttcttcgcaactcggctagagcagttcacctttcaagaagcactcgaattctgtgaatcacataacgccacgctggccacaacgggccagctctacgccgcttggtcacgcggcctcgataaatgctacgcaggatggttggctgatgggagtctccgttaccctatcgttactcctcggccggcttgcggaggggataagcctggtgtgaggaccgtatacctctatcccaaccagaccggactgcccgatcctctgtctagacatcacgctttttgttttcgcggaatttccgccgttcctagtccaggcgaagaggagggagggacccctacgtccccctccggagtcgaggaatggattgtgacacaagtggtgcctggggtcgcagccgtgcctgtggaggaggagacgactgctgtcccctctggagaaactacagccatcttggaattcacgactgagccggagaaccagacagagtgggagcctgcttacaccccagtagggactagcccgcttccaggaattctgcccacctggcctcctactggggcagccaccgaggagtccacagagggcccgtccgctacagaggtgccctccgcatctgaagagccatcccccagtgaggttccttttccatctgaggaaccaagcccgtcagaggaaccatttccctccgtgcgcccattcccaagcgtggaactgtttccatcggaagagcctttcccatctaaggaaccaagcccaagtgaagagccaagtgcgtccgaggagccatataccccttctccccccgttcccagctggactgaacttccaagcagcggcgaggaatctggcgcaccagatgtcagtggggattttaccggcagcggcgatgtgtccggacatctggattttagtggccaattgtcaggggatcgtgcgagcggcttaccttctggcgatttggactcgtctgggttaacttcaaccgttgggagcggccttccagtcgaaagtggactgccgtcaggagacgaagagcgtatcgaatggccaagcactccaaccgtaggggaactaccatctggcgccgaaattctggagggatcagcctcaggtgttggggacttgtctggcctaccctcaggagaagtgctcgagacttctgcttcaggcgtgggagacttgtctgggctaccgtccggcgaagttttggagacaacagcccccggtgtggaggatatcagtggactgccttccggtgaggttttggagactaccgcacctggcgtcgaggacatctcaggcttgccttccggcgaagttctggagaccacagcacccggggtcgaagatatttccgggctccctagcggcgaagtcctggagaccactgcccccggcgtcgaagatatcagcggactgcctagcggggaggtgttagagactacagcaccaggggtggaagatatctcaggtttaccctccggtgaagtgttggaaacaacagctcccggcgtggaagacattagcggtctgccgtctggcgaagttctcgaaacagccgcaccaggcgtcgaagatatctcaggtctgcctagtggcgaggtactggagacagccgccccaggggtggaggatatttccggacttcccagcggagaagtcctggagacagcagcacctggagtggaagatatttctggccttccttcaggtgaggtgttagaaaccgcggccccaggagtggaggacatctcggggttaccatcaggcgaagttttagagaccgcagcacctggggtggaggacatcagtggtctaccctctggagaggtgctagaaaccgcagccccaggggttgaggatatctctggacttcccagtggcgaggtattggagacggccgctcccggagtggaggatatatccgggctcccctccggagaggtgttggaaaccgctgctcctggagtcgaggacatctccgggctcccctccggagaagtactggaaacagcagcacccggtgtcgaagacatctctggcctccccagcggcgaggtgctcgagacggcggctcctggcgtcgaggacatctctgggctaccgtccggagaggttctagagacggccgcacccggtgttgaagatatcagcggcctccctagcggcgaggtgctcgaaaccgcagcgcccggtgtggaggatattagcgggcttccatctggcgaggtgctggagacggctgcccctggggttgaggatatttcaggactgccctctggagaggtactggagactgctgcacctggtgtggaggacatttccggtctcccctccggtgaagttctggaaaccgcagcgccgggcgttgaggatatcagcggactccccagtggggaggtactggaaaccgcagcccccggtgtggaagacatctcgggccttcccagcggcgaggtgctggagactacagctccgggagttgaggagatctcgggcctccctagcggagaggtcctggagaccacagctcctggtgtcgacgagatctccggattaccaagcggcgaggtcctggagacaaccgctcccggcgtggaagagatcagtggcctcccttctggcgaggtactcgagaccagcacaagcgctgtaggcgatctaagtgggttgccatccggcggcgaggttctggagatctccgtcagcggagtggaggatatatccggcctcccttcaggtgaggttgtagagaccagtgcttctgggattgaggacgtcagcgaattacctagcggagaaggcttggagacctcagcctccggtgtggaggatctgagccgcctgcctagtggcgaagaggtgcttgaaatttccgcctctggcttcggcgacttgagtggcttgccaagcggcggagaaggccttgagacctcagctagtgaggtgggtacagatctgagcggactgccatcaggaagggagggactggagacaagcgcttccggagctgaggacttatccggacttccttcagggaaagaagatctggtgggctccgcttccggagacttggacctgggcaaattgccatctgggacacttgggagcggccaagcacctgaaacatctggcttgcctagcggcttcagcggagaatattccggagtggacctgggctccggtccaccctctggactgccagacttctctggactgccttcaggatttccaacagtgagcctggtcgactctaccttagtggaggtcgtgaccgccagcacagcctccgagcttgaaggtcgcgggactattggtatttctggggctggagagattagcggccttccttccagcgaactggacataagcggcagggcctcaggactgccatcagggacagagctctctgggcaggcctctggctcacctgatgtgtctggggaaatccccggattattcggagtgagtggtcaaccctctgggttccctgataccagtggtgaaacatcaggcgtcacagagctcagtgggttgtcatcgggccagcccgggatctcaggggaagcaagcggagtgctgtatgggacctcacagccatttggtattaccgatctgagtggcgaaacaagcggagttccagacctgagtggtcagccttctggtttgccaggcttcagcggagctacgtctggagttccagatctggtgagcgggacgacatccgggtcaggggagtcttctggcatcaccttcgtggatacatccctggttgaagtagctcccaccacattcaaagaagaggaaggactggggtccgtagagctgtctggcttaccttccggagaggctgatctgagtggcaagagtggaatggtcgacgtgagcgggcagttcagtggtacggtggacagctcgggcttcacctcccagacaccggagtttagcggccttccctcaggaattgccgaagtgtccggcgagtcatcccgcgcagagataggatccagcctgccctctggggcctattatggcagcggcaccccctcctccttcccaacggtgagcctggttgatcgaactctggttgagtccgtgacgcaggcgccaacagcacaggaagctggtgagggcccatccggcatactggagctgtcaggtgcccattctggagcccccgacatgtcaggggaacattctggcttcctcgatctttccggtcttcagagtggcctgatcgaaccttctggagagcctcccggtacaccctacttttctggagattttgcctccaccaccaatgtttccggcgaaagcagcgtcgccatgggcaccagtggggaggcgtccggcttgcctgaggttaccctgatcacaagcgaattcgttgagggcgtgacagaacccactattagccaagaactcggccagcgacctcctgtcacccataccccgcagctctttgagtcctcaggaaaagtgtccaccgccggggacatctcaggggccacacccgtactgccaggatcaggagttgaggtctcttcggtgccagagtccagcagcgaaacatccgcatatccggaagccgggtttggcgcaagcgccgcaccggaggcttccagagaagattcagggtctcctgacctgagcgaaaccaccagtgctttccatgaggctaaccttgaacgcagtagtggactcggcgtaagcgggtccaccctgacttttcaggagggggaagccagcgccgctcctgaagtctctggggagtccaccacaacctcagatgtgggaactgaggcaccgggattgccatctgccacgcctaccgcgtctggcgatcgtactgagatttctggagatctgtctggacatacttcacagctgggcgtggtgatctccactagcatcccagagagcgagtggacacaacaaacccagcgcccagccgaaacgcatttagagattgagtcgagctcactgctctactcaggcgaagaaacacacaccgtcgagacagcaacctcccccactgacgcctcaattccagctagtcccgagtggaagcgggagtcagaatccaccgcggctgctcccgctcgaagttgcgccgaggagccatgtggagctggtacttgcaaggaaaccgagggacacgtcatttgtctctgtcctcctggctataccggcgaacactgcaatattgatcaggaggtgtgcgaggaggggtggaacaagtaccagggtcactgttataggcatttcccggaccgtgagacatgggttgatgcggagcggcggtgccgcgagcaacagtcccatttgagttccattgtgaccccagaagagcaagagttcgttaataataacgctcaagactaccagtggattgggcttaatgaccgcacaattgaaggagattttcgatggagtgacggccaccccatgcagttcgagaactggcggcccaaccaaccagacaatttttttgcggcaggcgaggactgcgtcgttatgatttggcacgagaagggtgaatggaacgacgtgccctgcaactaccatttgccttttacctgtaaaaagggcacagtggcctgcggcgaaccccccgtagtcgagcacgccaggaccttcgggcagaagaaagataggtacgaaattaacagtcttgtacgttatcagtgcacagagggatttgttcaacggcacatgcccactattcgttgccagccttcagggcactgggaggagccccagatcacttgcacggaccccacaacttacaaacggcgtctccagaagagatcctctagacatccgaggcgtagtagaccctccaccgctcactag

SEQ ID NO: 174985 - DNA, 7593 bp, Artificial Sequence
  derived and/or modified sequence
atgacgacgctgctgtgggtgttcgtaacactgagagtgattacagcagccgtaactgtcgaaacctctgatcacgataatagcctctctgtgtcaattccacagccatctcccttgagagttctgctcggcacatctctgactattccatgctactttatcgaccctatgcaccctgttacaacagcccccagcacagcgccacttgcacctcggataaagtggtctcgggtcagcaaagagaaggaagtggttctcctcgtggctaccgaaggccgagtccgcgtgaactctgcctaccaagataaggtgagccttccgaactacccagccattcccagtgacgcgacgctcgaagttcagtctctcaggagcaatgattctggcgtctacaggtgtgaagtcatgcatggtattgaggactccgaggctacattggaggtggtggtcaagggcatagtcttccattaccgggcaatttccacaagatatacactggattttgaccgagcccagcgagcctgtcttcagaatagcgccatcatcgccactccagaacagctgcaggcagcatacgaggacgggtttcaccagtgtgacgctggatggctggcagaccagaccgttaggtacccaatacacacccccagagaaggctgctatggggacaaggatgagtttcccggcgtccgaacttatggcataagagacacaaatgagacatacgacgtgtactgcttcgccgaggaaatggagggtgaagttttctacgctacatctccggagaagttcactttccaagaggcagccaatgaatgccgaagactcggagcccgcttagcgaccactggccagctataccttgcatggcaggctgggatggacatgtgttcagcagggtggctggctgacagaagtgttcggtatccaatatccaaagcccggcctaactgcggtgggaacttgctcggtgtgcggaccgtgtacgtccacgctaaccagacgggatatcctgacccgagttctcgctatgatgccatttgttacaccggggaggacttcgtggacatccctgagaacttttttggagtgggcggagaggaggatatcaccgtgcagaccgtcacatggcccgacatggagcttcctcttccgcgcaatattacggagggcgaggcacggggttcggtcatcttaacggttaaaccgatatttgaagtttccccctctccactggaaccggaggagcctttcacattcgcccccgagatcggagcgactgcattcgccgaagttgagaacgagacgggcgaggcaacccggccatggggctttccaacaccgggcctcggccccgccactgctttcacttcagaagatttggttgttcaggtcacagcggtgcctgggcagcctcacctccccgggggcgttgtattccactacaggccgggacccacgagatactctttgacctttgaggaggcacaacaggcgtgcctaaggaccggagcagttattgccagccccgaacagctgcaagccgcctatgaagctggatatgaacagtgtgacgcaggctggttacgtgatcagaccgttcgttacccaatagtctccccccgtaccccctgcgtgggcgataaagatagctcacctggcgtgcgtacctacggcgtgcgaccttctacagaaacatacgatgtttactgctttgtggacaggctagaaggtgaggtgttcttcgcaactaggctggagcagttcacgttccaagaagccttggagttctgcgagtcacataatgccacactcgcgaccacgggccagctgtatgctgcctggagccggggcttggataagtgttacgcgggctggcttgctgacggcagtctccgctaccctatagttacacctagacccgcatgtgggggagacaagccaggggttaggaccgtttacctctatccaaaccagacaggccttccagatcccctgagcaggcaccacgccttttgttttaggggaatttctgctgtgccaagccctggcgaagaggagggaggtacaccaacaagcccatccggtgtcgaggaatggatcgtgactcaggtggtcccaggagtagcggcggttccagtggaggaggaaaccaccgccgtaccaagtggtgagaccactgcaatcctcgaatttactactgagcctgagaaccagaccgaatgggagccagcctacaccccggtgggtacatctcccctgccgggcattctgccaacctggccgccaactggcgcagccaccgaagagtcaacagaaggaccctccgccacagaggtcccgtcagccagtgaagagccctccccgagcgaggtgccctttccctccgaggagccctcaccatcagaagaaccctttccttccgtgaggccattcccttccgtggagctttttccatcagaagagccttttcccagcaaagagccatcaccatctgaagaaccttccgccagcgaagaaccctatacacctagcccacccgtcccttcatggacggaactcccttcaagtggtgaggaaagcggagctcccgacgttagcggggatttcacaggatccggcgatgtgagcggtcacctggatttttcaggtcagctctccggagaccgtgcgtctggacttccgtctggggacttggactcctccggtctaaccagcactgttgggagcgggcttccggtggagagcggactcccttctggggacgaggagcgaatagaatggccttccacacccaccgttggagagctgcctagtggagccgagatcctcgaaggcagcgccagcggggttggagacctgagcggactcccttctggagaggtgttggaaactagcgcctccggcgtgggggacctgtccggtctgccaagtggggaggtgttagagaccaccgctcctggcgtagaggatattagcggactgcccagcggagaagtacttgaaacaacagcccctggggttgaagacatatccgggttgccatccggcgaggtgttagagaccaccgctccaggcgtagaggatatctccggactcccctctggtgaagtcctcgagacaacagccccgggagttgaagatattagtgggctcccttcaggggaggttctggagactacagctcccggagtggaagacatcagtgggctgcctagtggagaggtgctggagacaaccgcccctggagttgaggacatcagcggtctgccgagtggggaggttctggagaccgcagctcccggggtggaagacatttccggactgccttcgggggaagtgctggagactgccgctcccggagtagaggatatttcaggacttcctagtggggaggtgcttgagacggctgcacctggcgtggaggacatcagcgggctgccctcaggagaagtgcttgagacagcggcccctggggtggaggacatctcaggtctgcccagtggcgaagtacttgagacagctgcccctggagttgaggacatctccgggctgcccagcggagaggtgctggagactgccgctcctggggtggaagacatctcagggcttccatctggagaagtcctggaaacagcggcgcctggcgtggaggatatcagtgggctccccagcggcgaagtgctagaaaccgctgccccaggtgtggaggatatttccgggctgcctagcggcgaggtccttgagaccgcagctccaggggtagaagatattagtgggctacccagcggagaagttctagagaccgcagcccctggtgtggaggatatctctggcttgccttcaggtgaggttcttgagacagcagcccctggagtagaggacatttctggcctgccgagcggggaggtcctggaaaccgcagcaccaggagtggaggacatcagcggtttgccttcgggcgaagtcctggaaaccgccgcccccggcgtggaagatatttctggactaccttctggggaagtattggaaacagccgccccaggtgtcgaagacatatctgggctgccttccggggaggtacttgagactgccgcgccaggagtcgaagatatttcaggactgccatctggggaggtactggaaactgcggcccccggggtcgaagatatttccggcctccccagcggtgaggtgctcgaaacaaccgccccaggcgtggaagagatcagtggactccccagcggtgaagtgctggaaactacagcaccaggggtagatgaaattagcgggcttccctcaggagaagttttggagactaccgcacccggggtggaagagatcagtggtttgccgtccggcgaggtgctcgagacctctacttcggcggtaggagacctgtcgggcctgccgagcggcggggaggtattagaaatttccgtgtctggagtggaagatatcagcggactccctagcggagaggtcgtcgagacatccgcttctggcattgaagacgtttctgaactgccgagcggggagggtctggagacgtctgcatcgggagtggaggacctgtcacggctgccttccggggaggaggtgctggaaatctccgcctcaggatttggtgatctgagtggactccccagtggtggtgaaggtctcgagacatccgccagtgaagtgggcaccgacttaagcgggcttccctccgggagagagggtctggagacgtccgccagcggagccgaggacttaagcggtctcccttccggcaaggaagatctggtgggtagcgctagcggcgacctggacctcggtaaacttccaagcggcactctgggatccggtcaggcccctgagacttccggactccctagcggcttcagcggcgagtacagtggcgtggatctggggtccggaccccctagcggccttcctgacttctccgggcttccctctggatttcccacagtttcactcgtggactccactctcgtagaggtcgttaccgctagcaccgcaagcgaattggagggcaggggcacaattggcatcagcggggcgggcgagatctccggtctcccttccagcgagctagacattagcggcagggcgtccgggttgccatctggcactgaactgagcggacaggcctccggatcaccagatgtgtccggggaaatccccggccttttcggcgtgtccggacagcccagcggattccctgacacctccggcgaaacatccggcgttacagaactatccggattgtctagcggccagccaggcatctccggtgaggcgtctggagtgctgtatggcaccagtcaaccttttggcattacagatctgtcgggagaaacatctggcgtgcctgacctcagcggccagccctctgggctgccaggattttcaggcgctacatctggggtgccggacttggtgagcggtaccacctcgggctcaggcgagtcctccggtatcaccttcgtcgacacctccctggtggaagtcgctccaacgacttttaaagaagaagaaggcctgggcagtgtggagcttagcggcctccccagcggggaggccgacctgtctgggaagtccggcatggtggacgtaagtggccagttcagtggcactgtggacagttctgggtttacctcccagactcctgaattctcagggctcccatctggaatagctgaggtgtcaggagagtcatctagagctgaaattggctctagtctgccatccggcgcttactatggctctggcacaccctcctcgtttcctactgtgagcctcgtagataggacgctggtcgagagtgtaactcaggcaccaaccgcccaggaagccggcgagggtccttctgggattctcgagctctcaggagcccattcgggcgctccagacatgagcggggagcacagtggatttctggatctcagcgggttacagagtgggctcatcgagccttccggagagccccccggaactccatatttctctggagattttgcatcgaccactaacgtgagcggtgagagcagtgtcgccatgggcacctctggagaggccagtggcctgccggaagtgacactaataacctccgaatttgttgaaggagtgactgagcctactattagccaggagctgggtcagcgtcctcctgtaacacacacgccgcagctctttgagagtagcggcaaggtgagcaccgcgggagacatctcaggagccactccagtgctcccggggagtggcgtggaagtctcatccgttccagagtcgtcatcagaaacctcagcctatccagaggcgggcttcggcgctagtgctgcgccagaagcctcaagggaggacagcggttctcctgacctctctgagactacttctgcgtttcatgaggctaacttggaaaggagttctgggctcggcgtgtcagggagtactcttaccttccaggaaggtgaagcttccgccgctcccgaagtctcgggcgagagtactaccaccagcgatgtgggtaccgaggcccctgggctgccctctgctaccccgacagcctctggcgaccgcactgagatcagcggcgatcttagcggccatactagtcagttgggagtggtgattagcacctccattccggagagcgagtggacgcagcagacccagcgcccagccgagacacatctggaaatagagtctagctcactgctgtattcaggtgaagaaacgcacaccgtggaaacggctaccagtcctactgatgcttccataccagctagtccggaatggaaaagggaatccgaatcgaccgctgcggcaccagccaggtcctgtgcggaggagccctgcggagctggcacctgcaaagaaaccgaaggccacgtgatctgtttatgcccacccgggtatactggcgagcactgtaatatcgaccaggaggtatgtgaggagggatggaacaaataccaaggacattgttaccgccattttccagatagagagacttgggtcgacgctgaacgaagatgtagagagcaacagtcgcacctgtcttccatcgtaacccctgaggagcaggagtttgtgaacaacaatgctcaggactaccagtggatcgggctcaatgacagaacaattgagggcgatttcaggtggagcgacggacaccccatgcagttcgaaaattggcggcccaaccaacctgataacttcttcgccgcaggcgaagattgtgtggtgatgatctggcatgaaaaaggcgagtggaacgacgtgccatgtaattaccatctaccctttacctgcaagaaaggcacagtagcttgcggcgagccgccagtcgtggaacatgctcgcacctttggccagaaaaaggatcggtacgagatcaactcgcttgtccgctatcaatgcactgagggcttcgtgcagcgccacatgcctacaatccgatgccagccctccgggcactgggaggagcctcagattacctgtactgacccgacaacttataaaaggcggttgcagaagcggtctagtagacatccgcgtagaagccggccgagcaccgcacactag

SEQ ID NO: 174986 - DNA, 7251 bp, Artificial Sequence
  derived and/or modified sequence
atgaccaccctgctgtgggtgtttgtgaccctgcgggtcatcacagctgctgtgacagtggagaccagtgaccatgacaacagcctgtctgtgtccatcccccagcccagccccctgcgggtgctgctgggcaccagcctgaccatcccctgctacttcatcgaccccatgcaccctgtgaccacagcccccagcacagcccccctggccccccgcatcaagtggagccgggtgtccaaggagaaggaggtggtgctgctggtggccacagagggccgggtgcgggtgaacagcgcctaccaggacaaggtgtccctgcccaactacccagccatccccagtgatgccaccctggaggtgcagagcctgcggagcaatgacagcggcgtgtaccgctgtgaggtgatgcatggaattgaggacagcgaggccaccctggaggtggtggtgaagggcatcgtgttccactaccgggccatcagcacccgctacaccctggactttgaccgggcccagagggcctgcctgcagaacagcgccatcatcgccaccccagagcagctgcaggccgcctatgaagatggcttccaccagtgtgatgctggctggctggccgaccagacagtgcgctaccccatccacaccccccgggagggctgctatggagacaaggatgagttccctggggtgaggacctacggcatccgggacaccaatgagacctatgatgtgtactgctttgctgaggagatggagggggaggtgttctacgccaccagccctgagaagttcaccttccaggaggccgccaatgaatgtcggcggctgggcgcccggctggccaccaccggccagctgtacctggcctggcaggccggcatggacatgtgcagcgctggctggctggccgacagatctgtgcgctaccccatcagcaaggcccggcccaactgtggcggcaacctgctgggcgtgaggacagtgtatgtgcacgccaaccagacaggctacccagaccccagcagccgctatgatgccatctgctacaccggggaggactttgtggacatccctgagaacttcttcggcgtgggcggggaggaggacatcaccgtgcagacagtgacctggccagacatggagctgcccctgcccaggaacatcacagaaggagaggcccggggcagcgtcatcctgactgtgaagcccatctttgaggtgagccccagccccctggagcctgaggagcccttcacctttgcccctgagatcggggccacagcctttgctgaggtggagaatgagaccggggaggccacccggccctggggcttccccaccccaggcctgggccctgccacagccttcaccagcgaggacctggtggtgcaggtgacagctgtgcccggccagccccacctgcctggaggagtggtgttccactaccggcccggccccacccgctacagcctgacctttgaggaggcccagcaggcctgcctgaggactggagctgtgattgccagccctgagcagctgcaggccgcctatgaagctggctatgagcagtgtgatgctggctggctgcgggaccagacagtgcgctaccccatcgtgagccccaggaccccctgtgtgggggacaaggacagcagccctggggtgaggacctacggcgtgcggcccagcacagagacctatgatgtgtactgctttgtggaccggctggagggggaggtgttctttgccacccggctggagcagttcaccttccaggaggccctggagttctgtgagagccacaatgccaccctggccaccaccggccagctgtatgctgcctggagccggggcctggacaagtgctacgccggctggctggctgatggcagcctgcgctaccccatcgtgacccccaggcctgcctgtggcggggacaagccaggagtgaggacagtgtacctgtaccccaaccagacaggcctgcctgaccccctgagccgccaccacgccttctgcttccggggcatctctgctgtgcccagccctggagaggaggagggcggcacccccaccagccccagcggcgtggaggagtggatcgtgacccaggtggtgcctggggtggccgctgtgcctgtggaggaggagaccacagctgtgcccagcggggagaccacagccatcctggagttcaccacagagcctgagaaccagacagagtgggagcccgcctacacccctgtgggcaccagccccctgcccggcatcctgcccacctggccacccaccggggccgccacagaggagagcacagagggccccagcgccacagaggtgcccagcgccagcgaggagcccagccccagcgaggtgcccttccccagcgaggagcccagccccagcgaggagcccttccccagcgtgcggcccttccccagcgtggagctgttccccagcgaggagcccttccccagcaaggagcccagccccagcgaggagcccagcgccagcgaggagccctacacccccagcccccctgtgcccagctggacagagctgcccagcagtggagaggagagcggggccccagatgtgtctggggacttcaccggcagcggagatgtgtctggccacctggacttcagcggccagctgagcggggaccgggccagcggcctgcccagcggggacctggacagcagcggcctgaccagcacagtgggcagcggcctgcctgtggagagcggcctgcccagcggagatgaggagcgcatcgagtggcccagcacccccaccgtgggggagctgcccagcggggctgagatcctggagggcagcgccagcggcgtgggggacctgagcggcctgcccagcggggaggtgctggagaccagcgccagcggcgtgggggacctgagcggcctgcccagcggggaggtgctggagaccacagcccctggggtggaggacatcagcggcctgcccagcggggaggtgctggagaccacagcccctggggtggaggacatcagcggcctgcccagcggggaggtgctggagaccacagcccctggggtggaggacatcagcggcctgcccagcggggaggtgctggagaccacagcccctggggtggaggacatcagcggcctgcccagcggggaggtgctggagaccacagcccctggggtggaggacatcagcggcctgcccagcggggaggtgctggagacagctgcccctggggtggaggacatcagcggcctgcccagcggggaggtgctggagacagctgcccctggggtggaggacatcagcggcctgcccagcggggaggtgctggagacagctgcccctggggtggaggacatcagcggcctgcccagcggggaggtgctggagacagctgcccctggggtggaggacatcagcggcctgcccagcggggaggtgctggagacagctgcccctggggtggaggacatcagcggcctgcccagcggggaggtgctggagacagctgcccctggggtggaggacatcagcggcctgcccagcggggaggtgctggagacagctgcccctggggtggaggacatcagcggcctgcccagcggggaggtgctggagacagctgcccctggggtggaggacatcagcggcctgcccagcggggaggtgctggagacagctgcccctggggtggaggacatcagcggcctgcccagcggggaggtgctggagacagctgcccctggggtggaggacatcagcggcctgcccagcggggaggtgctggagacagctgcccctggggtggaggacatcagcggcctgcccagcggggaggtgctggagaccacagcccctggggtggaggagatcagcggcctgcccagcggggaggtgctggagaccacagcccctggggtggatgagatcagcggcctgcccagcggggaggtgctggagaccacagcccctggggtggaggagatcagcggcctgcccagcggggaggtgctggagaccagcaccagcgctgtgggggacctgagcggcctgcccagcggcggggaggtgctggagatctctgtgtctggagtggaggacatcagcggcctgcccagcggggaggtggtggagaccagcgccagcggcattgaagatgtgtctgagctgcccagcggggagggcctggagaccagcgccagcggcgtggaggacctgagccggctgcccagcggggaggaggtgctggagatcagcgccagcggctttggagacctgagcggcctgcccagcggcggggagggcctggagaccagcgccagcgaggtgggcacagacctgagcggcctgcccagcggccgggagggcctggagaccagcgccagcggggctgaggacctgagcggcctgcccagcggcaaggaggacctggtgggcagcgccagcggggacctggacctgggcaagctgcccagcggcaccctgggcagcggccaggcccctgagaccagcggcctgcccagcggcttcagcggggagtacagcggcgtggacctgggcagcggcccccccagcggcctgcctgacttcagcggcctgcccagcggcttccccaccgtgtccctggtggacagcaccctggtggaggtggtgacagccagcacagccagcgagctggagggccggggcaccatcggcatctctggagctggggagatcagcggcctgcccagcagcgagctggacatcagcggccgggccagcggcctgcccagcggcacagagctgagcggccaggccagcggcagcccagatgtgtctggagagatccctggcctgtttggagtgtctggccagcccagcggcttcccagacaccagcggggagaccagcggcgtgacagagctgagcggcctgagcagcggccagcccggcatcagcggggaggccagcggcgtgctgtatggcaccagccagcccttcggcatcacagacctgagcggggagaccagcggcgtgcctgacctgagcggccagcccagcggcctgcccggcttcagcggggccaccagcggcgtgcctgacctggtgtctggcaccaccagcggcagcggggagagcagcggcatcacctttgtggacaccagcctggtggaggtggcccccaccaccttcaaggaggaggagggcctgggctctgtggagctgagcggcctgcccagcggggaggccgacctgagcggcaagagcggcatggtggatgtgtctggccagttctctggaacagtggacagcagcggcttcaccagccagaccccagagttcagcggcctgcccagcggcattgctgaggtgtctggagagagcagcagagctgagatcggcagcagcctgcccagcggggcctactacggcagcggcacccccagcagcttccccaccgtgtccctggtggacaggaccctggtggagagcgtgacccaggcccccacagcccaggaggccggggagggccccagcggcatcctggagctgagcggggcccacagcggggccccagacatgtctggagagcacagcggcttcctggacctgagcggcctgcagagcggcctcatcgagcccagcggggagcccccaggcaccccctacttcagcggggactttgccagcaccaccaacgtgtctggagagagctctgtggccatgggcaccagcggggaggccagcggcctgcctgaggtgaccctcatcaccagcgagtttgtggagggcgtgacagagcccaccatcagccaggagctgggccagaggcctcctgtgacccacaccccccagctgtttgagagcagcggcaaggtgtccacagctggggacatcagcggggccacccctgtgctgcccggcagcggcgtggaggtgtcctctgtgcctgagagcagcagcgagaccagcgcctacccagaggccggctttggagccagcgctgcccctgaggccagccgggaggacagcggcagcccagacctgtctgagaccaccagcgccttccacgaggccaacctggagaggagcagcggcctgggcgtgtctggcagcaccctgaccttccaggagggggaggccagcgctgcccctgaggtgtctggagagagcaccaccaccagtgatgtgggcacagaggcccctggcctgcccagcgccacccccacagccagcggggacagaacagagatcagcggggacctgagcggccacaccagccagctgggcgtggtgatcagcaccagcatccctgagagcgagtggacccagcagacccagaggcctgctgagacccacctggagattgagagcagcagcctgctgtacagcggggaggagacccacacagtggagacagccaccagccccacagatgccagcatcccagccagccctgagtggaagcgggagagcgagagcacagctgctgccccagcccggagctgtgccgaggagccctgtggggccggcacctgcaaggagacagagggccacgtgatctgcctgtgccccccaggctacacaggagagcactgcaacatcgaccaggaggtgtgtgaggagggctggaacaagtaccagggccactgctaccgccacttcccagaccgggagacctgggtggatgctgagcggcgctgccgggagcagcagagccacctgagcagcatcgtgaccccagaggagcaggagtttgtgaacaacaatgcccaggactaccagtggattggcctgaatgacaggaccatcgagggggacttccgctggagcgatggccaccccatgcagtttgagaactggaggcccaaccagcctgacaacttctttgctgctggggaggactgtgtggtgatgatctggcatgagaagggggagtggaatgatgtgccctgcaactaccacctgcccttcacctgcaagaagggcaccgtggcctgtggggagccccctgtggtggagcacgcccggaccttcggccagaagaaggacagatatgagatcaacagcctggtgcgctaccagtgcacagagggctttgtgcagaggcacatgcccaccatccgctgccagcccagcggccactgggaggagccccagatcacctgcacagaccccaccacctacaagaggcggctgcagaagaggagcagccgccacccccggcgcagccggcccagcacagcccactag

SEQ ID NO: 174987 - DNA, 7593 bp, Artificial Sequence
  derived and/or modified sequence
atgaccaccctgctgtgggtgtttgtgaccctgcgggtcatcacagctgctgtgacagtggagaccagtgaccatgacaacagcctgtctgtgtccatcccccagcccagccccctgcgggtgctgctgggcaccagcctgaccatcccctgctacttcatcgaccccatgcaccctgtgaccacagcccccagcacagcccccctggccccccgcatcaagtggagccgggtgtccaaggagaaggaggtggtgctgctggtggccacagagggccgggtgcgggtgaacagcgcctaccaggacaaggtgtccctgcccaactacccagccatccccagtgatgccaccctggaggtgcagagcctgcggagcaatgacagcggcgtgtaccgctgtgaggtgatgcatggaattgaggacagcgaggccaccctggaggtggtggtgaagggcatcgtgttccactaccgggccatcagcacccgctacaccctggactttgaccgggcccagagggcctgcctgcagaacagcgccatcatcgccaccccagagcagctgcaggccgcctatgaagatggcttccaccagtgtgatgctggctggctggccgaccagacagtgcgctaccccatccacaccccccgggagggctgctatggagacaaggatgagttccctggggtgaggacctacggcatccgggacaccaatgagacctatgatgtgtactgctttgctgaggagatggagggggaggtgttctacgccaccagccctgagaagttcaccttccaggaggccgccaatgaatgtcggcggctgggcgcccggctggccaccaccggccagctgtacctggcctggcaggccggcatggacatgtgcagcgctggctggctggccgacagatctgtgcgctaccccatcagcaaggcccggcccaactgtggcggcaacctgctgggcgtgaggacagtgtatgtgcacgccaaccagacaggctacccagaccccagcagccgctatgatgccatctgctacaccggggaggactttgtggacatccctgagaacttcttcggcgtgggcggggaggaggacatcaccgtgcagacagtgacctggccagacatggagctgcccctgcccaggaacatcacagaaggagaggcccggggcagcgtcatcctgactgtgaagcccatctttgaggtgagccccagccccctggagcctgaggagcccttcacctttgcccctgagatcggggccacagcctttgctgaggtggagaatgagaccggggaggccacccggccctggggcttccccaccccaggcctgggccctgccacagccttcaccagcgaggacctggtggtgcaggtgacagctgtgcccggccagccccacctgcctggaggagtggtgttccactaccggcccggccccacccgctacagcctgacctttgaggaggcccagcaggcctgcctgaggactggagctgtgattgccagccctgagcagctgcaggccgcctatgaagctggctatgagcagtgtgatgctggctggctgcgggaccagacagtgcgctaccccatcgtgagccccaggaccccctgtgtgggggacaaggacagcagccctggggtgaggacctacggcgtgcggcccagcacagagacctatgatgtgtactgctttgtggaccggctggagggggaggtgttctttgccacccggctggagcagttcaccttccaggaggccctggagttctgtgagagccacaatgccaccctggccaccaccggccagctgtatgctgcctggagccggggcctggacaagtgctacgccggctggctggctgatggcagcctgcgctaccccatcgtgacccccaggcctgcctgtggcggggacaagccaggagtgaggacagtgtacctgtaccccaaccagacaggcctgcctgaccccctgagccgccaccacgccttctgcttccggggcatctctgctgtgcccagccctggagaggaggagggcggcacccccaccagccccagcggcgtggaggagtggatcgtgacccaggtggtgcctggggtggccgctgtgcctgtggaggaggagaccacagctgtgcccagcggggagaccacagccatcctggagttcaccacagagcctgagaaccagacagagtgggagcccgcctacacccctgtgggcaccagccccctgcccggcatcctgcccacctggccacccaccggggccgccacagaggagagcacagagggccccagcgccacagaggtgcccagcgccagcgaggagcccagccccagcgaggtgcccttccccagcgaggagcccagccccagcgaggagcccttccccagcgtgcggcccttccccagcgtggagctgttccccagcgaggagcccttccccagcaaggagcccagccccagcgaggagcccagcgccagcgaggagccctacacccccagcccccctgtgcccagctggacagagctgcccagcagtggagaggagagcggggccccagatgtgtctggggacttcaccggcagcggagatgtgtctggccacctggacttcagcggccagctgagcggggaccgggccagcggcctgcccagcggggacctggacagcagcggcctgaccagcacagtgggcagcggcctgcctgtggagagcggcctgcccagcggagatgaggagcgcatcgagtggcccagcacccccaccgtgggggagctgcccagcggggctgagatcctggagggcagcgccagcggcgtgggggacctgagcggcctgcccagcggggaggtgctggagaccagcgccagcggcgtgggggacctgagcggcctgcccagcggggaggtgctggagaccacagcccctggggtggaggacatcagcggcctgcccagcggggaggtgctggagaccacagcccctggggtggaggacatcagcggcctgcccagcggggaggtgctggagaccacagcccctggggtggaggacatcagcggcctgcccagcggggaggtgctggagaccacagcccctggggtggaggacatcagcggcctgcccagcggggaggtgctggagaccacagcccctggggtggaggacatcagcggcctgcccagcggggaggtgctggagaccacagcccctggggtggaggacatcagcggcctgcccagcggggaggtgctggagacagctgcccctggggtggaggacatcagcggcctgcccagcggggaggtgctggagacagctgcccctggggtggaggacatcagcggcctgcccagcggggaggtgctggagacagctgcccctggggtggaggacatcagcggcctgcccagcggggaggtgctggagacagctgcccctggggtggaggacatcagcggcctgcccagcggggaggtgctggagacagctgcccctggggtggaggacatcagcggcctgcccagcggggaggtgctggagacagctgcccctggggtggaggacatcagcggcctgcccagcggggaggtgctggagacagctgcccctggggtggaggacatcagcggcctgcccagcggggaggtgctggagacagctgcccctggggtggaggacatcagcggcctgcccagcggggaggtgctggagacagctgcccctggggtggaggacatcagcggcctgcccagcggggaggtgctggagacagctgcccctggggtggaggacatcagcggcctgcccagcggggaggtgctggagacagctgcccctggggtggaggacatcagcggcctgcccagcggggaggtgctggagacagctgcccctggggtggaggacatcagcggcctgcccagcggggaggtgctggagacagctgcccctggggtggaggacatcagcggcctgcccagcggggaggtgctggagacagctgcccctggggtggaggacatcagcggcctgcccagcggggaggtgctggagacagctgcccctggggtggaggacatcagcggcctgcccagcggggaggtgctggagacagctgcccctggggtggaggacatcagcggcctgcccagcggggaggtgctggagaccacagcccctggggtggaggagatcagcggcctgcccagcggggaggtgctggagaccacagcccctggggtggatgagatcagcggcctgcccagcggggaggtgctggagaccacagcccctggggtggaggagatcagcggcctgcccagcggggaggtgctggagaccagcaccagcgctgtgggggacctgagcggcctgcccagcggcggggaggtgctggagatctctgtgtctggagtggaggacatcagcggcctgcccagcggggaggtggtggagaccagcgccagcggcattgaagatgtgtctgagctgcccagcggggagggcctggagaccagcgccagcggcgtggaggacctgagccggctgcccagcggggaggaggtgctggagatcagcgccagcggctttggagacctgagcggcctgcccagcggcggggagggcctggagaccagcgccagcgaggtgggcacagacctgagcggcctgcccagcggccgggagggcctggagaccagcgccagcggggctgaggacctgagcggcctgcccagcggcaaggaggacctggtgggcagcgccagcggggacctggacctgggcaagctgcccagcggcaccctgggcagcggccaggcccctgagaccagcggcctgcccagcggcttcagcggggagtacagcggcgtggacctgggcagcggcccccccagcggcctgcctgacttcagcggcctgcccagcggcttccccaccgtgtccctggtggacagcaccctggtggaggtggtgacagccagcacagccagcgagctggagggccggggcaccatcggcatctctggagctggggagatcagcggcctgcccagcagcgagctggacatcagcggccgggccagcggcctgcccagcggcacagagctgagcggccaggccagcggcagcccagatgtgtctggagagatccctggcctgtttggagtgtctggccagcccagcggcttcccagacaccagcggggagaccagcggcgtgacagagctgagcggcctgagcagcggccagcccggcatcagcggggaggccagcggcgtgctgtatggcaccagccagcccttcggcatcacagacctgagcggggagaccagcggcgtgcctgacctgagcggccagcccagcggcctgcccggcttcagcggggccaccagcggcgtgcctgacctggtgtctggcaccaccagcggcagcggggagagcagcggcatcacctttgtggacaccagcctggtggaggtggcccccaccaccttcaaggaggaggagggcctgggctctgtggagctgagcggcctgcccagcggggaggccgacctgagcggcaagagcggcatggtggatgtgtctggccagttctctggaacagtggacagcagcggcttcaccagccagaccccagagttcagcggcctgcccagcggcattgctgaggtgtctggagagagcagcagagctgagatcggcagcagcctgcccagcggggcctactacggcagcggcacccccagcagcttccccaccgtgtccctggtggacaggaccctggtggagagcgtgacccaggcccccacagcccaggaggccggggagggccccagcggcatcctggagctgagcggggcccacagcggggccccagacatgtctggagagcacagcggcttcctggacctgagcggcctgcagagcggcctcatcgagcccagcggggagcccccaggcaccccctacttcagcggggactttgccagcaccaccaacgtgtctggagagagctctgtggccatgggcaccagcggggaggccagcggcctgcctgaggtgaccctcatcaccagcgagtttgtggagggcgtgacagagcccaccatcagccaggagctgggccagaggcctcctgtgacccacaccccccagctgtttgagagcagcggcaaggtgtccacagctggggacatcagcggggccacccctgtgctgcccggcagcggcgtggaggtgtcctctgtgcctgagagcagcagcgagaccagcgcctacccagaggccggctttggagccagcgctgcccctgaggccagccgggaggacagcggcagcccagacctgtctgagaccaccagcgccttccacgaggccaacctggagaggagcagcggcctgggcgtgtctggcagcaccctgaccttccaggagggggaggccagcgctgcccctgaggtgtctggagagagcaccaccaccagtgatgtgggcacagaggcccctggcctgcccagcgccacccccacagccagcggggacagaacagagatcagcggggacctgagcggccacaccagccagctgggcgtggtgatcagcaccagcatccctgagagcgagtggacccagcagacccagaggcctgctgagacccacctggagattgagagcagcagcctgctgtacagcggggaggagacccacacagtggagacagccaccagccccacagatgccagcatcccagccagccctgagtggaagcgggagagcgagagcacagctgctgccccagcccggagctgtgccgaggagccctgtggggccggcacctgcaaggagacagagggccacgtgatctgcctgtgccccccaggctacacaggagagcactgcaacatcgaccaggaggtgtgtgaggagggctggaacaagtaccagggccactgctaccgccacttcccagaccgggagacctgggtggatgctgagcggcgctgccgggagcagcagagccacctgagcagcatcgtgaccccagaggagcaggagtttgtgaacaacaatgcccaggactaccagtggattggcctgaatgacaggaccatcgagggggacttccgctggagcgatggccaccccatgcagtttgagaactggaggcccaaccagcctgacaacttctttgctgctggggaggactgtgtggtgatgatctggcatgagaagggggagtggaatgatgtgccctgcaactaccacctgcccttcacctgcaagaagggcaccgtggcctgtggggagccccctgtggtggagcacgcccggaccttcggccagaagaaggacagatatgagatcaacagcctggtgcgctaccagtgcacagagggctttgtgcagaggcacatgcccaccatccgctgccagcccagcggccactgggaggagccccagatcacctgcacagaccccaccacctacaagaggcggctgcagaagaggagcagccgccacccccggcgcagccggcccagcacagcccactag

SEQ ID NO: 174988 - DNA, 8498 bp, Artificial Sequence
  derived and/or modified sequence
cacctacctccccgccgctccagagggggctcgcagagctgaggacgcgcgcagcgctgctcaaggtctctctctctcagcaccctcgccggccggcgtctgacgcgggtgccagggtctccgggcacctttcagtgtccattccctcagccagccaggactccgcaacccagcagttgccgctgcggccacagcccgaggggacctgcggacaggacgccggcaggaggaggggtgcgcagcgcccgcgcagagcgtctccctcgctacgcagcgagacccgggcctcccggccccaggagcccccagctgcctcgccaggtgtgtgggactgaagttcttggagaagggagtccaactcttcaaggtgaactatgaccactttactctgggttttcgtgactctgagggtcatcactgcagctgtcactgtagaaacttcagaccatgacaactcgctgagtgtcagcatcccccaaccgtccccgctgagggtcctcctggggacctccctcaccatcccctgctatttcatcgaccccatgcaccctgtgaccaccgccccttctaccgccccactggccccaagaatcaagtggagccgtgtgtccaaggagaaggaggtagtgctgctggtggccactgaagggcgcgtgcgggtcaacagtgcctatcaggacaaggtctcactgcccaactacccggccatccccagtgacgccaccttggaagtccagagcctgcgctccaatgactctggggtctaccgctgcgaggtgatgcatggcatcgaggacagcgaggccaccctggaagtcgtggtgaaaggcatcgtgttccattacagagccatctctacacgctacaccctcgactttgacagggcgcagcgggcctgcctgcagaacagtgccatcattgccacgcctgagcagctgcaggccgcctacgaagacggcttccaccagtgtgacgccggctggctggctgaccagactgtcagataccccatccacactccccgggaaggctgctatggagacaaggatgagtttcctggtgtgaggacgtatggcatccgagacaccaacgagacctatgatgtgtactgcttcgccgaggagatggagggtgaggtcttttatgcaacatctccagagaagttcaccttccaggaagcagccaatgagtgccggcggctgggtgcccggctggccaccacgggccagctctacctggcctggcaggctggcatggacatgtgcagcgccggctggctggccgaccgcagcgtgcgctaccccatctccaaggcccggcccaactgcggtggcaacctcctgggcgtgaggaccgtctacgtgcatgccaaccagacgggctaccccgacccctcatcccgctacgacgccatctgctacacaggtgaagactttgtggacatcccagaaaacttctttggagtggggggtgaggaggacatcaccgtccagacagtgacctggcctgacatggagctgccactgcctcgaaacatcactgagggtgaagcccgaggcagcgtgatccttaccgtaaagcccatcttcgaggtctcccccagtcccctggaacccgaggagcccttcacgtttgcccctgaaataggggccactgccttcgctgaggttgagaatgagactggagaggccaccaggccctggggctttcccacacctggcctgggccctgccacggcattcaccagtgaggacctcgtcgtgcaggtgaccgctgtccctgggcagccgcatttgccagggggggtcgtcttccactaccgcccgggacccacccgctactcgctgacctttgaggaggcacagcaggcctgcctgcgcacgggggcggtcattgcctcgccggagcagctccaggccgcctacgaagcaggctatgagcagtgtgacgccggctggctgcgggaccagaccgtcagataccccattgtgagcccccggaccccatgcgtgggtgacaaggacagcagcccaggggtcaggacctatggcgtgcgcccatcaacagagacctacgatgtctactgctttgtagacagacttgagggggaggtgttcttcgccacacgccttgagcagttcaccttccaggaagcactggagttctgtgaatctcacaatgctacgctggccaccacgggccagctctacgccgcctggagccgcggcctggacaagtgctatgccggctggctggccgacggcagcctccgctaccccatcgtcaccccaaggcctgcctgcggtggggacaagccaggcgtgagaacggtctacctctaccctaaccagacgggcctcccagacccactgtcccggcaccatgccttctgcttccgaggcatttcagcggttccttctccaggagaagaagagggtggcacacccacatcaccctctggtgtggaggagtggatcgtgacccaagtggttcctggtgtggctgctgtccccgtagaagaggagacaactgctgtaccctcaggggagactactgccatcctagagttcaccaccgagccagaaaaccagacagaatgggaaccagcctataccccagtgggcacatccccgctgccagggatccttcctacttggcctcccactggcgcagcaacagaggaaagtacagaaggcccttctgcaactgaagtgccctctgcctcagaggaaccatccccctcagaggtgccattcccctcagaggagccatccccctcagaggaaccattcccctcagtgaggccattcccctcagtggagctgttcccctcagaggagccattcccctccaaggagccatccccctcagaggaaccatcagcctcggaagagccgtatacaccttcaccccccgtgcccagctggactgagctgcccagctctggggaggaatctggggcccctgatgtcagtggtgacttcacaggcagtggagatgtttcaggacaccttgacttcagtgggcagctgtcaggggacagggcaagtggactgccctctggagacctggactccagtggtcttacttccacagtgggctcaggcctgcctgtggaaagtggactaccctcaggggatgaagagagaattgagtggcccagcactcctacggttggtgaactgccctctggagctgagatcctagagggctctgcctctggagttggggatctcagtggacttccttctggagaagttctagagacctctgcctctggagtaggagacctcagtgggcttccttctggagaagttctagagaccactgcccctggagtagaggacatcagcgggcttccttctggagaagttctagagaccactgcccctggagtagaggacatcagcgggcttccttctggagaagttctagagaccactgcccctggagtagaggacatcagcgggcttccttctggagaagttctagagaccactgcccctggagtagaggacatcagcgggcttccttctggagaagttctagagaccactgcccctggagtagaggacatcagcgggcttccttctggagaagttctagagaccgctgcccctggagtagaggacatcagcgggcttccttctggagaagttctagagaccgctgcccctggagtagaggacatcagcgggcttccttctggagaagttctagagactgctgcccctggagtagaggacatcagcgggcttccttctggagaagttctagagactgctgcccctggagtagaggacatcagcgggcttccttctggagaagttctagagactgctgcccctggagtagaggacatcagcgggcttccttctggagaagttctagagactgctgcccctggagtagaggacatcagcgggcttccttctggagaagttctagagactgctgcccctggagtagaggacatcagcgggcttccttctggagaagttctagagactgctgcccctggagtagaggacatcagcgggcttccttctggagaagttctagagactgctgcccctggagtagaggacatcagcgggcttccttctggagaagttctagagactgctgcccctggagtagaggacatcagcgggcttccttctggagaagttctagagactgctgcccctggagtagaggacatcagcgggcttccttctggagaagttctagagactactgcccctggagtagaggagatcagcgggcttccttctggagaagttctagagactactgcccctggagtagatgagatcagtgggcttccttctggagaagttctagagactactgcccctggagtagaggagatcagcgggcttccttctggagaagttctagagacttctacctctgcggtaggggacctcagtggacttccttctggaggagaagttctagagatttctgtctctggagtagaggacatcagtgggcttccttctggagaggttgtagagacttctgcctctggaatagaggatgtcagtgaacttccttcaggagaaggtctagagacctctgcttctggagtagaggacctcagcaggctcccttctggagaagaagttctagagatttctgcctctggatttggggacctcagtggacttccttctggaggagaaggtctagagacctctgcttctgaagtagggactgacctcagtgggcttccttctggaagggagggtctagagacttcagcttctggagctgaggacctcagtgggttgccttctggaaaagaagacttggtggggtcagcttctggagacttggacttgggcaaactgccttctggaactctaggaagtgggcaagctccagaaacaagtggtcttccctctggatttagtggtgagtattctggggtggaccttggaagtggcccaccctctggcctgcctgactttagtggacttccatctggattcccaactgtttccctagtggattctacattggtggaagtggtcacagcctccactgcaagtgaactggaagggaggggaaccattggcatcagtggtgcaggagaaatatctggactgccctccagtgagctggacattagtgggagagctagtggactcccttcaggaactgaactcagtggccaagcatctgggtctcctgatgtcagtggggaaatacctggactctttggtgtcagtggacagccatcagggtttcctgacactagtggggaaacatctggagtgactgagcttagcgggctgtcctctggacaaccaggtattagtggagaagcatctggagttctttatggcactagtcaaccctttggcataactgatctgagtggagaaacatctggggtccctgatctcagtgggcagccttcagggttaccagggttcagtggggcaacatcaggagtccctgacctggtttctggtaccacgagtggcagcggtgaatcttctgggattacatttgtggacaccagtttggttgaagtggcccctactacatttaaagaagaagaaggcttagggtctgtggaactcagtggcctcccttccggagaggcagatctgtcaggcaaatctgggatggtggatgtcagtggacagttttctggaacagtcgattccagtgggtttacatcccagactccggaattcagtggcctaccaagtggcatagctgaggtcagtggagaatcctccagagctgagattgggagcagcctgccctcgggagcatattatggcagtggaactccatctagtttccccactgtctctcttgtagacagaactttggtggaatctgtaacccaggctccaacagcccaagaggcaggagaagggccttctggcattttagaactcagtggtgctcattctggagcaccagacatgtctggggagcattctggatttctggacctaagtgggctgcagtccgggctgatagagcccagcggagagccaccaggtactccatattttagtggggattttgccagcaccaccaatgtaagtggagaatcctctgtagccatgggcaccagtggagaggcctcaggacttccagaagttactttaatcacttctgagttcgtggagggtgttactgaaccaactatttctcaggaactaggccaaaggccccctgtgacacacacaccccagctttttgagtccagtggaaaagtctccacagctggggacattagtggagctaccccagtgctccctgggtctggagtagaagtatcatcagtcccagaatctagcagtgagacgtccgcctatcctgaagctgggttcggggcatctgccgcccctgaggccagcagagaagattctgggtcccctgatctgagtgaaaccacctctgcattccacgaagctaaccttgagagatcctctggcctaggagtgagcggcagcactttgacatttcaagaaggcgaggcgtccgctgccccagaagtgagtggagaatccaccaccaccagtgatgtggggacagaggcaccaggcttgccttcagccactcccacggcttctggagacaggactgaaatcagcggagacctgtctggtcacacctcgcagctgggcgttgtcatcagcaccagcatcccagagtctgagtggacccagcagacccagcgccctgcagagacgcatctagaaattgagtcctcaagcctcctgtactcaggagaagagactcacacagtcgaaacagccacctccccaacagatgcttccatcccagcttctccggaatggaaacgtgaatcagaatcaactgctgcagcccccgccaggtcctgtgcagaggagccctgtggagctgggacctgcaaggagacagagggacacgtcatatgcctgtgcccccctggctacactggcgagcactgtaacatagaccaggaggtatgtgaggagggctggaacaagtaccagggccactgttaccgccacttcccggaccgcgagacctgggtggatgctgagcgccggtgtcgggagcagcagtcacacctgagcagcatcgtcacccccgaggagcaggagtttgtcaacaacaatgcccaagactaccagtggatcggcctgaacgacaggaccatcgaaggggacttccgctggtcagatggacaccccatgcaatttgagaactggcgccccaaccagcctgacaacttttttgccgctggagaggactgtgtggtgatgatctggcacgagaagggcgagtggaatgatgttccctgcaattaccacctccccttcacgtgtaaaaagggcacagtggcctgcggagagccccctgtggtggagcatgccaggaccttcgggcagaagaaggaccggtatgagatcaattccctggtgcggtaccagtgcacagaggggtttgtccagcgccacatgcccaccatccggtgccagcccagcgggcactgggaggagcctcagatcacctgcacagaccccaccacctacaaacgcagactacagaagcggagctcacggcaccctcggaggagccgccccagcacagcccactgagaagagcttccaggacgcacccaggacgctgagcccaggagcctgccaggctgacgtgcatcccacccagacggtgtcctcttcttgtcgctttttgtcatataaggaatcccattaaagaaggaaaaaaataaatcccacatttgtgtatgcacccactcacccctccaaatcagcaaaaccgcatctaatttgtccgccgaatgccaaagcaaagcaaacttattataacccttggactgagtttagagacatttcttcaatttcccatcgtgcctttccagggaccagtgcagggacagggggagaaggggaggggttaagttaaataaagaagattatttttgtttcctgactttatccaagagcagtgcaatcgttggttatttcacctccagggagagctagggaggagggaggagggctccaaaggagctggaaggagcagaggcctgagagcaggaagaactcggaaccgcagctgaatgtattggatgagaaggagccaggagggctacaccatctgtatgagggaaaagccttgggggagaggggtgggttcctgcctcctgccgagggtaagccggcaggagagagccatcagagggacctccgctgcctgggagttgggttccctccaagggtccctctttcagtgtcctctctctcacctgggtctgccaccctaacaggtggcaactcggcagggctgctgggggcacttcctgcccagtggggggtgccgcccaaccttctcccctccccacccccgcccccgggaccgtgcaggcaccagggttccgtgcacctatttatatttttgaaaactgaagattataatattataataataataaagacattggaagagat

SEQ ID NO: 174989 - DNA, 8840 bp, Artificial Sequence
  derived and/or modified sequence
cacctacctccccgccgctccagagggggctcgcagagctgaggacgcgcgcagcgctgctcaaggtctctctctctcagcaccctcgccggccggcgtctgacgcgggtgccagggtctccgggcacctttcagtgtccattccctcagccagccaggactccgcaacccagcagttgccgctgcggccacagcccgaggggacctgcggacaggacgccggcaggaggaggggtgcgcagcgcccgcgcagagcgtctccctcgctacgcagcgagacccgggcctcccggccccaggagcccccagctgcctcgccaggtgtgtgggactgaagttcttggagaagggagtccaactcttcaaggtgaactatgaccactttactctgggttttcgtgactctgagggtcatcactgcagctgtcactgtagaaacttcagaccatgacaactcgctgagtgtcagcatcccccaaccgtccccgctgagggtcctcctggggacctccctcaccatcccctgctatttcatcgaccccatgcaccctgtgaccaccgccccttctaccgccccactggccccaagaatcaagtggagccgtgtgtccaaggagaaggaggtagtgctgctggtggccactgaagggcgcgtgcgggtcaacagtgcctatcaggacaaggtctcactgcccaactacccggccatccccagtgacgccaccttggaagtccagagcctgcgctccaatgactctggggtctaccgctgcgaggtgatgcatggcatcgaggacagcgaggccaccctggaagtcgtggtgaaaggcatcgtgttccattacagagccatctctacacgctacaccctcgactttgacagggcgcagcgggcctgcctgcagaacagtgccatcattgccacgcctgagcagctgcaggccgcctacgaagacggcttccaccagtgtgacgccggctggctggctgaccagactgtcagataccccatccacactccccgggaaggctgctatggagacaaggatgagtttcctggtgtgaggacgtatggcatccgagacaccaacgagacctatgatgtgtactgcttcgccgaggagatggagggtgaggtcttttatgcaacatctccagagaagttcaccttccaggaagcagccaatgagtgccggcggctgggtgcccggctggccaccacgggccagctctacctggcctggcaggctggcatggacatgtgcagcgccggctggctggccgaccgcagcgtgcgctaccccatctccaaggcccggcccaactgcggtggcaacctcctgggcgtgaggaccgtctacgtgcatgccaaccagacgggctaccccgacccctcatcccgctacgacgccatctgctacacaggtgaagactttgtggacatcccagaaaacttctttggagtggggggtgaggaggacatcaccgtccagacagtgacctggcctgacatggagctgccactgcctcgaaacatcactgagggtgaagcccgaggcagcgtgatccttaccgtaaagcccatcttcgaggtctcccccagtcccctggaacccgaggagcccttcacgtttgcccctgaaataggggccactgccttcgctgaggttgagaatgagactggagaggccaccaggccctggggctttcccacacctggcctgggccctgccacggcattcaccagtgaggacctcgtcgtgcaggtgaccgctgtccctgggcagccgcatttgccagggggggtcgtcttccactaccgcccgggacccacccgctactcgctgacctttgaggaggcacagcaggcctgcctgcgcacgggggcggtcattgcctcgccggagcagctccaggccgcctacgaagcaggctatgagcagtgtgacgccggctggctgcgggaccagaccgtcagataccccattgtgagcccccggaccccatgcgtgggtgacaaggacagcagcccaggggtcaggacctatggcgtgcgcccatcaacagagacctacgatgtctactgctttgtagacagacttgagggggaggtgttcttcgccacacgccttgagcagttcaccttccaggaagcactggagttctgtgaatctcacaatgctacgctggccaccacgggccagctctacgccgcctggagccgcggcctggacaagtgctatgccggctggctggccgacggcagcctccgctaccccatcgtcaccccaaggcctgcctgcggtggggacaagccaggcgtgagaacggtctacctctaccctaaccagacgggcctcccagacccactgtcccggcaccatgccttctgcttccgaggcatttcagcggttccttctccaggagaagaagagggtggcacacccacatcaccctctggtgtggaggagtggatcgtgacccaagtggttcctggtgtggctgctgtccccgtagaagaggagacaactgctgtaccctcaggggagactactgccatcctagagttcaccaccgagccagaaaaccagacagaatgggaaccagcctataccccagtgggcacatccccgctgccagggatccttcctacttggcctcccactggcgcagcaacagaggaaagtacagaaggcccttctgcaactgaagtgccctctgcctcagaggaaccatccccctcagaggtgccattcccctcagaggagccatccccctcagaggaaccattcccctcagtgaggccattcccctcagtggagctgttcccctcagaggagccattcccctccaaggagccatccccctcagaggaaccatcagcctcggaagagccgtatacaccttcaccccccgtgcccagctggactgagctgcccagctctggggaggaatctggggcccctgatgtcagtggtgacttcacaggcagtggagatgtttcaggacaccttgacttcagtgggcagctgtcaggggacagggcaagtggactgccctctggagacctggactccagtggtcttacttccacagtgggctcaggcctgcctgtggaaagtggactaccctcaggggatgaagagagaattgagtggcccagcactcctacggttggtgaactgccctctggagctgagatcctagagggctctgcctctggagttggggatctcagtggacttccttctggagaagttctagagacctctgcctctggagtaggagacctcagtgggcttccttctggagaagttctagagaccactgcccctggagtagaggacatcagcgggcttccttctggagaagttctagagaccactgcccctggagtagaggacatcagcgggcttccttctggagaagttctagagaccactgcccctggagtagaggacatcagcgggcttccttctggagaagttctagagaccactgcccctggagtagaggacatcagcgggcttccttctggagaagttctagagaccactgcccctggagtagaggacatcagcgggcttccttctggagaagttctagagaccactgcccctggagtagaggacatcagcgggcttccttctggagaagttctagagaccgctgcccctggagtagaggacatcagcgggcttccttctggagaagttctagagaccgctgcccctggagtagaggacatcagcgggcttccttctggagaagttctagagaccgctgcccctggagtagaggacatcagcgggcttccttctggagaagttctagagaccgctgcccctggagtagaggacatcagcgggcttccttctggagaagttctagagaccgctgcccctggagtagaggacatcagcgggcttccttctggagaagttctagagaccgctgcccctggagtagaggacatcagcgggcttccttctggagaagttctagagaccgctgcccctggagtagaggacatcagcgggcttccttctggagaagttctagagactgctgcccctggagtagaggacatcagcgggcttccttctggagaagttctagagactgctgcccctggagtagaggacatcagcgggcttccttctggagaagttctagagactgctgcccctggagtagaggacatcagcgggcttccttctggagaagttctagagactgctgcccctggagtagaggacatcagcgggcttccttctggagaagttctagagactgctgcccctggagtagaggacatcagcgggcttccttctggagaagttctagagactgctgcccctggagtagaggacatcagcgggcttccttctggagaagttctagagactgctgcccctggagtagaggacatcagcgggcttccttctggagaagttctagagactgctgcccctggagtagaggacatcagcgggcttccttctggagaagttctagagactgctgcccctggagtagaggacatcagcgggcttccttctggagaagttctagagactactgcccctggagtagaggagatcagcgggcttccttctggagaagttctagagactactgcccctggagtagatgagatcagtgggcttccttctggagaagttctagagactactgcccctggagtagaggagatcagcgggcttccttctggagaagttctagagacttctacctctgcggtaggggacctcagtggacttccttctggaggagaagttctagagatttctgtctctggagtagaggacatcagtgggcttccttctggagaggttgtagagacttctgcctctggaatagaggatgtcagtgaacttccttcaggagaaggtctagagacctctgcttctggagtagaggacctcagcaggctcccttctggagaagaagttctagagatttctgcctctggatttggggacctcagtggacttccttctggaggagaaggtctagagacctctgcttctgaagtagggactgacctcagtgggcttccttctggaagggagggtctagagacttcagcttctggagctgaggacctcagtgggttgccttctggaaaagaagacttggtggggtcagcttctggagacttggacttgggcaaactgccttctggaactctaggaagtgggcaagctccagaaacaagtggtcttccctctggatttagtggtgagtattctggggtggaccttggaagtggcccaccctctggcctgcctgactttagtggacttccatctggattcccaactgtttccctagtggattctacattggtggaagtggtcacagcctccactgcaagtgaactggaagggaggggaaccattggcatcagtggtgcaggagaaatatctggactgccctccagtgagctggacattagtgggagagctagtggactcccttcaggaactgaactcagtggccaagcatctgggtctcctgatgtcagtggggaaatacctggactctttggtgtcagtggacagccatcagggtttcctgacactagtggggaaacatctggagtgactgagcttagcgggctgtcctctggacaaccaggtattagtggagaagcatctggagttctttatggcactagtcaaccctttggcataactgatctgagtggagaaacatctggggtccctgatctcagtgggcagccttcagggttaccagggttcagtggggcaacatcaggagtccctgacctggtttctggtaccacgagtggcagcggtgaatcttctgggattacatttgtggacaccagtttggttgaagtggcccctactacatttaaagaagaagaaggcttagggtctgtggaactcagtggcctcccttccggagaggcagatctgtcaggcaaatctgggatggtggatgtcagtggacagttttctggaacagtcgattccagtgggtttacatcccagactccggaattcagtggcctaccaagtggcatagctgaggtcagtggagaatcctccagagctgagattgggagcagcctgccctcgggagcatattatggcagtggaactccatctagtttccccactgtctctcttgtagacagaactttggtggaatctgtaacccaggctccaacagcccaagaggcaggagaagggccttctggcattttagaactcagtggtgctcattctggagcaccagacatgtctggggagcattctggatttctggacctaagtgggctgcagtccgggctgatagagcccagcggagagccaccaggtactccatattttagtggggattttgccagcaccaccaatgtaagtggagaatcctctgtagccatgggcaccagtggagaggcctcaggacttccagaagttactttaatcacttctgagttcgtggagggtgttactgaaccaactatttctcaggaactaggccaaaggccccctgtgacacacacaccccagctttttgagtccagtggaaaagtctccacagctggggacattagtggagctaccccagtgctccctgggtctggagtagaagtatcatcagtcccagaatctagcagtgagacgtccgcctatcctgaagctgggttcggggcatctgccgcccctgaggccagcagagaagattctgggtcccctgatctgagtgaaaccacctctgcattccacgaagctaaccttgagagatcctctggcctaggagtgagcggcagcactttgacatttcaagaaggcgaggcgtccgctgccccagaagtgagtggagaatccaccaccaccagtgatgtggggacagaggcaccaggcttgccttcagccactcccacggcttctggagacaggactgaaatcagcggagacctgtctggtcacacctcgcagctgggcgttgtcatcagcaccagcatcccagagtctgagtggacccagcagacccagcgccctgcagagacgcatctagaaattgagtcctcaagcctcctgtactcaggagaagagactcacacagtcgaaacagccacctccccaacagatgcttccatcccagcttctccggaatggaaacgtgaatcagaatcaactgctgcagcccccgccaggtcctgtgcagaggagccctgtggagctgggacctgcaaggagacagagggacacgtcatatgcctgtgcccccctggctacactggcgagcactgtaacatagaccaggaggtatgtgaggagggctggaacaagtaccagggccactgttaccgccacttcccggaccgcgagacctgggtggatgctgagcgccggtgtcgggagcagcagtcacacctgagcagcatcgtcacccccgaggagcaggagtttgtcaacaacaatgcccaagactaccagtggatcggcctgaacgacaggaccatcgaaggggacttccgctggtcagatggacaccccatgcaatttgagaactggcgccccaaccagcctgacaacttttttgccgctggagaggactgtgtggtgatgatctggcacgagaagggcgagtggaatgatgttccctgcaattaccacctccccttcacgtgtaaaaagggcacagtggcctgcggagagccccctgtggtggagcatgccaggaccttcgggcagaagaaggaccggtatgagatcaattccctggtgcggtaccagtgcacagaggggtttgtccagcgccacatgcccaccatccggtgccagcccagcgggcactgggaggagcctcagatcacctgcacagaccccaccacctacaaacgcagactacagaagcggagctcacggcaccctcggaggagccgccccagcacagcccactgagaagagcttccaggacgcacccaggacgctgagcccaggagcctgccaggctgacgtgcatcccacccagacggtgtcctcttcttgtcgctttttgtcatataaggaatcccattaaagaaggaaaaaaataaatcccacatttgtgtatgcacccactcacccctccaaatcagcaaaaccgcatctaatttgtccgccgaatgccaaagcaaagcaaacttattataacccttggactgagtttagagacatttcttcaatttcccatcgtgcctttccagggaccagtgcagggacagggggagaaggggaggggttaagttaaataaagaagattatttttgtttcctgactttatccaagagcagtgcaatcgttggttatttcacctccagggagagctagggaggagggaggagggctccaaaggagctggaaggagcagaggcctgagagcaggaagaactcggaaccgcagctgaatgtattggatgagaaggagccaggagggctacaccatctgtatgagggaaaagccttgggggagaggggtgggttcctgcctcctgccgagggtaagccggcaggagagagccatcagagggacctccgctgcctgggagttgggttccctccaagggtccctctttcagtgtcctctctctcacctgggtctgccaccctaacaggtggcaactcggcagggctgctgggggcacttcctgcccagtggggggtgccgcccaaccttctcccctccccacccccgcccccgggaccgtgcaggcaccagggttccgtgcacctatttatatttttgaaaactgaagattataatattataataataataaagacattggaagagat

SEQ ID NO: 174990 - DNA, 7593 bp, Artificial Sequence
  derived and/or modified sequence
atgaccactttactctgggttttcgtgactctgagggtcatcactgcagctgtcactgtagaaacttcagaccatgacaactcgctgagtgtcagcatcccccaaccgtccccgctgagggtcctcctggggacctccctcaccatcccctgctatttcatcgaccccatgcaccctgtgaccaccgccccttctaccgccccactggccccaagaatcaagtggagccgtgtgtccaaggagaaggaggtagtgctgctggtggccactgaagggcgcgtgcgggtcaacagtgcctatcaggacaaggtctcactgcccaactacccggccatccccagtgacgccaccttggaagtccagagcctgcgctccaatgactctggggtctaccgctgcgaggtgatgcatggcatcgaggacagcgaggccaccctggaagtcgtggtgaaaggcatcgtgttccattacagagccatctctacacgctacaccctcgactttgacagggcgcagcgggcctgcctgcagaacagtgccatcattgccacgcctgagcagctgcaggccgcctacgaagacggcttccaccagtgtgacgccggctggctggctgaccagactgtcagataccccatccacactccccgggaaggctgctatggagacaaggatgagtttcctggtgtgaggacgtatggcatccgagacaccaacgagacctatgatgtgtactgcttcgccgaggagatggagggtgaggtcttttatgcaacatctccagagaagttcaccttccaggaagcagccaatgagtgccggcggctgggtgcccggctggccaccacgggccagctctacctggcctggcaggctggcatggacatgtgcagcgccggctggctggccgaccgcagcgtgcgctaccccatctccaaggcccggcccaactgcggtggcaacctcctgggcgtgaggaccgtctacgtgcatgccaaccagacgggctaccccgacccctcatcccgctacgacgccatctgctacacaggtgaagactttgtggacatcccagaaaacttctttggagtggggggtgaggaggacatcaccgtccagacagtgacctggcctgacatggagctgccactgcctcgaaacatcactgagggtgaagcccgaggcagcgtgatccttaccgtaaagcccatcttcgaggtctcccccagtcccctggaacccgaggagcccttcacgtttgcccctgaaataggggccactgccttcgctgaggttgagaatgagactggagaggccaccaggccctggggctttcccacacctggcctgggccctgccacggcattcaccagtgaggacctcgtcgtgcaggtgaccgctgtccctgggcagccgcatttgccagggggggtcgtcttccactaccgcccgggacccacccgctactcgctgacctttgaggaggcacagcaggcctgcctgcgcacgggggcggtcattgcctcgccggagcagctccaggccgcctacgaagcaggctatgagcagtgtgacgccggctggctgcgggaccagaccgtcagataccccattgtgagcccccggaccccatgcgtgggtgacaaggacagcagcccaggggtcaggacctatggcgtgcgcccatcaacagagacctacgatgtctactgctttgtagacagacttgagggggaggtgttcttcgccacacgccttgagcagttcaccttccaggaagcactggagttctgtgaatctcacaatgctacgctggccaccacgggccagctctacgccgcctggagccgcggcctggacaagtgctatgccggctggctggccgacggcagcctccgctaccccatcgtcaccccaaggcctgcctgcggtggggacaagccaggcgtgagaacggtctacctctaccctaaccagacgggcctcccagacccactgtcccggcaccatgccttctgcttccgaggcatttcagcggttccttctccaggagaagaagagggtggcacacccacatcaccctctggtgtggaggagtggatcgtgacccaagtggttcctggtgtggctgctgtccccgtagaagaggagacaactgctgtaccctcaggggagactactgccatcctagagttcaccaccgagccagaaaaccagacagaatgggaaccagcctataccccagtgggcacatccccgctgccagggatccttcctacttggcctcccactggcgcagcaacagaggaaagtacagaaggcccttctgcaactgaagtgccctctgcctcagaggaaccatccccctcagaggtgccattcccctcagaggagccatccccctcagaggaaccattcccctcagtgaggccattcccctcagtggagctgttcccctcagaggagccattcccctccaaggagccatccccctcagaggaaccatcagcctcggaagagccgtatacaccttcaccccccgtgcccagctggactgagctgcccagctctggggaggaatctggggcccctgatgtcagtggtgacttcacaggcagtggagatgtttcaggacaccttgacttcagtgggcagctgtcaggggacagggcaagtggactgccctctggagacctggactccagtggtcttacttccacagtgggctcaggcctgcctgtggaaagtggactaccctcaggggatgaagagagaattgagtggcccagcactcctacggttggtgaactgccctctggagctgagatcctagagggctctgcctctggagttggggatctcagtggacttccttctggagaagttctagagacctctgcctctggagtaggagacctcagtgggcttccttctggagaagttctagagaccactgcccctggagtagaggacatcagcgggcttccttctggagaagttctagagaccactgcccctggagtagaggacatcagcgggcttccttctggagaagttctagagaccactgcccctggagtagaggacatcagcgggcttccttctggagaagttctagagaccactgcccctggagtagaggacatcagcgggcttccttctggagaagttctagagaccactgcccctggagtagaggacatcagcgggcttccttctggagaagttctagagaccactgcccctggagtagaggacatcagcgggcttccttctggagaagttctagagaccgctgcccctggagtagaggacatcagcgggcttccttctggagaagttctagagaccgctgcccctggagtagaggacatcagcgggcttccttctggagaagttctagagaccgctgcccctggagtagaggacatcagcgggcttccttctggagaagttctagagaccgctgcccctggagtagaggacatcagcgggcttccttctggagaagttctagagaccgctgcccctggagtagaggacatcagcgggcttccttctggagaagttctagagaccgctgcccctggagtagaggacatcagcgggcttccttctggagaagttctagagaccgctgcccctggagtagaggacatcagcgggcttccttctggagaagttctagagactgctgcccctggagtagaggacatcagcgggcttccttctggagaagttctagagactgctgcccctggagtagaggacatcagcgggcttccttctggagaagttctagagactgctgcccctggagtagaggacatcagcgggcttccttctggagaagttctagagactgctgcccctggagtagaggacatcagcgggcttccttctggagaagttctagagactgctgcccctggagtagaggacatcagcgggcttccttctggagaagttctagagactgctgcccctggagtagaggacatcagcgggcttccttctggagaagttctagagactgctgcccctggagtagaggacatcagcgggcttccttctggagaagttctagagactgctgcccctggagtagaggacatcagcgggcttccttctggagaagttctagagactgctgcccctggagtagaggacatcagcgggcttccttctggagaagttctagagactactgcccctggagtagaggagatcagcgggcttccttctggagaagttctagagactactgcccctggagtagatgagatcagtgggcttccttctggagaagttctagagactactgcccctggagtagaggagatcagcgggcttccttctggagaagttctagagacttctacctctgcggtaggggacctcagtggacttccttctggaggagaagttctagagatttctgtctctggagtagaggacatcagtgggcttccttctggagaggttgtagagacttctgcctctggaatagaggatgtcagtgaacttccttcaggagaaggtctagagacctctgcttctggagtagaggacctcagcaggctcccttctggagaagaagttctagagatttctgcctctggatttggggacctcagtggacttccttctggaggagaaggtctagagacctctgcttctgaagtagggactgacctcagtgggcttccttctggaagggagggtctagagacttcagcttctggagctgaggacctcagtgggttgccttctggaaaagaagacttggtggggtcagcttctggagacttggacttgggcaaactgccttctggaactctaggaagtgggcaagctccagaaacaagtggtcttccctctggatttagtggtgagtattctggggtggaccttggaagtggcccaccctctggcctgcctgactttagtggacttccatctggattcccaactgtttccctagtggattctacattggtggaagtggtcacagcctccactgcaagtgaactggaagggaggggaaccattggcatcagtggtgcaggagaaatatctggactgccctccagtgagctggacattagtgggagagctagtggactcccttcaggaactgaactcagtggccaagcatctgggtctcctgatgtcagtggggaaatacctggactctttggtgtcagtggacagccatcagggtttcctgacactagtggggaaacatctggagtgactgagcttagcgggctgtcctctggacaaccaggtattagtggagaagcatctggagttctttatggcactagtcaaccctttggcataactgatctgagtggagaaacatctggggtccctgatctcagtgggcagccttcagggttaccagggttcagtggggcaacatcaggagtccctgacctggtttctggtaccacgagtggcagcggtgaatcttctgggattacatttgtggacaccagtttggttgaagtggcccctactacatttaaagaagaagaaggcttagggtctgtggaactcagtggcctcccttccggagaggcagatctgtcaggcaaatctgggatggtggatgtcagtggacagttttctggaacagtcgattccagtgggtttacatcccagactccggaattcagtggcctaccaagtggcatagctgaggtcagtggagaatcctccagagctgagattgggagcagcctgccctcgggagcatattatggcagtggaactccatctagtttccccactgtctctcttgtagacagaactttggtggaatctgtaacccaggctccaacagcccaagaggcaggagaagggccttctggcattttagaactcagtggtgctcattctggagcaccagacatgtctggggagcattctggatttctggacctaagtgggctgcagtccgggctgatagagcccagcggagagccaccaggtactccatattttagtggggattttgccagcaccaccaatgtaagtggagaatcctctgtagccatgggcaccagtggagaggcctcaggacttccagaagttactttaatcacttctgagttcgtggagggtgttactgaaccaactatttctcaggaactaggccaaaggccccctgtgacacacacaccccagctttttgagtccagtggaaaagtctccacagctggggacattagtggagctaccccagtgctccctgggtctggagtagaagtatcatcagtcccagaatctagcagtgagacgtccgcctatcctgaagctgggttcggggcatctgccgcccctgaggccagcagagaagattctgggtcccctgatctgagtgaaaccacctctgcattccacgaagctaaccttgagagatcctctggcctaggagtgagcggcagcactttgacatttcaagaaggcgaggcgtccgctgccccagaagtgagtggagaatccaccaccaccagtgatgtggggacagaggcaccaggcttgccttcagccactcccacggcttctggagacaggactgaaatcagcggagacctgtctggtcacacctcgcagctgggcgttgtcatcagcaccagcatcccagagtctgagtggacccagcagacccagcgccctgcagagacgcatctagaaattgagtcctcaagcctcctgtactcaggagaagagactcacacagtcgaaacagccacctccccaacagatgcttccatcccagcttctccggaatggaaacgtgaatcagaatcaactgctgcagcccccgccaggtcctgtgcagaggagccctgtggagctgggacctgcaaggagacagagggacacgtcatatgcctgtgcccccctggctacactggcgagcactgtaacatagaccaggaggtatgtgaggagggctggaacaagtaccagggccactgttaccgccacttcccggaccgcgagacctgggtggatgctgagcgccggtgtcgggagcagcagtcacacctgagcagcatcgtcacccccgaggagcaggagtttgtcaacaacaatgcccaagactaccagtggatcggcctgaacgacaggaccatcgaaggggacttccgctggtcagatggacaccccatgcaatttgagaactggcgccccaaccagcctgacaacttttttgccgctggagaggactgtgtggtgatgatctggcacgagaagggcgagtggaatgatgttccctgcaattaccacctccccttcacgtgtaaaaagggcacagtggcctgcggagagccccctgtggtggagcatgccaggaccttcgggcagaagaaggaccggtatgagatcaattccctggtgcggtaccagtgcacagaggggtttgtccagcgccacatgcccaccatccggtgccagcccagcgggcactgggaggagcctcagatcacctgcacagaccccaccacctacaaacgcagactacagaagcggagctcacggcaccctcggaggagccgccccagcacagcccactga

SEQ ID NO: 174991 - DNA, 7251 bp, Artificial Sequence
  derived and/or modified sequence
atgaccaccctgctgtgggtgttcgtgaccctgcgggtgatcaccgcagctgttaccgtcgaaacatcagatcatgacaactccctgtcagtcagcatcccccagcctagcccgctgagagtgttgctgggcaccagtctgaccatcccatgctactttatcgacccaatgcacccagtgacaacggccccatccacagccccgcttgctcctcgtattaagtggtccagggtgtctaaggaaaaggaagtggtgttactggtggccacagaagggcgagtcagggtgaatagcgcataccaggataaagtgtcccttccgaattacccagcaattccgtccgacgccaccttggaggtgcaatcattgcgcagtaacgattctggcgtgtaccgttgtgaggtcatgcacggaatcgaagatagcgaggccactctggaagttgtagtgaaaggtatcgtgttccattatcgcgcaattagcactagatacactcttgatttcgatcgggcccagcgagcctgcctccagaattctgcaatcatcgcgaccccagagcagctgcaggccgcttacgaggacggttttcatcagtgcgatgcaggttggctggctgaccagaccgtgaggtatccaattcatacaccccgcgaaggatgttacggcgataaagatgagttccctggcgtgcgaacctatggtatcagggacaccaacgagacttatgatgtatattgtttcgctgaggagatggagggcgaagtattctatgctactagccctgagaaattcaccttccaggaagcagctaacgagtgccgacgtttgggcgcaaggctcgctacaacaggccagctttacctggcttggcaggccggtatggacatgtgtagtgccgggtggctagccgaccggagtgttagataccctattagcaaagcacgcccaaattgcggaggcaacctgttgggagtgaggactgtgtatgttcacgccaaccagaccgggtatccagacccatcaagccgatacgatgccatttgctacaccggtgaggatttcgtggatatcccagagaatttctttggagtgggcggggaggaagacattactgtccagacggtgacctggccagatatggaattaccccttccacgcaacattactgaaggggaagccagagggagcgtgattctgaccgtgaaacccatatttgaagtttctccaagcccattggaacctgaggaaccgtttacgtttgctcccgagattggcgccacggcttttgcggaggtagagaacgaaaccggcgaggccacccggccttggggattccccaccccgggcctgggcccggccacagctttcactagcgaggatctggtggttcaggtcactgcagttcctgggcagccccatcttcccggtggcgtcgtgttccactaccgaccaggcccgactaggtacagcctgacattcgaggaagctcaacaggcgtgccttcggaccggggctgtgatcgcaagtcctgaacagttgcaggccgcttacgaagccggatacgagcagtgcgatgctgggtggctgcgcgaccaaacagtgcgttatcccatcgtatccccacgaaccccgtgcgtgggtgacaaggactcatctcccggagtgcgcacatacggagtacgcccgtccactgagacctacgatgtctactgttttgtagaccggctggaaggcgaagtgttctttgcgaccagactggagcaattcaccttccaggaggcactcgaattctgcgagagccacaacgctacgctggctaccacaggccaactctacgccgcttggagcagaggcctggacaagtgctatgccggctggctcgccgatggcagtctgaggtatcccatcgtgacgccccggccagcctgtgggggagacaagcccggtgttcggaccgtgtacctgtatcccaatcagacgggcctgcccgatcctttaagccgtcaccacgccttctgtttccggggcataagcgctgtccctagccccggagaggaggagggtggcactcctacttccccttctggagtagaggaatggatcgttacccaggttgtgccgggcgtggccgcggtccccgtagaagaagagacaactgcagtgccctccggcgagacaactgccatactggagtttacaaccgaacccgagaaccagactgagtgggaacctgcctacacacccgtgggcacatccccgctgccagggatcctcccaacatggcctccaacaggagccgctaccgaggaatcgactgagggcccctccgcaaccgaggttcctagcgcaagcgaggaaccttctccgagcgaggttccctttccctctgaggaacctagcccctcagaagagcccttcccatcagtgagaccttttccatccgtagaattgtttccaagcgaggaaccatttcccagtaaggaacccagcccgtcggaggagccaagtgctagtgaggagccttatactccgagtccgcctgtcccctcttggacagaactgcctagtagcggagaggagtccggggcgccggatgtgagtggtgacttcacgggaagtggcgacgtttctgggcaccttgactttagcggccagctgtcaggcgatcgcgcctctggtttgccgagcggggatctcgactctagcgggttgacctctaccgtcggctctggcttacccgttgaaagtgggttgccgtccggtgacgaagaaaggatcgagtggccctctactccgacagtcggcgagctgcccagcggcgcagagattctagaaggctccgcaagtggcgtcggggatcttagcggcttgccatcaggcgaagtcttggagacctcagcctccggagtaggcgatctgtctggtctgccgagtggagaagttcttgagacgacagctcccggcgtcgaggacattagcggtcttccgtctggcgaagtgttagaaaccactgctccaggagtggaagacatatcgggactgccttctggggaggttctggagaccaccgctcccggcgtggaggacattagcggccttccttccggagaagtgttggaaacaaccgccccaggcgtggaggacatttccggcctgccttcaggtgaagttctcgaaacgacagcaccaggcgtggaggacatctctggtcttccgagcggtgaggttctcgaaaccgccgctccgggtgtagaagacatcagcggattgccaagtggggaagtgttggaaaccgcagcacccggcgtggaggacatcagcggcctgcccagcggggaggtgcttgaaacagccgccccgggggtggaggacatcagcggcctgccttccggggaggtgttagagaccgccgcgcctggcgtggaggatattagcggactccctagtggggaggtgctagaaaccgccgcccctggagttgaagatatatctggtttacctagcggggaggtcctggagactgccgcccccggcgtcgaggacatttcaggactgccctccggggaggtcttagagactgccgctcccggggttgaagatatcagtggattgccaagcggcgaagtactggaaactgcagctcctggcgtggaggatatctcaggactgcccagtggggaggtgctcgagaccgccgcacctggcgtcgaagatatctcgggactgccttcaggcgaagtgctcgagactgctgcacctggtgtggaagatatctctggccttccttccggtgaggtgcttgagactgccgcccccggcgtcgaagacattagcgggctgccctccggggaggtgctggagactacagcaccgggggtggaggagatctcaggcttgcccagcggcgaggtgcttgaaactactgcacctggtgtggatgaaatttctgggttacctagtggcgaggtcttggagactactgcaccaggtgtcgaagaaatcagtggcctgccttcgggggaagtactggaaacttctacttctgctgtcggcgacctcagtggattaccttccggcggtgaggtcctggaaattagcgtctcaggcgttgaggacatcagcggccttccaagtggggaagtagttgagacatctgcttccggcattgaagacgtgtccgaacttcccagtggcgaagggctggagacctccgctagtggtgtcgaggatctcagtcggttaccctcaggcgaggaggtgttggaaatttcagctagtggctttggcgatcttagtgggttgccgtcaggcggagaaggtctcgagacctcagcctccgaggtcggaacggacttgagcggactgccatctggacgggaaggcttagagaccagcgcgagtggggcagaggacctgtccggccttccaagcggcaaggaggatttggtcggtagtgctagtggtgacctggatctggggaaacttcccagcggaacattaggatcaggccaagctcccgagacgtccggactcccaagcgggttcagtggcgaatattcaggagttgacttgggctccggacctccttccggactgccagatttctcgggccttccatcagggttcccgactgtgtctctcgtggattcaacactggttgaggtggtcacagcaagcaccgcttctgaactcgagggaaggggtacgatcggtatctccggagcaggggagatatcaggactgccttccagtgaactggatatctcaggaagagcctccgggctgcccagcggcactgagctgtctggacaggctagcggcagtccagatgtatctggagaaataccaggcttgttcggggtgtcggggcagccatcaggattcccagatacttccggcgagacctccggcgtgactgaactgagcggtctgagtagcgggcagcccgggattagcggcgaagccagtggagtgctgtacgggacttcccagccgttcggtatcaccgacctgtctggagagacctctggtgtacctgatttgagcggtcagccgtctggtctgcccggcttttccggtgctacgtccggggtgcccgacctggtgagcggcaccaccagcgggtctggtgagagctccggcatcacctttgtcgataccagcttggttgaggtcgctccaacaactttcaaagaggaagaggggctgggaagtgtcgagctgtccggtctgccaagtggtgaagctgatctgtcgggaaagtcaggcatggtggacgtgtccggccagttctcggggacagtcgattcctcagggttcacatcgcagacccctgagttctccggcctgccaagcggcattgctgaggtgagcggcgaatcttcccgagccgagatcgggtcttctttaccctcaggagcttattacgggtctggaacaccaagctcgtttccgactgtgtccttggtggaccgcacccttgtcgagtccgtgactcaggccccaaccgcccaggaggcaggcgaagggccctctggaatccttgagctcagcggggcgcacagcggagcccctgacatgtccggtgagcatagcggattcctggacttgagcggcctgcagagcgggcttatcgagccttctggagaaccaccaggaaccccttacttctctggagattttgcctctactactaacgtgagcggcgaatccagcgtcgctatgggaacatccggggaggcatccggcctccccgaggtgaccttgattacctccgaattcgtcgagggcgtgaccgagccaaccatttctcaggaactagggcaacggccgcctgtgacccacactccgcaacttttcgaaagtagtggcaaggtgtcaacagccggcgatatatctggcgcaactcctgtgctccctggtagtggcgtcgaggtctcgtccgtgccagagtcttcttcagagacttccgcttacccggaggctggcttcggagccagtgccgccccagaagcttctcgcgaagactctgggtctcccgatctctctgaaaccactagtgctttccacgaggccaacttggagcgcagcagcggcctcggggtgtccgggtcaactctgactttccaagagggggaggcctccgccgcaccagaggtgtctggcgagagcaccacaacctctgatgtcggtaccgaggcccctggattacccagcgcaacccccactgcgtcaggggacagaacagaaatttccggggatctgagcggccacacttcccagcttggagtggtgatatctacctcaattccggagagtgagtggacccagcagacccagagacctgccgagacccacctggaaatcgagagcagttccctcctctactctggcgaggaaacacacacagtggaaaccgccacgagccctacggatgccagcatccctgcctctcctgagtggaagcgtgagagcgagtctaccgctgccgcccccgcccggtcatgcgccgaggagccctgtggcgctggcacatgtaaggagaccgaagggcacgtgatctgcttatgcccccctggatacacaggagaacattgcaacatcgaccaggaggtgtgtgaggaggggtggaataaataccagggccattgctatagacacttccctgatcgcgagacgtgggtggacgctgaaagacgatgtagagagcagcagtctcatctctcaagcatcgtgactcccgaggagcaggagttcgttaacaataacgctcaagattatcagtggatcggcttgaacgataggacgatcgagggagacttccgttggagtgacggccaccccatgcagtttgaaaattggcgaccaaatcagcccgataactttttcgccgccggagaggattgcgtggtcatgatctggcatgagaagggggaatggaatgatgtgccttgtaattaccacctgccattcacttgcaaaaaagggaccgtggcctgcggtgagcctcccgtggtggaacatgcccgaacattcggacagaagaaggaccggtacgaaattaattccctggtgagataccagtgtaccgagggtttcgtgcagcgccacatgcctaccattagatgtcagcccagtgggcattgggaagaacctcagatcacttgtaccgatccaaccacatacaagagacgcctccaaaagagatcctcacgccacccgagacgtagccgcccatcgacagcccattag

SEQ ID NO: 174992 - DNA, 7593 bp, Artificial Sequence
  derived and/or modified sequence
atgaccaccctgctgtgggtgttcgtgaccctgcgggtgatcaccgccgcagtcaccgtggaaacctctgaccacgataatagcctgtctgtcagcatcccacaaccttcacctctgcgagtgctgctgggtacctctctgaccatcccttgctacttcatcgatcctatgcatccggtcactacagccccttcgaccgcacccctggcgccacgaatcaagtggtcacgcgtaagtaaggagaaggaggtagtactattggttgccactgagggccgggtaagggtgaacagtgcctatcaggataaagtaagcctgcctaattatcccgccattccatccgatgccacccttgaagtgcaatccttacgctccaacgactctggggtctataggtgcgaggtaatgcacgggatcgaggatagcgaggctacactggaggtggtggtaaaaggtattgtgtttcactatcgggcaattagtacaaggtacacattggatttcgacagggcccagcgagcatgcctgcagaacagcgcgatcatcgcaactccggaacagctgcaggctgcatatgaggacgggtttcatcagtgcgatgcaggatggctagccgaccagaccgttaggtaccctatccatacccccagagaaggctgctatggggacaaggatgagttccctggggtgcggacttatgggatccgtgatacgaatgagacctacgacgtgtactgctttgcggaagagatggagggggaagtcttctatgcaacctcgccagagaagttcacattccaggaagccgctaatgagtgcagacggctgggagctcggctagccaccaccggtcagctgtatctggcttggcaagctgggatggacatgtgtagtgcagggtggctggccgatcgcagcgtgagataccccatcagcaaagccaggcccaactgcggcggtaatttgctgggtgttcgcactgtatacgtgcatgcgaaccagactgggtatcccgaccctagctcccggtacgacgcaatctgctataccggggaggactttgtggatatcccagaaaatttcttcggggtgggtggcgaggaggatatcacggtgcagacggtgacctggcccgacatggaactacccctgcctcggaatatcaccgagggcgaggctcgcgggagtgtgattctaacagtgaagcctattttcgaggtatccccctcccccctggaaccagaggaaccattcacgtttgctcccgaaataggggcaaccgccttcgcggaagtggaaaacgagacaggggaagcaactagaccatggggtttccctaccccaggactaggacccgctactgcgttcacctctgaggacctcgtcgtgcaggtcactgcagtgccggggcagccacatcttcccggcggcgtagtatttcactataggccgggacctactcggtactcacttacattcgaggaggctcagcaggcttgcctgcgtaccggcgccgttatcgcctctcccgaacagctacaggccgcatacgaggcaggctatgagcaatgtgacgccggctggctgcgagatcagacagtgaggtaccccatagtatctcccagaaccccatgtgttggggataaagattcaagtcccggggtaaggacctacggagttcggcccagcaccgaaacgtatgacgtatattgcttcgtcgataggctcgagggagaagtatttttcgctacaaggctggaacagtttacatttcaggaagccctggagttctgtgagtcgcacaatgcaactcttgcgaccaccgggcagttgtatgcggcctggtcaaggggtctggataagtgctatgcagggtggttagctgacggaagccttcgctaccctatcgtgacccctcgtcctgcttgcgggggcgacaaaccgggggtgcgtaccgtgtacctgtatccaaaccagactggattaccagacccccttagcagacaccatgccttctgttttagagggatctcggccgttcccagccctggcgaagaggagggcgggacaccaacatccccttctggcgttgaagaatggatcgttacacaggtcgtgcccggcgttgccgcagtgccagtcgaggaagaaaccaccgctgtcccctcaggagagacaacagccattctcgaattcaccacagagcccgaaaatcagacggaatgggaaccagcctacacaccagtgggaacaagccctttgcccggaatcctgccaacatggccccccactggagcagcgactgaggagagtacagaaggcccttccgccactgaagtaccaagtgcctctgaagaaccctccccctcagaagtgccttttcccagtgaggagcccagtccctcagaggaaccatttcctagtgtccggcccttccccagcgtcgaactgttccccagcgaagaaccttttccatcaaaggagcccagccccagtgaggagccaagcgcttcagaagagccatacaccccatcaccgcctgtgcctagctggacagaactgccatcgagcggtgaggaatctggggccccggacgtctctggggattttaccggcagcggagacgtgagcgggcacttagacttttcaggtcagctctccggcgacagagcatcaggcctgcccagcggcgatcttgattctagcggccttaccagcacagtgggctccggattacctgtcgagtctgggctgccctctggggacgaggaacgcattgaatggccctctacccctaccgttggggaactcccatctggagctgagattttggagggctccgcctcaggggtcggtgatctgtcgggcctccctagcggtgaagtgctcgagacatctgcgtctggcgttggtgacctctcgggccttccttccggcgaagtcctggagaccacagcccccggggtcgaagacattagtggcctgccgtcaggcgaagtgctcgagacaacggcacctggggtggaagatatctccggcttgccctccggagaagtgctcgaaaccaccgcccccggtgtggaagatatttccggcttgccaagtggagaggtgctcgagaccacagcccccggagtggaagatattagcggcctgccttctggtgaggtgctggagacgaccgccccaggagttgaggacatcagtggtttgccatcaggcgaagtcctggagaccacagccccaggggtggaggatatttcaggactgccctctggcgaggtcctcgaaacagccgctcctggcgtcgaggatataagcggcctgccgtccggagaggtgcttgaaactgcagctcctggcgtggaagatatcagtggactcccgtcgggcgaggtactggagacggctgctcccggcgtggaagacatctcagggttaccatccggggaggtcttggagacagccgcccccggggtggaagatatttccggactaccatccggggaagtgctcgagacagcggctcctggtgtggaagacatcagcggacttccttccggggaagtactggagacagctgccccaggagttgaggatattagcgggctccccagcggggaggtattggagacggctgcccccggagttgaagacatctccggcttacccagcggagaggttctggagactgctgcccccggagtggaggacatcagcggtctgccatccggcgaagtgttggagaccgctgccccaggagtggaggacatcagtggactcccctctggggaggtactggagactgcagcccccggcgtcgaggatatttccggtctgccctccggcgaggtcttggagaccgcagctcccggagtcgaagatatctccggactcccgagtggagaagtcctggagacagcagccccaggagtggaggatatatctgggcttccatccggcgaagttctagagacagccgcccccggcgtggaagacatttcaggtctcccatcgggggaggtgctcgagactgctgcccctggggtcgaggacatatcaggactgccatctggcgaggtcctggagacagccgctcctggagttgaggatatctctggtctgccctccggcgaggtgctggagactgctgcacccggcgtagaggatatttccggccttcccagcggggaagttctagaaacaaccgcgcccggagtagaggagattagcggcttgccttcaggagaagtcctagagaccacggcccctggcgtggatgagatttctggacttccctctggcgaagtgctggagaccaccgcccctggcgtggaagagatctctgggttgccatccggcgaggtactggagacttctactagcgctgtaggagatctttccggactgcccagtggcggagaggtcctggagattagcgtgtctggtgttgaagacatctctggcctgccaagtggcgaggtcgtggaaacatccgcatctggaatagaagacgtttcagaactgccctctggggagggtctggagacctccgcatctggagttgaagatttgtctagacttccatctggtgaagaggtgttggagatctccgcgtcggggtttggcgacctcagtggcctgcctagcggtggcgaaggcctcgagaccagcgcctcagaagtggggacagacctgagtggattgcctagtggacgggaaggtcttgaaacgagcgcttccggcgctgaggacctgtctggtctcccttcggggaaagaggatctggtgggcagcgcctccggggaccttgacttgggcaaattaccatccggcacacttgggtccggccaagcccctgaaacctcaggacttccatctgggttctccggtgagtacagcggagtcgacctcggcagtggacccccgagcggactccctgatttctcagggttgccttcaggattccctactgtgagcctggttgattctacattggttgaggttgtgacagcctccacggcatcagagctggaaggccgaggcacgattgggatatcaggggccggcgagatatctggcctccccagttctgaactagatatcagcggtcgcgcttcgggactccctagtggcactgaactatccggacaggcctctgggtcaccagacgtgagcggggaaattcctggtctgttcggggtctctggacagccttcaggcttccctgatactagcggagagacctccggagtgacagagctgtccggcttatcctccggccagccagggatcagcggagaagcgtccggtgtactgtatggtacatcacagcccttcgggattaccgacttgagcggggagacatcaggagtgcccgatctttctggtcaaccttctggactgcctgggttctccggcgccaccagtggcgttcctgatttggtgagcgggaccactagtgggtctggagaatcctcaggcatcacatttgtagacacctccctagtggaagtcgcccccactacattcaaagaagaagagggactcgggagtgtcgaactttccggacttccatccggcgaagcagatctcagcgggaaatctggcatggtcgacgtgtcgggccagtttagcggcacggtcgactccagtgggtttacgtcacagacccctgagtttagcgggctcccctctggcatcgccgaggtgagcggcgagagctcacgcgccgagatcggttcctccctgccctcaggggcttactacgggagcgggactccatcttcttttccaaccgtgagtctcgtggaccgcacattagtcgaatctgtcacacaggctcccactgcacaagaggcgggtgaaggcccatccgggatcctcgagttaagcggcgcacactcgggagccccggacatgtccggggaacatagcgggttcttggatttgtcgggcctgcagagcggcctcattgagccgagcggagagccacccgggaccccttacttcagcggcgacttcgcatcaaccacaaacgtgtcaggggagtcgagcgtggccatgggcaccagtggcgaagcttctggcttgccggaggtaactctcataacgagcgagttcgtggagggggtgactgaacccaccatctctcaggaactgggccagagacctcctgtgacgcatactccccagctcttcgaaagcagcggcaaggtctcaacggcaggagacatttcaggggcaaccccagtcttaccaggaagtggcgtggaggtgtcttcagttccggaaagttctagtgaaaccagcgcctatcctgaagcaggatttggcgctagtgctgcacccgaggcctctagagaggactccggtagccctgatttgtctgagaccacaagtgcttttcacgaggccaatcttgaacggtcttctggtctgggtgttagcggctcaacattgaccttccaagaaggcgaggcatctgccgcccctgaggtgtctggagaaagtaccacaacaagcgatgtggggactgaggcccccggcctgccctctgcgacgccaactgcctccggcgaccggacagaaatctcaggcgacttaagcggtcacacatcgcaactcggggtcgtcattagcacaagtatccctgaatccgagtggactcaacagacacaaaggcccgcggagacccaccttgaaattgagagttccagtctgctgtatagtggagaagagacacacactgtcgaaaccgcgacctcacctactgacgcttccattcccgcgagcccggaatggaagagggaaagcgaaagcacagccgcggcgcctgctcggtcttgcgcggaggagccatgcggtgccggcacgtgtaaagaaaccgaggggcacgttatctgcttgtgtccccccggatacactggcgagcactgtaacatcgatcaggaggtatgtgaggaaggatggaataagtatcaaggccactgctatagacacttcccggacagggaaacctgggtggatgctgaacggaggtgtagagagcagcagtctcatctttcatcaatagtaacaccagaggagcaggaatttgtgaacaataacgctcaagattaccagtggattggtctgaacgatcgaacaatcgagggtgatttccgttggagcgacggacacccaatgcagtttgaaaactggcgccccaaccagcccgataatttctttgccgcaggggaagattgcgtggtgatgatatggcacgagaagggagagtggaatgacgtcccatgcaactatcatctgccttttacctgtaaaaagggcaccgttgcttgcggggagcctccagtggtggaacacgccaggaccttcggacagaaaaaggatagatacgagattaactctctcgtgcgctaccagtgcaccgaggggtttgtccagagacatatgccgaccataagatgtcaaccctcaggtcattgggaggaaccgcaaattacctgcacagaccccacaacctacaaaagaagactccaaaagcgtagttcaaggcatccgcgaagaagtagaccatctaccgctcactag

SEQ ID NO: 174993 - DNA, 7593 bp, Artificial Sequence
  derived and/or modified sequence
atgaccaccctgctgtgggtgttcgtgaccctgcgggtgatcaccgctgccgtgaccgtggaaactagtgaccacgataacagtctctcagtgagcatccctcagccatctccactgcgcgttcttcttggtacctcactgaccatcccgtgctactttatcgatccaatgcacccggtcacaacagccccatcaaccgccccgttggccccccgcataaagtggagccgagttagcaaagagaaagaagtagtattgctggtggcaaccgaagggcgggtgagggtcaatagtgcctaccaggataaggtgtctttacctaattaccccgcaattccatccgatgccacattagaagtgcagtctctgcgcagcaacgacagcggcgtctataggtgcgaagtaatgcacggtatcgaagattccgaagcaacgctggaagtcgtggttaagggcatcgtatttcactaccgggctatctcaactcggtacacactggattttgaccgagcccaaagggcatgtctgcagaacagcgcaatcattgccacgccagaacaactgcaagccgcctacgaggacgggtttcaccaatgtgacgcagggtggctggccgatcagacggtcagatacccaatacacaccccgcgggaaggctgttacggagataaggacgagtttcccggagtgcgcacatacgggattagagacactaacgagacatacgacgtttactgtttcgcggaggagatggaaggcgaagtgttttatgccacatctccagagaagttcacctttcaagaggccgctaatgagtgtaggcgactcggcgcgaggctggcgactaccggccagctttacctggcatggcaggctggtatggatatgtgtagtgcgggttggctggcagacagatctgtgcgctatcctatttccaaagcacgaccaaattgcggaggaaatctgttgggcgtaaggactgtctatgtgcacgccaatcaaacaggctatccagatccctcttcgagatatgacgcaatttgttacacaggagaggacttcgtggatatcccagagaacttctttggggtgggaggagaggaggacatcaccgtccagacggtcacgtggccagatatggagcttcccctgccgagaaatattaccgaaggagaagctaggggttccgttattctcacagtgaagcccatttttgaggtcagtccaagccctctggagccagaggagccttttaccttcgcccccgagattggggcaacggcatttgccgaagttgagaatgagaccggagaagctaccagaccctggggatttcccacgcccggcttggggccggctactgcattcacttcggaggatctcgtggttcaggtaaccgcggtgcctggccaaccgcacctgcccggcggtgtggtctttcattaccgcccgggtcctacgcgttactcccttacatttgaggaggcacaacaggcttgcctcaggaccggggccgtgattgcgagcccagagcaactccaggcagcctatgaggctggctatgaacagtgtgacgctggatggctgagggaccagaccgtacgctacccaatcgtgtcgcccagaactccttgtgtcggcgataaagactcctccccaggggtccgcacttatggggtgcgccccagtactgaaacttatgatgtgtattgcttcgtggacaggctcgagggagaagtgttcttcgcgaccaggttggaacagttcacatttcaggaagccctcgagttctgcgagtctcataatgctactctggcgacaaccgggcagctctacgcagcctggtctcgaggcctcgataaatgctacgcaggctggctggcggacggctctttgcggtatccaatagtcacgcccagacctgcatgtggaggagacaagcccggcgttagaaccgtttatctgtaccccaaccaaacagggctaccagatccgcttagccggcatcacgccttctgttttcgggggatatcagccgttccctctccaggggaggaagaggggggcacacccacatcacctagtggagttgaagaatggatagtaacccaggtggtgcccggggtagcggccgtgcctgtggaggaagagactaccgccgtgccaagcggagagactacggccatcttagaattcacaaccgaaccggaaaaccagaccgaatgggagcccgcatacactccagtaggtacaagccctctgccagggatccttccaacttggccacccactggggccgctaccgaagagagtacagaagggccatctgccaccgaggtgccctccgcgtctgaagaaccatcaccttctgaggttccatttccctccgaggagccttcacccagcgaggagccttttccctccgtgagaccttttcccagcgtggaactctttcccagcgaagaaccatttccgagcaaggagccttccccatcggaagagccatccgcctcggaagaaccttacaccccttcgccacctgtcccttcctggaccgagctgccttcgtcaggcgaggagagtggggctccggacgtgagtggggactttactggcagcggggacgttagcggccacttggacttttctggccagctgagcggcgatagagctagcgggctgccctccggggacttggatagcagtggcctgacatccaccgtaggctctggcctacccgttgagtcaggactgcccagcggggacgaggagcggatcgagtggccctctacaccgaccgttggcgaactcccctccggggcagaaatcctggagggaagtgcgagtggcgttggagacttgtctggtctgcctagtggtgaggtcctcgagacttccgcttccggggtgggagatctgtctggattgccaagcggcgaggtcctcgagacaactgccccaggggtggaagacatatcaggactgccctcgggggaggtcctggaaacaaccgcccccggcgtagaagacataagcggactgccttcaggagaagtgttagagacgaccgcccccggagtcgaggacataagcggattacctagtggcgaggttctggagacgacagctcccggcgtcgaagatatatctgggcttccgtcaggtgaagtgcttgaaacaactgcacccggcgtggaggacatctctgggcttccttcaggggaggttctggagactacagctcctggtgtggaagacatatctggactccctagcggggaagtgttggagactgctgctccgggggttgaggatataagtgggctgccttctggggaggtgctagagacagccgccccaggcgtcgaggacattagcggcctgccctcaggtgaggtgctggagacagcagcaccaggagtagaggatatctccggcctccctagcggggaggttcttgaaaccgcagcacccggggtcgaagatatctccgggctgccttccggcgaggtgctggagactgcagctccgggtgttgaggatatatccgggctgccttcgggcgaagtgcttgaaactgctgctcccggcgtcgaggacatatccgggctgccctctggcgaggtcttggagactgctgcaccaggggtcgaggacattagtggcctgccgtctggcgaagtcttggaaacagcggcgccgggagttgaagatattagcggattgccatcaggcgaggtcttagagacagccgcccccggagtcgaggatatctctggactgccatctggagaggttctcgagacagcagcacccggcgttgaagatatatctgggctaccgtcgggcgaagttctggagaccgcggcccctggggttgaagatatatcaggcttacccagtggtgaagtccttgagaccgccgctccaggggtagaggacattagtggactgccaagcggcgaggtgcttgaaaccgccgcacccggtgtggaagacatttctgggttacctagtggggaggtgctggagactgccgcccctggcgttgaagatatttccgggctgccctcaggagaggtgctggaaaccgcggcaccgggcgtagaagatatttctggtctgccctccggagaggtactggagacagcagcccctggagtggaagatatcagcggactgcctagcggcgaggttctcgaaaccacagcacccggggttgaagaaatttcgggtctgcctagtggcgaggtgctcgagactaccgctccaggggtagacgagatctcagggctgcctagcggagaagtccttgaaacaactgcacccggcgtcgaagagattagcggtctaccgtctggcgaagtgctggagacatccacatctgccgttggtgatctgagcggcctgcccagcggcggcgaggttctcgagattagtgtgagcggcgtggaagacatttccggcctaccttccggcgaagtggttgaaactagtgcaagcggtatcgaagatgttagcgaactgccttctggggaagggctggagacttccgcctctggcgttgaggacttaagtaggctgccgtctggagaagaagttctggaaatatctgctagcggattcggggacctgtccggccttccaagtggaggcgagggtctcgaaacatccgcctccgaggtgggtacagatctcagcggactgccatccggccgtgagggcttggaaacatccgcatctggggccgaagacctctcaggtttgccaagtggcaaggaagacctcgtcgggtccgcctcaggtgaccttgacctgggtaagctgccatccgggacgctgggcagcggtcaggctcccgagacttcaggcttgccatccgggtttagcggcgagtatagcggcgtggacctgggatctggccccccgagcggccttcccgatttttctggactgcctagcggatttcctaccgtaagtctcgtcgactctacacttgttgaggtggtcacagcctcaacggccagcgagctcgaaggccgcggcaccatcgggatatcaggcgcaggggaaatatcaggcttacccagttccgagctggatatatccggaagggcctcgggactgcccagcggcacagagcttagcggccaggcctcaggctcccctgatgtgagcggcgaaatccctggactgttcggggtctctggtcaaccttccgggtttcctgacacatctggagagaccagcggcgtaactgaactctccggactgtcaagtggacagccaggaatttctggcgaggcctcaggcgtgttgtacgggacttctcagcccttcggaatcactgatctgagcggcgaaacaagcggcgtgcccgacctaagtggccaaccgagtggcctaccagggttctccggggctacttctggcgtgcccgatctggtgagcggtactacctctggtagtggcgaaagctctgggattactttcgtggataccagccttgtagaggtggctcctaccacattcaaggaggaagaagggcttggatctgtggagctcagcggactcccatcaggcgaggccgacctgtccggcaaatcaggcatggtggacgtttcaggtcaattcagtgggacagtcgattcttcagggtttacaagtcagacgcctgagttttcgggtttacctagtggcatcgccgaggtgtctggcgagagctctcgagccgagattggttcaagcctgcccagtggagcgtattacggaagcggcaccccttcatcatttccaaccgtgagcctcgtggaccgcaccttggtagagtctgtcacacaggcgcccactgcacaggaggccggggagggcccaagcggaatcctcgaactcagcggggcgcattcgggggcgccggatatgagcggggagcactctgggtttctcgatctgtcaggactgcaatccggcttgattgagccttccggggagcctcccggcaccccttacttctcaggagacttcgcttctactacaaatgtgagtggggagagctcggtcgcaatgggtacatcgggcgaggcgtctggcctgccagaggttactctgatcacaagtgagtttgtagaaggcgtgaccgagcctactatatcccaggaactaggccagagaccccctgtgacacatacacctcagctgttcgagtcctccggaaaggtttccacggctggcgacatctctggcgcaacccctgtgcttccggggagtggtgtggaagtatcaagcgtcccggaaagcagctctgagaccagcgcgtatcccgaagccggctttggggcctctgccgcccctgaagctagtcgtgaggattctggcagccctgatctgtctgagacaacttctgcctttcatgaggctaatcttgagaggagtagcgggctgggtgtgagcgggagcacactgactttccaggagggagaggcctcagctgctccagaagtaagcggcgaatccacgactacctcggatgttggaactgaggcccccgggctgccttcagccacgcctactgcaagtggggaccgaactgaaattagcggggatctgagcggacatacttctcagctcggtgtggtgatttcaacctcaatacccgagagtgaatggacccagcagacgcagaggccagccgagactcatctggagatcgaaagctcctcattgctgtactctggggaggagacacataccgtggagacagccacatctccaactgatgcctccatccctgcgagtcctgaatggaagcgggagtccgagtcaacagcagccgctcctgcaaggtcatgcgccgaagagccttgtggggctggcacatgcaaagagactgagggccatgtcatctgcctgtgcccacccggttataccggcgaacattgtaacatcgaccaggaggtatgcgaagagggttggaacaagtatcagggacactgctatcggcattttccggacagagagacatgggtcgacgccgagcggcgctgtagggaacaacagagtcatctttcttcgattgtgactccagaggagcaggagttcgtaaacaataatgcacaggattatcagtggatcggactgaacgaccggacaattgaaggggatttcaggtggagcgatggccatcccatgcagtttgaaaactggagacctaaccagcccgataacttctttgccgcaggcgaagattgcgtggtgatgatttggcacgagaaaggagaatggaacgatgtcccctgcaactatcatctgcccttcacatgtaagaaaggtacggtcgcatgcggtgagccccctgttgtcgaacatgctaggactttcggtcagaagaaggatcggtacgaaatcaactctctggtgcgctatcagtgtaccgaggggtttgtgcagagacacatgccaaccattcggtgccaaccctcggggcactgggaggaaccccagatcacctgtactgatccaacaacctacaagaggcggctgcagaagcgctcaagcagacaccccaggaggtctaggccatctactgctcactag

SEQ ID NO: 174994 - DNA, 7250 bp, Artificial Sequence
  derived and/or modified sequence
atgaccacactgctttgggtctttgtcacccttagagtgattacagcagcagtcacagttgaaacatccgatcatgataatagtctctctgtgtctattcctcagccctcccccctgcgcgtcctgctgggtacatctctgacaattccctgctacttcatcgatccgatgcaccccgtcacaacagctccatccacagctcccctggcgccacggatcaagtggagtcgggtgagcaaggagaaagaagttgtgctgttggtcgctactgagggcagggtcagggtgaactcagcttatcaggacaaggtgtcccttcccaactaccctgcaatcccctctgacgccaccctagaagttcagtctctgcggagcaatgatagtggggtatatcgatgcgaggtcatgcatggtattgaggactcagaagccacccttgaagtggtggttaaagggatcgtctttcactaccgggctataagcactcggtataccttggacttcgacagggcccagcgcgcttgtctgcagaattccgccatcatcgcaaccccagagcaattacaggcagcatacgaagacggcttccatcaatgcgatgccggttggttggctgatcagaccgtgcgctacccgattcatactcctagagaggggtgctacggagataaggatgagttccccggagtcagaacttatgggattcgagataccaatgagacctacgatgtgtactgcttcgctgaggaaatggaaggggaggtcttttacgctacatccccagaaaaatttacattccaggaggcagccaatgaatgccgtcgactgggggcacgtctggcaactaccggacagctttacctggcgtggcaggccggaatggacatgtgctccgccggatggttagcagaccgtagtgttaggtacccgatttctaaagcacgccctaactgtggcggtaacctgctcggcgtgcgcacggtctacgtacatgcgaaccagaccggctatccagatccctcatccaggtatgatgccatttgttacaccggtgaggatttcgtcgatatcccagagaatttctttggggttgggggagaagaagatatcaccgttcagacagtgacgtggcctgatatggaactgcccctgccacgcaacatcaccgaaggtgaagctcgcggttccgtcatcctgacggttaagcccatttttgaggtgtctccttcaccactggaacccgaagagccatttacctttgccccagaaatcggagccacagccttcgccgaggtcgagaatgagactggagaggccacccgcccatgggggttcccaacacccggtctcggacccgcaactgcatttacctcagaggaccttgtggtacaggtgactgcagtgccgggacagccccatctacctggcggagtggttttccactacagacctggaccgaccagatacagcctgacgtttgaggaggctcaacaagcctgcctccgcaccggagcagtgatagcgtctcctgaacagttgcaggccgcatatgaggctggatatgagcaatgcgacgcaggctggctcagggaccagaccgtgcgctatcctatcgtttccccccgaacaccgtgcgtcggagacaaggatagttcacctggcgtgaggacgtacggcgttaggccttctaccgaaacctacgatgtatactgctttgttgataggttggagggagaggtattttttgctacccgtttggagcaatttacatttcaagaggcactagagttctgtgagtctcacaacgctacattagcaacgactgggcagctctatgctgcctggtcaagagggttggacaagtgttatgctgggtggctggcagatggctccctgcggtatccgattgtgacacccagacccgcttgtggaggtgataaaccaggcgtcaggaccgtttatttatatcctaaccaaaccggtctgcccgatccactgagtcgacaccacgccttttgtttccgcggtatctccgctgtcccatcccccggagaagaggaggggggtacccccacttctccatccggcgtggaagagtggatcgttacccaggtcgtaccaggggtcgccgctgtgcccgtggaagaggagacgactgcagtgccgagcggtgagactaccgcaatccttgagttcaccacggaaccagagaaccaaacagagtgggagcccgcatatacccctgtgggtacatctcctctccctggcatactgccaacttggccacccactggtgctgccactgaggaaagcacagaggggccttctgccaccgaagtgccttcagccagtgaagagcctagcccaagcgaagtcccatttccgagtgaagaaccttccccctccgaggaaccttttccatctgtccgtccctttccgtccgtggagctgtttcccagcgaagaaccctttccttcaaaagaaccttcaccctctgaagaaccatcagcgtcagaggagccttacacaccttctcctccagtaccatcttggacagagctgccctcgtcaggagaagagagtggagctcctgacgttagcggtgactttacaggatccggggatgtctccgggcatctggacttttctgggcagctgtcaggagacagggcttccgggttgcccagtggtgacttggattcctcaggcttgaccagcacagtgggttccgggctgcccgtcgagtcagggttgccttcaggcgacgaggaacgaatcgagtggcctagcacccccacagttggggagcttccaagcggcgctgagattctggagggcagtgccagcggcgtaggcgatctgtctgggctcccttctggcgaggtcctcgaaacctctgcttcaggtgtgggagatctaagtggcctaccaagtggagaagtgttggaaactactgctccaggagtggaagatatctctggcttgccgtcgggcgaagtgctggagaccacagcacctggggtggaggacatatccggactgccgagcggggaggttctggagactactgcacccggtgtggaagatatcagtggactgccttccggggaagtactggagacaaccgctccaggggtggaggatattagcggccttcctagcggtgaggtgctggagacaactgcgcctggcgtggaagatatcagcggtctgccctccggagaagtacttgagactgccgctcccggtgtcgaggacatttcagggcttccttcaggggaggtgctggagacagcagcaccaggagtcgaagatattagtgggctgccatctggggaggttttagaaacagccgcaccaggcgttgaggatatttcgggtctgcccagcggagaggtgctggaaactgctgcacctggagtagaggatatttccggcctgccctccggagaggtccttgaaactgccgcacctggcgtcgaagatatttctggtctccctagtggggaagtcctggagacagccgctcccggagtggaagacatttccggtctcccttctggcgaagttttggagactgccgcacccggagtcgaggacatttccggtctgcccagtggcgaggtccttgaaaccgctgccccaggcgtggaagatatctctgggctgccttctggagaggtgctggagactgccgctcccggagtagaagatatctccgggttgcccagcggcgaagtcctggagacggccgctcctggcgtcgaggatatttccggcctgccaagtggtgaggtgctcgagacagcagctcccggagtggaggatatcagtggccttccctcaggggaagtcctagagacgactgctccgggtgtggaggaaatatcgggcttaccctccggtgaggtattggaaactaccgccccaggcgtggacgagatttcaggactgcccagtggcgaggtgctggagactaccgcccctggtgttgaagaaatttctgggctccccagtggcgaggtgctcgagacatcaaccagtgcagtgggggacttgtcagggctcccgagcggtggagaagtgctcgagatatcagtctcgggcgtggaagatatcagcgggctccccagtggcgaggtggtcgagacctcagcgagtggcattgaagacgtgtctgaactgccaagtggggaaggcctggagacgtcagcgtccggcgtcgaagacctatcaagattgccttcaggggaagaagtgctagaaattagtgctagcggctttggagacttgtctggattgccttccggcggtgagggcctggagacctccgccagcgaggttggcaccgacctcagcggcctcccctcagggagagaggggctggaaacctcggcttcgggtgccgaggacctgagcggattgccgtccggcaaagaagatctcgtagggagcgctagcggcgacctggatttgggtaagctgccctctggaacccttgggtccggccaagcaccagagacctctggactgccctccggattctcaggcgagtactcaggcgttgatcttggctcaggacctcccagtggtctccccgacttttcaggcctgccgagtgggtttcctaccgtcagtttggtcgattcgacactggtggaggtggtcacagcatccacagcgagcgagttggaagggcgaggcaccatcggaatttctggcgctggagagatctctgggttgccgtccagtgagttggatatctcgggcagggcttccgggctcccatccggcactgagctgtctgggcaggcctccggctctccagatgtgagcggtgaaatcccagggttgttcggagtgtcaggtcagcctagcggtttcccagatacctctggtgaaacttcaggcgtgacagagctgtctgggctctccagcggccaacccggaattagcggagaagcttcaggcgtcctttatgggacttcccagccattcggaattacggatctgtcgggagaaacatcaggggtgccagacctgtccggccaaccttccgggctgccaggcttcagcggggctacgagtggggtgcctgatctggtatcaggcacaacctctggctccggggagagtagtgggattacctttgttgatacttccttagtggaagtagctcctaccaccttcaaagaggaggaggggctcggctctgtagagctgtccggcttacccagtggcgaagcagatcttagcggcaaatctggaatggtcgacgtaagtggtcagttctctgggactgtcgactcttctgggtttaccagccagactcctgaattctcgggcctcccttctggcatagccgaagtgtcaggggagtctagccgcgcagagatcggatcgtcccttccttccggcgcttattacggcagtggcaccccctcttcattccctacagtatccttagtggacagaacccttgtggagagcgtaactcaagcaccaaccgcccaggaggccggtgagggcccatccggcatcctggaattgagcggtgcacatagtggtgccccagatatgtccggggagcactccgggttcctagaccttagtgggctgcagtctggcctcatcgaaccaagcggtgaacctcctggtaccccctatttctccggggacttcgcctcaactactaacgtttccggcgaatctagtgtggccatgggtacctctggcgaagcatctggactccctgaagtgacacttatcaccagtgaatttgtggagggcgtgactgagcccacgatttctcaggaactgggccagagaccacctgtgacgcacacacctcagctcttcgagagcagcggaaaagtgtccaccgccggtgacatctctggcgctactccagtgttgcccggtagtggagtggaagtgagttctgttcctgagtcctcatccgagacttccgcctacccggaggccggattcggggcttcagctgccccagaagcttctcgggaggatagcggatcccccgacttaagcgagactacctcagctttccatgaagcaaacctggagcgctcttccggactgggtgtcagcggctctaccctcacctttcaggagggggaagcctcagccgctcctgaagtcagcggcgaatctacaaccacctccgatgtcggcaccgaagcaccaggcctcccaagtgcaacgcctaccgcctcaggtgacagaacagagatctctggggacctgtcaggccacactagccagctcggcgtggtgattagtacctctattcctgagagtgagtggacccagcaaacgcagcggccagctgagacccacctagaaatcgagtcctcaagccttctctattcaggggaagaaacccatacagttgagacggctaccagcccgacagatgccagcatcccggcttcgccggaatggaaaagggaatccgagagtacagcagcagctcccgcaagatcctgcgcagaagagccctgtggcgctgggacgtgtaaggaaaccgaagggcacgtgatttgtctctgtccgccaggttataccggtgagcactgcaacatcgatcaggaggtgtgcgaggagggctggaataaataccagggccattgttatagacacttcccggatcgcgagacatgggtagacgcggaacgcagatgtcgggagcagcagagtcacttgagctcaattgtgacgcccgaggagcaggagttcgtgaataataatgcccaggactaccaatggatcggactaaatgacaggacaattgaaggagattttagatggagcgacggacaccccatgcagttcgagaattggcggccaaaccaaccagataactttttcgccgcaggcgaagactgcgtggtgatgatctggcatgagaagggtgagtggaatgatgtgccatgtaactaccacctcccatttacatgcaagaaaggtactgttgcctgtggcgagcccccagtggtggagcacgctagaacttttggacagaaaaaggatcgctacgaaattaatagtttggtgaggtaccaatgcacagagggattcgttcaacggcacatgcccacgatccgatgtcagcccagtggccactgggaggaacctcagattacctgcacagatcccactacatacaaaaggcgactccagaagcggtccagcagacatccgaggcgttccaggccgagcaccgcccatta

SEQ ID NO: 174995 - DNA, 7593 bp, Artificial Sequence
  derived and/or modified sequence
atgaccaccttgctttgggtgttcgtaactcttcgggtgattaccgcggcagttacagtggagacttcggaccatgataactccctctctgtatcgataccccaaccaagcccgctgcgggtgctacttggtacctctcttacaataccctgctacttcattgacccaatgcaccccgtgacgacggcaccttcaacggctcctctggccccaagaatcaagtggagtagggtctccaaggagaaagaagttgtgctgctggtcgctacagaaggacgcgtgcgcgtgaactctgcataccaggacaaggtgagtttgcccaactaccctgccatcccttctgacgcaactctagaggtgcagtcgctgcggagtaacgactcaggcgtgtaccgatgcgaagtgatgcacggaatagaggactctgaggctaccctggaggtggtcgtcaaaggcatagtgttccactacagggccatcagtactagatacacacttgattttgacagagcacagagagcttgtttacagaattccgctattatcgccacgcctgaacagctccaagccgcttacgaggacggttttcatcaatgtgacgccggatggctcgccgatcaaaccgtgcggtatccaattcatactccccgtgagggatgctacggggacaaggatgaatttcccggagtacgcacttatggaatcagagataccaatgagacttatgatgtgtactgctttgctgaagagatggagggagaggtgttctacgcaacttctccagagaaatttacatttcaggaagccgctaatgaatgcaggcggctgggggctaggctagccactacgggccagctgtatttagcctggcaggcaggaatggacatgtgttcggctggatggttagccgatcggagtgtgaggtaccctatttccaaggccaggcctaattgcggcggtaatctactaggggttcgaaccgtctatgtgcacgccaaccagactgggtatcccgatccttccagccggtacgacgccatctgctacaccggagaagattttgtcgacatcccagagaatttcttcggggtggggggagaagaggatatcactgtacagaccgtcacgtggcctgatatggagttgcctctgccacggaatatcaccgagggggaggccagaggttctgttatcctgactgtgaaaccaatctttgaggtgtctcccagccctttggagcccgaggaaccgtttactttcgcgcctgagataggcgcaaccgcttttgccgaggtggaaaatgaaaccggcgaagctactcggccatgggggttccccaccccgggtctgggtcccgctacggcatttacaagtgaagaccttgttgttcaagtgaccgccgtaccaggacagccacatctgcccggaggagtggtgtttcactacagaccaggacccacaagatacagtttaactttcgaagaagctcagcaggcctgcctgcgcaccggggcagtgatcgcaagtcccgaacagctgcaggctgcctacgaggctgggtatgagcagtgtgatgccggttggctacgcgatcagaccgtgcggtatcccatcgtatcccctcggacgccgtgcgtgggcgataaagattcatctccaggcgtgcgtacctatggagtcagaccctctactgagacttacgacgtctactgcttcgtcgatcgcctggagggagaggtgtttttcgcgactcgcctggagcaatttacattccaagaggctctagaattttgtgaaagccacaatgcaactctggcaaccactggccagctgtatgcagcctggagcaggggactcgataagtgttacgccggatggcttgcagacggatccttgcggtaccccatcgtgactcctcgcccagcctgtgggggagataagcctggcgtgagaacagtgtatctttaccccaatcagaccggcctacctgaccccctgtctaggcatcatgcgttctgcttccgaggcatttccgcagtgccttcacccggagaggaggagggtggtacacccacctccccaagtggtgtggaggaatggatcgtcacacaggttgtccctggagtggcagctgtgcccgtcgaagaggaaacgacagccgtgccttccggtgaaaccaccgcgatacttgaattcacaactgaacccgaaaaccagacagaatgggaaccagcatatacccctgtgggtacgtcacccctgccagggatcctgcctacctggccccctaccggagcggcaactgaggagagcactgaggggccatcagctactgaggtaccctcagcaagcgaggagcccagcccatctgaggtacccttcccatcagaagagcccagcccttcagaggagccctttccttctgtgagaccatttccctccgttgagctgtttccttccgaagaaccattcccgagcaaggagccatcgccatccgaagagcctagtgcttcagaggagccctacaccccctctccgcctgtgccatcttggactgaactgcctagctccggcgaggagtccggagcccctgacgtttcaggggactttacaggcagtggagatgtgtctggccatctcgatttttctggacaactatctggagaccgtgcaagcggtttgccatctggcgatctggattcaagcggtctgacctctaccgtgggcagtggacttcccgtcgaatctggattgcccagcggcgacgaagagcgcatcgagtggccctccacacctactgtcggcgaactaccttcgggcgctgagattctggaaggaagcgcctcaggtgtcggcgacttgagtgggctcccgtcaggtgaggttctggagacgtccgcttcgggcgtgggtgacctgtcaggccttccgagcggagaagtcctcgagaccaccgccccaggcgtcgaggacatttctgggctgccgtctggtgaagtgctcgagacaaccgccccaggcgtggaagatattagtggtttgcccagcggagaagtcctggagaccactgccccaggcgtagaggatatatcaggcctcccaagcggtgaggtgctggagacaacagcccctggagtcgaggacatctctggcctcccctctggcgaagttctggaaactacagctcccggtgtcgaggacatttccgggttgcccagtggcgaggtcctcgaaacaaccgcacctggagtggaagatatctctgggcttccaagcggtgaggtattggagacggctgctccaggggttgaagacatctccggactcccgagcggagaagttctcgaaacggccgcaccaggcgtggaggacatctctggcctgcctagcggagaagtgctggaaacagcagctcctggggtggaagacatcagtggtctgccgtcaggagaggtgctggagactgccgctcctggtgtggaggacattagcggattaccttccggagaagtactagagaccgccgcaccaggggtggaagacattagcggactgcccagtggggaagtgctggagaccgcggctcccggagtggaagacatctcaggccttccgtccggcgaagtgttggagacggctgcccctggcgtggaagacatttcaggcctcccctccggagaggtcctcgaaaccgctgctcctggggttgaagatattagtggcttgccatcaggtgaggtactggagactgccgctcctggggtcgaggatatctccgggcttccttctggtgaggtacttgagacagctgcacccggtgtcgaggacatctccgggcttccatcaggcgaagttctggagaccgcagctcccggtgtggaggatatcagtgggttgccttcgggtgaagttctggaaaccgccgctcccggagtggaggatatctctggcttgccgtctggggaagtcctggaaacagcagcaccaggggtggaagatatctccgggctcccctcaggcgaagttctggagacagctgcccctggcgtggaagatatctcaggtctgcctagcggagaggtcttggaaaccgccgcaccaggggttgaggacatttctggactgccatccggggaagtcctggagacagcggctccgggagttgaagatatcagtggtctgccttccggggaggtattggagacgaccgcaccgggtgtagaggaaatctcaggactgcccagcggggaagtgctcgaaaccaccgctcccggtgtcgacgaaataagcgggctgccgtctggcgaagtcctcgaaactaccgctccaggcgttgaagaaatctcagggctgccttcaggagaggtgttagaaacatcaacaagcgcagttggggacctgtccggcctccctagtgggggtgaggtgcttgagataagcgtgtctggagtggaagatatcagtggcctccctagcggcgaggtggtggagacttctgcatctgggatagaggatgtaagtgaattgccatctggcgaagggctggaaacgagcgcatcaggagtggaggacctgagccggctaccctctggagaggaagttttggagatttcggcatctggatttggcgacttaagcggcctgccaagcgggggagagggactggaaacatccgccagcgaggtcggaacagatctctctggcctgccctccggcagggaaggtctggagaccagcgcttccggcgctgaggatctgagtggattgccgagcggcaaggaagatcttgttggatctgctagcggggacctggaccttgggaagctgcccagcggtacactcggctctggccaggcccctgagacttctggcctgccgagtgggtttagtggcgagtactctggtgttgatctgggttctggccctccctctggcctgcccgacttttccgggctcccctcaggcttccccacagtgtcactcgtcgactcaaccttagtcgaggtggtcacagcgagtacggcatcagaactggagggacggggtacgattggtatcagcggcgcaggagaaatatccggattgccatcctccgaactcgatatcagtggacgggctagtggacttcctagtggcactgagttatccggccaggcttccggctctcccgatgtgagcggagagattcctggcctctttggagtatcgggccaaccatctggcttccctgacacgtccggagagacatccggtgtaacggagctctcgggactttcatcgggtcagccgggaatttccggcgaggcaagcggcgtattgtacggaacatcccagcctttcggaatcacagacctgagcggcgaaacaagtggtgtcccagacttaagtggacaaccaagcggattgccaggcttttcgggtgctactagcggagtgccagatctggtaagtggcaccactagcggcagtggagagagttctggaattacctttgtggatacatcgttggtggaggtggctcccacaacattcaaagaggaagaaggcctgggctcagtggagttgtcgggccttccgagcggcgaggccgacctttccggaaagtcaggaatggtggacgtgtcaggccaatttagtggcactgtcgacagctcgggcttcacatcgcagacccccgagttcagtgggttgccctccgggatcgcagaagtgtctggcgagtctagccgcgctgagatcggctcatccttgccttccggagcctattacggctccggcacacccagcagtttccccacggtttctctcgtggacaggacattggttgaaagcgttacacaagctcccactgcacaagaagctggcgaggggccatccggaattcttgagctgagcggcgctcacagcggcgcaccagacatgagcggcgaacattcaggcttcctggacttgtccgggttacagtctgggcttatagaaccctccggggagccaccgggaacaccgtatttctccggagattttgcttctacaacaaacgtcagcggagagtcctccgtcgctatggggacctcaggcgaggcctctggcctacctgaagttacacttatcacctctgagtttgtggagggcgtgactgaaccgaccatctcgcaggaactcggacagcggcctccagtgacccacactccgcagctgttcgagtccagcggtaaggtatctaccgccggagacatcagcggagcaactcctgtactcccgggatcaggtgtggaggtgtcatcagtgcccgagagctcaagcgaaacaagtgcttacccagaggcaggcttcggagccagcgcggcacccgaagcgagccgcgaagactctggttcgccagacctctctgaaacaacctccgccttccatgaggcgaacttggaacggtcctctgggttgggcgtgtcgggaagcaccctgacttttcaggaaggggaggcatctgctgctcccgaagtgagtggggagtccacaacgacctccgatgtcggcacagaagccccaggactgccctcagctacacccactgcatcgggcgaccggacagagatttcgggcgacctaagtggtcacacctcacagttgggagttgttatctctacctcaattcctgaatctgagtggacccagcagactcagcgaccagcagaaacgcatctggaaattgagtccagtagccttttgtactcaggagaggagacccataccgttgaaacagccactagcccaacggatgcatctatccccgcaagcccggaatggaagagagaaagtgagtctacggcagcagcacctgcccgtagctgcgccgaagaaccttgcggggcagggacctgcaaagagacagagggccacgtgatttgtttatgccccccaggctacactggcgaacactgcaacattgaccaagaagtgtgcgaggaaggatggaacaagtatcaagggcattgttaccggcattttccagacagggagacatgggtcgatgcagagaggcgatgccgtgaacaacagagccatttgtcatcgatcgtcaccccagaagagcaggagttcgttaacaataatgcccaggactaccaatggatcggcttgaatgaccgtacaatagaaggagatttcaggtggtctgatggtcaccccatgcagttcgagaactggcgacctaaccaacccgacaatttctttgccgctggagaagactgcgttgttatgatctggcacgaaaaaggggagtggaacgacgttccttgcaattaccacctgcccttcacctgtaagaaaggcaccgtggcatgtggtgagccgcctgtcgttgaacatgcaaggaccttcggccaaaaaaaggatcgctatgaaattaattccctggttcggtatcagtgcacggagggcttcgtccagcgtcatatgccaacaataagatgccaaccatccggtcactgggaggagccacagattacctgtaccgaccctactacttataaacgtcggctgcagaaacggtcttcacggcacccgagacgcagcagaccctcgacagcccactag

SEQ ID NO: 174996 - DNA, 7593 bp, Artificial Sequence
  derived and/or modified sequence
atgaccaccttgctatgggtgtttgtgacactcagagttattacagccgcagtgaccgttgagactagtgaccacgataacagcctctctgtctcgattcctcaacctagtcccctacgtgtactgctgggtaccagccttacaattccctgttattttatagacccaatgcatcccgtgacaaccgcaccctctacagcccctctggcacctagaataaaatggagccgcgtttctaaggagaaggaagttgtacttctggtggccactgaggggagagttcgcgtgaattccgcctatcaggataaggtaagcctccccaattaccccgctatcccatcagacgcgaccctggaagtgcagagtctaaggagcaacgacagcggcgtgtacaggtgtgaggtgatgcatggcattgaagactcagaagcaaccctggaggtagtcgtgaaggggatagtgtttcattatagagcaatcagcacacggtacacactcgacttcgaccgggcacaacgcgcatgtcttcagaattccgccatcatcgctaccccagagcagttgcaggctgcctacgaagatggcttccatcagtgcgacgcgggttggctcgccgatcagaccgtgcggtatccaattcacacacctcgggagggttgttacggagacaaggacgaattcccaggggtcaggacgtacggaattagagacacgaatgagacgtacgacgtgtattgctttgccgaagagatggagggggaggtgttctacgccacatcacctgagaagttcacttttcaagaagccgctaacgagtgccggagactgggtgccagactggcaactaccgggcaactgtacctagcatggcaggctggcatggatatgtgttccgcaggttggttggctgacagaagtgtccgctaccccatcagcaaggccagacctaactgcggcggtaatcttctgggggtgcgcactgtgtatgtgcacgcaaaccagacaggatatccggatccatcttcacgatacgacgctatctgttacactggtgaagattttgtggatattccggaaaatttctttggagtcgggggtgaggaggacataacagtacagacagtgacatggcctgacatggagctgcctctgccacgaaatattacggaaggagaagcgcgtggcagcgtcatactgacggtgaagccaatcttcgaggtttctccgtccccgctggagcctgaggagcccttcacctttgcgcctgagatcggcgcaacggcctttgccgaggtggagaacgagacaggtgaggctactcgaccatggggatttccgacccctgggcttggtcctgccaccgcttttacctccgaggatcttgtcgtccaggtgaccgctgtgccaggtcagcctcatctgccaggcggtgtcgtgttccattaccgcccaggcccaactaggtacagcctcacatttgaggaagcgcaacaggcttgccttcgcacaggggcagtgatcgctagccctgaacagctccaggcagcctatgaagccggatatgaacagtgcgacgcaggctggctcagggatcagaccgtacgttatccaatagtgagccccagaacgccttgcgtcggcgacaaggattcttcaccaggggtgcgaacctacggagtccgccctagcacggagacgtatgacgtgtattgttttgtggaccgacttgaaggtgaggtttttttcgctaccaggcttgagcagtttacattccaggaagctctagagttttgtgaaagtcacaacgcgaccctagctacaactggccagctgtacgcggcttggagcaggggattggacaaatgctatgcgggatggctcgccgatggctctctgcggtaccccatcgtcaccccacgccctgcgtgtggaggtgacaagcctggggtgcggaccgtttatctctatcctaaccagacaggtttaccagaccctcttagcagacatcacgcattctgcttccgaggcatctctgctgtgccatcacccggtgaagaggagggcggtacccctacctccccctcaggtgtagaggagtggatcgtgactcaggtggtcccaggcgtcgccgcagtccctgtggaagaggagactaccgctgtgccatccggggagactacagcgattctcgaattcaccacagagccagaaaaccaaacagaatgggaacctgcatacacccctgttggcacgagccccttacccggtatccttccaacatggccacccacaggggctgctactgaggagtccacagagggccctagtgcaaccgaagtgccttccgccagcgaagagccatccccctcagaggtgccgttccccagcgaggagcccagcccaagcgaagagcctttcccaagcgtgcggcctttcccttccgttgaactcttcccgtctgaagagcctttcccctcaaaagagccttccccttcggaagaaccttccgcttctgaggagccctatactccttctcctcccgttccaagttggacagaattgccctctagcggggaggaatctggtgcaccagacgtcagcggcgactttactgggtccggagacgtcagtggccatctagacttctccgggcagctttcaggtgacagggctagtggactcccctcgggagaccttgacagttccggccttaccagtaccgtggggtcagggctgccggtggagtctgggctccccagcggtgatgaggaaaggattgagtggcctagcactcccacagttggagagctgccatctggagcggagattctggaagggagtgcgtctggcgtgggtgatctttccgggcttccatctggagaggttctagagacctccgcctccggggttggtgatctgtcaggattgccttcaggcgaggtattggaaactaccgcacccggagttgaggacatctcaggcctgccatcgggagaggtcctggagacaaccgcccctggagtggaggatatttccgggctcccctctggcgaggtactggaaacaaccgcaccaggcgttgaggacattagtggactgccctcgggcgaagtgctggagactacagctcctggagtagaggatatcagcggactgccgagcggagaggtgctagagaccacagctccaggcgtagaggatattagcgggcttccaagcggcgaggtcctggagacaactgcccctggagtagaggatatcagtggtctcccatctggggaagtgttagaaacagccgctcctggcgtggaagacatttctggccttcccagcggggaagtattggagacggctgctcccggtgtggaggacatctccgggcttccatctggtgaggttctagaaaccgccgctcctggggtggaggacataagcggccttccgagcggcgaagtgttggaaaccgctgcccctggggttgaggatatcagcggccttcccagtggagaagttctagagaccgcggctcccggagtggaggacatcagcggtctgcctagtggagaggtgctcgagaccgcagcgccaggcgtggaggacattagtggcttgccaagcggagaagtgctggaaaccgccgctccaggggtggaggacatctccggcctgcccagtggggaggtattagagacagcagcccctggggtggaagatatctctgggttgccttcgggagaggttctggagactgccgctccaggggttgaggatatcagcggacttcccagcggagaagtcctggagactgcagctcctggagtggaagatatctcgggactgcccagcggagaggtgttggagaccgcagccccaggtgtcgaagacattagcggtttgccctccggtgaggtgctggagacggctgctccaggtgtcgaggatatctccggtctgccgagcggggaggtactggagacagccgctcctggagtggaagacatttctggactcccatccggggaagtattagaaacggcagctccaggggtggaagacattagcggacttccaagtggggaagtacttgagacggcagcgcctggcgttgaagacatttcaggcctcccttccggtgaagtgctcgaaaccgctgcccctggtgttgaggacatctctggccttcctagcggggaggtgctcgaaactaccgcacccggtgtggaagagatatcagggctccccagtggagaggtgctggagactaccgcgcctggagtggacgaaattagcggtctgcctagtggggaggtcctggagaccacagctcccggtgtcgaggagatatccggtctgcctagtggggaggtgctggaaacctctacctcagccgtaggcgacttaagcgggcttcctagcggtggggaagtgctggagattagcgtgtccggtgtcgaggatatttccgggttaccgtccggcgaggtggtagagaccagtgcctcagggatagaggacgtgagtgaactgccctcaggcgagggcctggagacttcagcatccggcgtggaggatttgtcacggcttcccagtggagaggaggtgctggaaatctcagcctctggctttggggatctctccggcctaccctcaggcggagaaggcttggagacgagcgcctcggaagtgggaacagacttatcaggcctgccgtccggtcgggaaggtctcgagacctccgcctcaggggctgaagacctcagtggcctgccatcaggcaaagaagatctggttggcagcgcctccggagatcttgatctgggaaagttaccatcggggactctggggagtggccaggccccagaaaccagcggcctcccatcaggcttctctggcgagtattctggcgtagatctcgggagcgggcctccctcagggttgccagattttagtggcttgcccagtgggtttcccacagtcagcctggtcgacagtacactcgtcgaggtcgtgactgcctctacagcctccgagttggaggggaggggtacgattggtatttctggagcaggagaaatctctgggctgccatcctcagagctcgacatttccggacgtgcgtccggtctcccctccgggacagagctgagtggccaagcaagcggcagtcctgacgttagtggagagatccccggactgttcggcgtcagtggccagccgtccggctttccggacacgagcggagagacctccggcgttactgaactctccggcctgagcagtgggcaaccgggtattagcggcgaagcatctggggtgctttacggcacaagccaaccatttggtatcaccgatttgagcggagagactagcggtgtccctgatctgtcagggcagcccagtggtttacctgggttttctggagccacaagcggcgtccccgatctggtgagtggtacaactagtgggagtggtgaatcaagtggtattacttttgtggacacctctttagtggaagtggcccctactacatttaaggaagaagaaggcctgggaagtgtggagctcagtggactgcccagcggagaggctgacctttccgggaagtcaggcatggtggatgtttcaggccagttctctggcaccgtggactcctctggatttaccagtcagactccagagttttcaggtttaccctctggcatagctgaggtttctggagagtcctctcgagccgagattgggagttcattaccttccggagcctattacggaagtggtaccccttcatcctttcctactgtgagcctggtagataggaccctggtggagtctgtgacccaggcccctacggcacaggaagccggtgagggaccctcgggcattctggaactctcgggcgctcacagtggggcaccagacatgtcaggcgaacattctggatttctggacttgagcggccttcagtccggtttaattgagccctccggggagccacctggtaccccctattttagtggggatttcgcgagcacgacgaatgtctccggcgagtcttcagtagctatggggaccagtggtgaggccagcggcctcccggaggtaaccctgattacatctgaatttgtggagggggtgacagaaccaacaatcagccaggaactgggccagcgccctccagtcacccacacgccacagcttttcgaatcatctggcaaggtctccaccgccggagacatttctggtgctactccagttctgcctggcagcggcgttgaggtgtcttccgtgcccgagtcctctagcgaaaccagcgcatacccagaagctggtttcggcgcttcagcagccccagaggcaagccgggaagacagcggcagcccagatctgtcagagacgactagcgcttttcacgaggccaacctagagcggagctccggactgggagtgtctggttcaacccttacttttcaggaaggcgaagctagtgccgcacctgaagtatctggggagagcacaactacttccgatgtggggacggaggctccgggactgcccagcgctactccgactgcctccggggacagaactgaaatctccggcgaccttagcggccatacaagccaactcggcgtcgtcatctcaacgagcattcctgagtcggagtggacgcagcagactcaacgtcctgcagaaactcatctcgagatcgagagcagctcattgctttactcaggcgaagagacccacacagtcgagaccgccacgtcaccaaccgatgcgtccattcctgcttcacccgaatggaaacgggaatcagagtcaaccgccgcagcccctgcacgctcgtgcgcggaagagccatgcggggctggaacttgtaaagaaacggagggacatgtgatttgcctgtgcccccctggatatacaggagaacactgtaacatcgatcaggaggtctgtgaagagggctggaacaagtaccaggggcactgttacaggcattttccagatcgcgagacctgggtagacgcagagaggcgctgcagagagcagcaaagccatctgtcctctattgtgactcctgaagaacaggagttcgtgaataacaatgcacaggattaccagtggatcggcctgaacgacagaactatcgaaggggactttcgttggagtgacggccatccgatgcagttcgagaattggaggccaaatcagcccgataacttttttgcggcaggagaggattgcgtggtgatgatttggcacgaaaaaggagaatggaacgatgttccatgtaactaccatttacccttcacctgtaagaaagggactgttgcctgtggcgagccacctgtcgttgagcatgcgcgaacctttggtcagaaaaaagatagatatgagataaactccctcgtgcgataccaatgcactgaagggtttgtacaaaggcatatgcccaccatacgatgtcagccaagtgggcactgggaggagcctcaaatcacatgcacagaccctacaacctataaaagaagattgcagaaaagatcatctagacaccccaggcgctctagacctagcaccgcccactat

SEQ ID NO: 174997 - DNA, 7251 bp, Artificial Sequence
  derived and/or modified sequence
atgacaacactgttgtgggttttcgttacactgcgggtgataaccgcggccgttaccgtagaaacttccgatcacgacaactcactgtccgtttcaattccccagcccagccccctacgcgttctgctgggaacatcccttacaatcccttgctacttcattgatcctatgcaccccgtaacaactgcccctagtaccgcccccctggctccacggatcaaatggtccagggtgtccaaagaaaaagaggttgtgttgctggtagcgacagagggtagggtcagagtgaacagcgcttaccaggacaaggtgtcccttcccaattaccccgctattccaagtgatgcaaccttggaagttcagtcactccgatcgaacgactccggggtttacaggtgcgaagtgatgcacggcatcgaggactcagaggcaactctggaagttgtggttaaaggaattgtcttccattatcgggccatctctaccagatataccctggactttgaccgagcccagagggcttgcctgcaaaactctgctattatcgctacccccgagcagctgcaagcagcatatgaagatggatttcaccaatgtgatgccgggtggctggctgaccaaaccgtgcgctatccaattcacacacccagagagggatgttacggggacaaggatgaatttcccggagtgcggacttacggtattcgcgacacgaacgagacgtacgacgtatattgctttgccgaggagatggagggcgaagtattttatgccacttcccctgagaagttcacattccaggaagccgccaatgagtgtcgtcgcctcggcgcgagactggccacaactggtcagttatatttagcctggcaggccggcatggacatgtgcagcgccggctggctggccgaccgttcggtgcgatatcccatcagcaaagcaaggccaaactgtggtgggaacctgcttggcgtccggacggtgtatgttcacgccaaccaaaccggctaccccgatccgtctagcaggtacgacgctatatgttacacaggagaagatttcgttgacattcccgaaaactttttcggcgtaggtggtgaagaggatatcactgtgcagacagtgacttggccggatatggaacttccgttacctcggaatatcaccgaaggagaagctagaggctctgtaatcctgacggttaaacccatattcgaggtcagtccctccccactagagcctgaggagcccttcacattcgctcccgaaatcggcgcgaccgcattcgctgaagttgaaaacgagaccggagaagcgacccgcccatggggctttcccacccctggcttaggtcccgctacggcttttacatcagaagacttagtggttcaagtgacagcggtaccagggcagccacatcttccaggtggagtggtattccactacagaccaggtccaaccaggtattcattaaccttcgaggaggcccagcaggcctgtctccgaacgggagcagtaattgcctcgcctgagcaactgcaggcagcctatgaagccggctacgaacaatgcgacgctggctggctccgcgaccagactgtgcggtatccaatcgtctcacctcgcactccatgtgtcggtgataaagacagcagccctggggtgagaacttacggggtcagaccaagcactgaaacttatgatgtgtattgcttcgtcgatcgtctcgagggggaagtgtttttcgccacaaggctcgagcagtttacctttcaagaagctctcgaattctgcgaatcccataacgcaacgctcgcgacaactggccagctctatgcggcctggagccggggactggacaagtgctatgcaggatggctcgccgacggttcattgcgctacccgatcgttactcctcgacccgcatgcggtggggacaaacctggcgtccggactgtgtatttgtacccaaaccagaccggattgcccgaccctttgtcgaggcaccatgcattctgttttagaggaatatccgcagtcccgagtcctggcgaggaggaaggcggtacccctacatccccgtcgggcgtagaggagtggattgtaactcaagtagtgcctggagtcgcagctgtccccgtagaagaggaaactacggctgtcccttccggagagacgacagctattctggaatttacaacggaaccagaaaatcagactgaatgggaacccgcttatacgccggttggaacatcaccactgccagggattctcccgacttggccacctacaggagccgccactgaggaaagcaccgagggtccatctgccaccgaagtgccttctgcctctgaggagcccagcccgtccgaagtccccttccctagcgaagagccctcaccgtccgaggagccttttcccagtgtgagaccatttccgtcagtagagcttttcccctcggaagagcccttccccagcaaggagcctagcccgtccgaggagcctagcgcctccgaagagccatacacaccctctcccccggtcccgagctggaccgagctgccatcttccggtgaagagtccggcgctcccgatgtgagcggggattttactggtagcggcgacgtgagtggccacctggacttttccgggcagctctccggcgacagagcttccggcctgcccagtggcgaccttgactcttctggccttaccagtacggtggggagcggactccccgtggagagtggccttcccagcggcgatgaggagaggattgagtggccgagtacgcctaccgtaggcgagcttccatctggtgctgagattctggaaggttcagctagtggggtgggggacctctccgggctccccagtggcgaagtgctggagacctccgcttcgggtgtcggcgatctttctggcctaccgtctggggaagtgctcgagaccacggcccctggcgtggaggatataagcggcctcccatcaggcgaagttttggagactacagcccccggcgtagaggacatctctggactcccctccggcgaggtcttggaaacgacagccccaggggtggaagatataagtggtctgcccagtggagaggtgctcgagaccaccgctccaggggtggaggacatttccggcttgcccagcggagaggtgctggagaccacagctccaggggttgaagatatcagcggtttaccctctggggaagtcctggagacagcagcgcccggggtcgaggacatttccgggctccccagcggagaagtgctggaaaccgcagcgcccggagtagaagatatttccggcctgccttcgggcgaagttttggagactgccgctcctggagttgaggacatatcaggcttgcccagtggagaggtcctggagaccgccgctcccggagttgaggacatctctggcctgccatctggagaagtgctagaaacagccgcgcctggagtggaagatatctcaggcctgcccagcggtgaggtcctcgaaaccgcagcacctggcgttgaagacattagcggcctgccctctggcgaagtgttggagacagccgctcctggcgtggaggatatttctggacttcctagcggagaggtgctagagaccgcagcgcctggtgtggaggacatctcggggctcccgtctggggaagtcctggagacggcagccccaggtgttgaagatatctccggcctgccgtctggtgaggtgctagaaaccgctgcccccggtgttgaggatatcagtggcttaccatcgggtgaagtgctcgaaactgcagcccccggagtagaagacattagtgggttaccatccggggaagtactggagaccaccgctccaggagttgaggagatctcagggcttccaagtggtgaagtgttggagactaccgcacccggagtggacgagatcagtggcctaccaagtggagaagtgctggaaactacagcccccggcgtggaagaaatctcaggcctgccctctggagaagtgctcgaaacaagtacatctgctgttggcgacctgagcggcctgcctagtgggggagaggtcctggaaataagcgtatctggcgtggaagacatttcaggccttccctcaggggaagtggttgaaacgtcagcgtccggaattgaagatgtctccgaactgccctccggtgagggactggaaacaagtgccagcggagtcgaggatctgagcagactgcccagtggtgaggaggtgctggagattagtgcctccggattcggagatctctctggactgccatctgggggtgaaggcctggagactagtgcaagcgaggttgggacggatctgtcagggctcccaagcggtcgggaagggcttgagaccagtgcaagcggagccgaagatttgtccggcctaccctccggcaaggaagacttggttggatctgccagcggcgacctggatctaggaaagctcccaagcggaaccttggggtccgggcaggctccggagacatcaggactcccaagcggcttctctggtgaatactccggggtcgacctaggctccggtcctccctccggccttcccgatttcagcggattgccctccggatttcccaccgtgtccctcgtcgacagtactttggttgaggtagtcactgcaagtaccgcctctgaattggaaggacgcgggacgattggaatatccggggccggcgaaatcagtgggctgccttcgagcgagcttgatatctccgggcgcgcctctgggctccctagcggaaccgagctatctgggcaggcgtcgggtagtccagatgtatctggcgagatccctgggttgttcggagttagtggacagccctctggctttcccgacacatctggcgagacgtctggggtgacagaactgagtgggttgagctctggacagcctgggatatctggcgaagcttcaggggtgctgtatggaacctcccagccttttgggatcaccgatctctccggggagactagcggcgtacctgatctgtccgggcaaccgagtgggttgcctggtttcagcggtgctacttctggcgtgcccgacctggtttccggaaccacatctggcagtggggaatcgtccgggattacattcgtagatacatccctagtggaggtggcaccaactacatttaaagaggaagaaggcttgggcagtgtcgagctgtctggcctaccttcaggcgaggctgacctttctggaaagtcaggaatggtcgatgtaagtggacagttctcaggcaccgtggatagcagcggattcaccagccaaacccccgaattctccgggttaccctcagggatcgctgaggtgtccggggagagttccagggccgaaattgggtcgagcctgccgtcaggagcatactacggatccgggacacctagctcattcccaactgtttccttagtggatcgcactctggtcgagagtgttacccaagcacctacagcacaggaagccggggaagggccatccggtatcctcgagctgtccggggcccactctggggccccagacatgtccggagagcacagcggcttccttgatttgagtggcttgcagagcggtttgatcgagccctcgggagaacctccaggcaccccttacttctctggagatttcgcaagtaccaccaatgtctctggggagtcttctgtcgccatgggcactagtggtgaggcgtctgggctaccagaagtcacactcattacatctgagttcgtagagggagtcacagaacctaccatctctcaggaactggggcaacgtcctcccgtcacccatactccccaactgtttgagtctagtggcaaggtctccactgccggtgatatctctggcgcaactcccgtactgcccggatcaggtgtggaggtatccagcgtgccggagagtagttctgaaactagcgcttacccagaagcaggctttggtgcatctgcagctcccgaagcgagccgcgaggattcagggtctccagatctgtctgaaaccaccagcgccttccacgaggctaatctagagagaagttctggcttaggagtgagcggtagtacattgacatttcaagagggggaggcaagtgcggcgccagaagtgtcaggggagtctactacgacctccgacgtgggcacagaagcccccggactgccctctgcaacccccacggcgtccggtgaccgaaccgagatatctggagatcttagcggacatacatcccaactgggcgtggttatatctacatctatcccagaaagcgaatggacacagcagacccagagacccgcagagacccatctggaaattgaaagttccagcctgctctattctggcgaggagacccacaccgtcgagacagccacatccccaactgatgcaagcatccccgcttcccccgaatggaagagagaaagcgagagtactgccgcagccccagcccgctcatgcgctgaggagccctgcggcgcaggaacctgcaaagaaacagaggggcatgtcatttgtctgtgtcctccagggtataccggcgagcactgtaatatcgaccaagaggtttgtgaggagggttggaataaataccagggtcactgttatcgccactttccagatagagagacctgggtagacgccgagcggcggtgtagagagcagcagtcccacctcagtagcatcgtgacaccagaagagcaagaattcgttaacaataacgctcaggactaccaatggatcggcttgaatgacagaacaatagagggggactttcgatggtctgatggacacccgatgcaatttgagaactggagacctaatcaacccgataatttcttcgctgccggcgaagattgcgttgtgatgatatggcacgagaaaggagagtggaacgatgttccctgcaactatcaccttccttttacctgtaagaaaggcaccgtggcgtgtggagagccaccggtcgtggaacacgctcgcacatttgggcagaagaaggacagatacgaaatcaatagcttggtaagataccagtgtacagagggcttcgtccagcgccatatgcctacgattagatgccagcctagcggtcactgggaagaaccccaaattacgtgtactgatcctacaacttacaagcgaagactccagaagcgatcaagccggcaccctcgacgctcaagacctagcacggcccattag

SEQ ID NO: 174998 - DNA, 7593 bp, Artificial Sequence
  derived and/or modified sequence
atgactacactgctatgggtattcgttacactgcgggtgataacagccgccgtgactgtcgagacatccgaccacgataatagtctgtctgtgtctatcccccaacccagtccattacgtgtgttgcttggcacaagtcttaccattccttgttatttcatagatcccatgcaccctgtgaccaccgctccatccactgctcccctggcacctcgcattaaatggagtcgcgtgtcgaaggaaaaggaggtggtgctcctcgttgctaccgagggaagggtgagagttaactcggcctaccaggataaggtatctcttcctaactatcctgcaatcccgagcgacgcgaccttggaggtgcagtctctcaggagtaacgattcgggggtctacagatgtgaggttatgcacggcattgaagattccgaggcgacgctagaggtcgtggtcaagggtatcgttttccattatagggcaatctccaccagatatacactggactttgatagggcccagagggcctgcctgcagaattccgccattatcgccacccctgaacaacttcaggcagcgtatgaggatggcttccaccagtgtgacgccgggtggctcgccgaccaaactgtgaggtaccccattcatacgccacgcgaaggttgctacggggacaaggatgaattccctggagtgaggacttatgggatccgggataccaacgagacctatgatgtgtactgctttgctgaggaaatggaaggcgaagtattttatgcgacctctcctgagaagttcacattccaagaggctgccaacgaatgccgaaggctgggcgccagattggctactacaggacaactgtacctggcttggcaggccggcatggatatgtgtagtgctgggtggcttgccgatcgttccgttaggtaccccatttcgaaagcccggcctaattgtggaggcaatcttctgggagtacggactgtgtatgttcacgcaaaccaaaccggttaccccgatccttcttccaggtacgatgccatttgttataccggggaagatttcgtcgacatacctgaaaatttctttggagtcggaggcgaggaggacatcactgttcagacagttacctggcctgatatggaattgccgctgccgcgaaatataacggaaggcgaagcccggggaagcgtgatacttacagtgaagccaattttcgaggtttcaccatcaccactcgaaccagaggagcccttcacctttgcgcctgagattggcgcaaccgcgtttgccgaagtagagaacgaaactggggaagcaaccaggccatggggctttcctacccctggactcggaccagccaccgcttttacatccgaagacttggtggtgcaggtaaccgccgttccaggacagcctcatctcccaggaggagttgtgttccactacagacccggccctactcgttattcgctgacctttgaggaagcgcagcaggcctgcctcaggaccggcgcagtaattgcctcccccgaacagcttcaagcagcatatgaagcaggttatgaacagtgtgatgctggatggctccgtgaccagaccgtccggtaccccatagtgtcaccccgcactccttgtgtgggcgacaaagactcttctcccggagttagaacttatggcgtaaggccctcaacagagacctacgacgtctactgcttcgttgacaggctagagggagaggtgttttttgcgacccgcctggagcagtttacctttcaggaagctctggagttttgcgagtcacacaacgcaacactcgcaactaccggacagctttacgctgcatggtctaggggactggataagtgctatgcgggatggctggctgacggttctcttcgctatccaatcgtcacacccagacccgcctgcgggggggacaaaccgggcgtacggaccgtgtacctctatccaaatcagactgggctgcccgaccccctgagccgtcatcatgctttctgttttcgtggcatttctgctgttccttcccccggcgaggaggaaggcggtacacccacaagcccgtccggagtggaggaatggatcgtgactcaagtcgttcccggggtcgctgctgtccccgtagaggaagaaaccaccgctgtgcctagcggcgagactaccgccatattagaatttaccacagaacccgagaaccaaactgaatgggaacctgcatacacacctgtgggcacaagtccgctccccggtatcctgcccacctggccgcctacaggggccgcaacggaggagagcacagaaggtccctccgcaacagaggtccccagcgccagcgaagaaccatcaccatccgaggtaccctttccatctgaggagccaagtcctagcgaagaaccatttcctagcgtgcggccctttccttcggtggagctgttcccctctgaggaaccctttccatccaaagagccctcaccaagcgaggagccctccgcctctgaagagccttataccccgtccccacctgtaccctcctggacagagctgccctcaagcggagaggagagcggcgccccagatgtgtctggtgacttcactggctcaggcgacgtgtccggacatctggactttagcggccagcttagtggcgaccgggcttccggtttaccttcgggagatctggactcgagcgggttgactagcacagttggatccgggcttccagtggaatccggcttgccgtctggggacgaggaaagaatcgagtggccaagcactcctaccgtgggggagctgccatccggagcagaaatcctcgagggttcggcctctggagtgggggatctgtccgggctgcccagcggcgaggtccttgagacgtccgctagcggggtgggcgatctttccggtcttccaagcggggaggtgctcgagaccactgctcctggggtggaggacatatcagggttgccttccggcgaagtactggagaccactgctccgggcgtggaggacatcagcggccttccaagcggggaggtactcgagaccactgcaccgggcgtcgaggacatatctggcttgccgtccggagaggtgctggagactacagctccgggcgttgaagacatctctggcctcccgagtggagaggtgctggaaacgacagccccgggagttgaggacatctccggcttgcccagcggagaagttctagaaaccactgccccaggcgtagaggatatttctggattgccatccggtgaggtgctggaaaccgctgcccccggtgttgaggacatttccggactacccagcggagaagtgttagagacagcagcccccggtgtggaggatatttccgggcttccttcaggagaggtgctggaaaccgcggcccccggggtggaagacatatccggcttgcccagcggagaggttctggaaacagctgcccctggcgtggaagatatttctggcctccccagcggtgaagttctcgagacagctgcacctggggtggaggatatcagtgggttaccatctggcgaggtgcttgaaactgccgcacctggcgtggaggacataagcgggcttccatcaggcgaggtgttggagactgccgccccaggcgtggaagacatcagcggcctaccatcaggcgaggtacttgagacagcggcccccggtgtagaagatatttctgggttgccctcgggcgaggttctcgaaaccgccgctcctggggtggaggatatctcaggattacctagtggtgaagtgcttgaaactgcagcacccggtgtcgaggatattagcgggttaccatccggtgaggtcctggagacagctgcgccgggagtggaagatatttcagggctgccgtccggcgaagtcttagagactgccgcccccggtgtggaagacatctctgggcttccatccggagaagtactggaaactgcagctccaggagttgaagacatctccggactaccctctggggaagtcttagaaacagctgcccctggggttgaggatatcagcggtctgcctagcggcgaggtgctggagaccgcagcccccggagtagaggatatatctgggttaccatccggcgaagttttagagaccgccgcacctggcgtggaggatataagtggcctgcccagtggagaggttttagaaacaactgcaccaggcgtcgaagagataagcgggctgcctagcggggaggtgctggaaacgacagcaccaggcgtggacgaaatcagcggcttgcccagcggagaggtgttggagacaaccgcccctggcgtggaagagatttctggcttgccaagcggcgaagtacttgagaccagcacatctgccgtgggtgacctgtccgggttgccatcagggggggaggttttagagatatccgtttctggagtggaggacatcagcggtctgccctcaggtgaggttgtagaaacttccgcatctggcatagaagatgtgtccgaactaccctctggggaaggattagagactagcgcatcaggggttgaggatcttagtagactcccgtctggagaggaggttcttgagatttcggcaagcggttttggggatttgagtggcctgcctagcggaggagaaggactggagacatcagcaagcgaggtagggacagatctcagcggtctgccctctggccgagaggggcttgaaacgtccgcttctggcgccgaggatcttagtggcttgccatcaggcaaagaagatctggttggttctgcaagcggtgacctagacttgggtaaattaccgagcggaaccttaggttccgggcaggcccccgagacaagcggtctgcctagtggcttttctggggagtacagtggtgtggatctggggtccgggcccccatctggtctccccgattttagtggactgccatcgggctttcctacagtgtcattggtggacagtacactcgtcgaggtcgtcaccgctagcactgcctcagaactagaaggccgcggtaccatcggtatctccggtgcaggcgagatctctggtctcccctctagcgaactggacatctccggccgggcctctggactgccaagtggaaccgagttgtctggccaggcttccggatctccagacgtttccggagaaatacctggattattcggcgtttcagggcagccaagcggctttcccgataccagtggggagacctcaggggttaccgaactaagtggcctgtcgagcggacaaccggggattagcggggaggccagcggtgtgctttacggcaccagccaaccattcggcatcacggacttatcgggagaaacttctggcgtacccgacctgtctggacagccatcaggcctcccaggcttttcaggagcaactagcggagttcccgatctggtttcaggcactacgagcggaagcggtgaaagttctgggattaccttcgttgatacctctctcgtggaagtagccccaaccacctttaaggaggaagagggtttggggtcagtggaactctcaggcctaccctctggcgaagctgacctgtcaggcaagtctggaatggtggatgtgtcgggccagttcagtgggaccgtcgacagcagtggtttcacaagtcagactccagagttcagtgggttacccagtggaatcgctgaagtctccggtgaatcatctcgggctgaaattggctcatcccttccatccggtgcctactacggctccgggacgcctagtagctttccaactgtgtccctagtggatagaacccttgttgagtccgtcacccaggctcctacagcacaggaagccggagagggcccatccggcatcctcgaactgtctggcgctcattcgggcgcacccgacatgtccggcgagcactccggattcctggacctgtccggattgcagtctggactgatcgaaccctctggcgagcctcccggaactccgtactttagcggtgacttcgcctccacaacgaacgtgagtggagagagctccgtagcgatgggaacatcgggagaggccagcggcctgccagaagtaactctcattacgtccgagtttgtggagggcgtcacagagcccacgataagtcaggagctgggccagaggcctcccgtgacccacacaccccagctgtttgaatcaagtggaaaggtgtccaccgccggcgacatctctggcgccaccccagttctgcccggttcgggagttgaggtgagtagcgtcccagagagtagctccgagacgagtgcatacccagaggcaggtttcggtgcaagtgccgctcccgaggctagccgtgaggattcaggaagccctgatctgtccgagacgacttccgctttccacgaggccaacctcgaaaggtcctccggactgggggtcagtggtagtacgctgactttccaagaaggcgaggcatccgctgcaccagaagtaagcggcgaaagcaccactactagtgatgtgggaacggaggctcccggattgccaagcgctacaccgaccgcttctggggaccgcactgagatttccggcgacctctccggtcacaccagccagttaggagtggtaatcagtaccagcataccagagtcagaatggacacagcaaactcagaggccagcggagacccacctagaaatcgaaagtagctccctcctgtattccggtgaggaaacccacacagttgagaccgccacatcaccaaccgacgctagtatccctgccagtcccgagtggaagagggagtcagagtccacagcagccgcacccgctaggtcttgtgcggaggagccctgtggcgcgggtacttgtaaggaaaccgaggggcatgtcatctgtctgtgtccacccggctacactggagagcattgcaatatcgaccaggaggtgtgtgaagagggttggaataaatatcagggccattgctaccgccacttccctgacagagagacctgggtggacgccgagcggaggtgtagggaacagcagagccatctctcttctatcgtcacccccgaggaacaggagttcgtgaacaacaacgcccaggactatcagtggatcgggttgaatgataggaccattgagggcgactttcgatggtcagatggccatccgatgcagttcgagaattggagaccgaatcagcccgacaatttttttgccgccggagaggattgcgtggtcatgatttggcatgaaaaaggagaatggaacgacgtgccctgtaactaccatctgccttttacttgcaagaaaggaaccgtggcctgtggtgaacctccggtggtcgaacacgccagaacgttcggacagaaaaaggacagatacgagataaatagcttggtgagatatcagtgcaccgaaggatttgttcaacgccacatgcctacaatccgctgccagcctagtggccattgggaggagcctcagatcacgtgcaccgatcccaccacctacaaacggcgccttcagaaacgaagctcaagacatccacgccgctcccgtccgtctactgcgcactag

SEQ ID NO: 174999 - DNA, 7593 bp, Artificial Sequence
  derived and/or modified sequence
atgaccacactcctgtgggtattcgtgactttacgcgtcatcaccgctgctgtaaccgttgaaacctctgatcatgataactccttgagcgtgtcaattccccagccctcccccctcagagttctcctcgggacatccctgaccattccttgttacttcatcgatcctatgcatccagtgacgacggcccccagcacagcccccttggctccaaggatcaaatggagtagagttagcaaagagaaagaggtggtcctgcttgtagccactgagggcagagtgcgcgtcaattcagcttaccaggataaagtgtccctcccaaactatcccgctatcccttccgacgctaccctcgaggtgcagtccctccggtcaaatgatagcggtgtgtatcgatgcgaagtaatgcacgggatcgaggatagcgaagcaacattagaggttgtcgtgaaggggatagttttccactatcgggccatcagtacgcgttacacactagacttcgacagagcacagcgtgcttgcctgcagaacagtgccattattgccactccagagcaactgcaggccgcttacgaggatggttttcaccaatgtgacgccggatggctggctgaccagactgtacgttatcccattcacacaccacgggaggggtgctacggagacaaggacgaattccccggcgtccgtacctatggcattcgggacactaacgaaacttacgatgtgtactgctttgcagaggaaatggagggagaagtattttacgcgacttcccctgaaaaattcactttccaggaggccgccaacgagtgtagaagattaggagcgcgcctggcgactactggccagctatatctagcatggcaggcagggatggatatgtgcagcgctgggtggctggctgatagatcagtccgctatcctattagtaaggcccgtccaaactgtggcggaaacctcttgggggttcggactgtttatgtgcacgccaatcagactggctacccggatcctagcagtaggtatgatgcaatttgttacactggcgaagacttcgtcgatataccagaaaactttttcggcgtggggggagaggaggacatcaccgtgcagactgtcacttggcctgatatggaattgcccctgccaaggaatatcaccgagggagaagctcgaggaagcgtgatcttgacagtgaagcccatcttcgaggtgagtccctcccctttagaacctgaggagccgttcacgtttgctcccgaaatcggcgcaactgccttcgccgaagtggaaaacgaaaccggcgaggctaccaggccgtggggcttcccaactcccgggctggggccggccaccgccttcacatcagaggaccttgtggtgcaggttaccgccgtcccaggacagcctcatctgccaggcggagtggtctttcactaccgtccaggtcctaccaggtacagtcttacatttgaggaggcacagcaggcttgcctgcgaaccggagcagtgattgcttcaccagagcagctacaagccgcgtacgaggcaggctacgagcagtgtgatgccggatggctccgtgatcagactgtgcgctacccaatagtgtccccaagaactccatgtgtgggggataaagacagctcgcctggagtgcgaacatacggagttcgcccttctacggagacttatgacgtgtactgctttgttgatcgtttggaaggcgaagtgttctttgccacgcggctcgagcagttcactttccaggaagcacttgagttttgtgagtctcacaacgcaactctggcaacaactggccagctgtacgctgcgtggtctcgtggcctcgacaagtgttacgctggctggctcgccgacggatcactgcggtatccgattgttacacctcgcccggcttgcgggggcgataagcccggcgtgcgcacagtctatctctatcccaaccagacagggctcccggaccccctgagtcgacaccacgccttttgcttcaggggaatcagcgccgtgccttccccaggcgaggaagaggggggcacccccactagtcccagcggcgtcgaagagtggatcgtcactcaggtggttcccggggtggctgctgtgccggtggaagaagaaacgacagcggtgcccagcggggaaacaactgcaattcttgaattcaccaccgaacctgagaaccaaaccgagtgggagcccgcctacactcctgtgggaacttccccactcccaggtatcctgccaacctggcctccaacgggtgccgcaacggaagagagtaccgagggacctagcgctaccgaggtgccctcagccagcgaggaaccttctccctctgaggtcccttttccaagcgaggaacctagcccatcagaagaacccttcccatctgtgagacccttccccagtgtggaacttttcccctctgaggagccctttccttctaaagagccctccccatctgaggagccctcagcgagcgaagaaccctacactccgtcaccaccggtgccgagctggactgaactgccctcaagcggtgaggagtcgggagcaccggatgtgagcggggattttaccgggagcggggatgtgtcaggtcatctggacttcagcggccagctcagtggagatcgcgctagtggcctgccttccggagacctggatagcagtggactcacctctacagtcggctcagggctgcccgtagagtcaggattacctagtggtgacgaggagaggattgaatggcctagtacccctacagtgggcgagctgccctccggcgccgaaatccttgagggatccgcctccggagtgggcgacctgtcaggcctgccttctggagaggtgctcgagacgtctgccagcggagtcggtgatttgagtggactaccctccggagaggttctggagacaaccgcacctggcgtagaggacataagtggtctgccgagcggcgaagtgctggaaacaactgctccaggcgtggaagacataagcgggctgccttcaggggaggtcctggaaacaactgctccaggagttgaagatattagcgggctgccctcgggcgaggtattggagaccacagctccgggggtcgaagacatatcaggactgccatctggtgaggtcttagagaccactgccccaggtgtagaagacatcagcgggctccctagcggagaagtgctggaaacaaccgccccaggtgtcgaggacatcagcggcctgccttctggtgaagtgctagagaccgctgcccctggagtggaagatatctccggcttgcctagtggggaagtcctagagacggctgcccccggtgttgaggatatttctggactaccttctggcgaggtactggaaacagccgcgccgggggtcgaggacatctctggtttaccatctggggaggtgctcgagactgccgcgccaggtgtggaggacatctcaggtctcccttcaggcgaggtgttggagacggccgcccctggtgtggaggatatcagtggcctgcctagcggcgaagtattggagactgcggcccctggggtggaagacatatccggactgccatccggtgaggtgctcgagacagcagcccctggagttgaagatatatcagggctgccatccggggaagtcttggagactgcggctcccggcgtcgaagacattagcggtctgcccagcggtgaggtactggagaccgccgcccctggcgtggaagacatctcaggattaccttccggcgaggttctggagacagctgcacccggtgtagaagacatttccggcctccctagtggtgaggtcctcgagactgcagctcccggcgtcgaagatatctctggactaccctccggtgaggtgttggagaccgctgcccctggcgtagaagatatctcaggactgccatccggcgaagtcctggagaccgctgctccgggcgtggaagatatctccggtctcccctccggagaagtgctagagacggctgccccaggcgtggaggatatttcaggcctgccctcaggtgaagtcttggagaccgccgcacctggcgtggaagatatcagcgggctgccctccggagaagtgctggaaaccgcggcgcccggggtggaggacatttctgggctcccatctggagaagtgctcgagacgaccgcgcctggagtggaagagatctccggactgccatcgggcgaggtattggagactacagcacccggagtagacgagattagtggcctgccctcaggggaagttctagagaccacagcccctggggttgaagagatctccggcttaccctccggtgaggtccttgagacaagcactagcgccgttggcgatctgtctggtctgccgagcggcggagaagttcttgagataagtgtctctggtgtcgaagacatcagtggtctgccatctggagaagttgttgagacctccgccagcggaattgaggatgtgagcgaactcccatctggagaggggttagagaccagtgcaagcggagtggaagacttatcacgcttacccagcggtgaggaagtcctggaaataagcgcaagtgggttcggagacctatcaggtttgccctccgggggggaaggcttggagacttctgcatccgaggttgggacggatctctctggacttccctccggaagagaaggtctagaaacatctgcgtccggtgcggaggacttgagtggtctgcccagcggcaaagaggatttggtgggcagcgcgagtggcgatctcgatctcgggaagctcccttccggcacattgggaagcgggcaggcacccgagactagtggcctcccttccgggttttcaggcgaatactccggtgtggatctgggatcagggccacccagcggattaccagacttcagtgggcttccatcgggttttcccacagtgagccttgtggacagcaccctggtcgaggttgtgaccgcctctaccgcttctgaactggagggacgcggcacaatcgggataagcggggccggcgaaatttccggactgccatcctccgagcttgatatctcgggacgcgcttccggactcccatctggcaccgagctttccggtcaagcgagcggcagtcctgacgtcagtggagaaattcccggcctctttggtgtaagcgggcagccctcaggatttcctgacactagtggagaaacctcaggagtaacggagctatcaggtttgtctagcggacaacccgggatctctggggaagcaagcggagtgttgtacgggacaagccagcctttcgggatcacagacttgtctggcgaaacaagtggggttcccgacctatctgggcaaccttctggcttaccaggcttctctggcgctacgagtggtgtacctgatctcgtttccggcacaacctccgggtcaggtgagtcatccggaattaccttcgttgacaccagcttggtagaggtggcaccgactacttttaaggaagaggaaggtctcggttcagtagagctctccggacttccgagcggcgaagccgacctttcaggaaaaagtggcatggtcgacgtgtccggtcaatttagtggtactgtcgacagcagcggttttacttcccagacccctgaattcagcggactgccctctgggattgccgaggtgagcggggaaagcagtcgggcggaaatcggttcttctcttcctagcggagcgtattacgggtcggggaccccttcctcttttccgaccgtgtctcttgtggatagaaccctcgtggaaagcgttacccaagccccgactgcccaggaagccggcgagggcccttcaggcatcctggaactctctggagcccatagtggggcaccagatatgagcggcgaacattctgggttcctcgacttgtcgggccttcaatcagggctgatcgagccttccggcgagccacctggaactccctatttctccggggactttgccagcaccactaatgtgagcggggaaagctcggttgctatgggcacttcaggcgaagcctcagggctaccagaggtgacattaatcaccagcgagttcgtcgaaggagtgactgaaccaaccatcagccaggaactggggcagcgaccaccggtgactcataccccacaacttttcgagtccagtggaaaggtaagcacagcaggtgatattagcggcgccacaccagtgcttccaggcagcggcgtcgaagtgtctagcgttcccgagagtagctcagagacaagcgcatacccagaagcagggtttggggccagcgcagctcccgaagcctctcgtgaggacagcggatccccagatctctccgaaacaacatctgcctttcatgaagcaaacctggagagatccagcggactcggggtgtcaggcagcactctgacattccaggaaggtgaagcctctgcagcccctgaggtttcgggcgagtccactacgacttcagacgtaggcacagaggccccaggtttgcccagtgccacccccaccgcctccggggaccgcacagagatctcaggagatctgtcgggacacacctcccaactgggcgtcgtcataagtaccagcattccggagtccgaatggactcagcagacccagcggcccgcagaaacccatttagagatcgagagctcaagtctgctatattcaggcgaggagacacacactgtggagactgcaacgagccctaccgacgcttctatccctgcatctccagagtggaaaagagaaagtgagtcaacagcagcagcccctgcaagatcatgcgcagaggagccctgcggtgctggcacctgcaaggagaccgaaggccacgtgatttgtctctgccctcctggttacactggcgagcattgcaatatcgaccaggaagtttgcgaagagggctggaataaatatcaaggccactgctatcggcactttccggatcgtgagacttgggtcgacgccgagcgtcgatgtagagagcagcagtcgcacctttctagcatagtgacccccgaagagcaggagtttgtaaataataacgcccaggattaccaatggatcggactgaacgataggacgatcgagggggacttccggtggagcgatgggcaccccatgcagtttgagaattggcggccaaaccaaccggataacttttttgccgcgggagaggattgcgtggtgatgatttggcacgagaaaggagagtggaacgacgtcccatgtaattaccatctgccatttacttgtaagaagggaactgtcgcatgtggcgaaccgccagtcgttgagcacgcgaggacttttggacaaaagaaggatcggtatgagatcaactccttagtcagataccagtgtacagaggggttcgtgcagaggcatatgcccactattagatgccagccgagcggtcattgggaagagccacagatcacttgtacagacccaaccacttacaaacggcgtctacagaagcgttcctcgcgacacccgaggcgatcccgtccaagtacagcccactag

SEQ ID NO: 175000 - DNA, 7251 bp, Artificial Sequence
  derived and/or modified sequence
atgacaacactgttgtgggttttcgttacactgcgggtgataaccgcggccgttaccgtagaaacttccgatcacgacaactcactgtccgtttcaattccccagcccagccccctacgcgttctgctgggaacatcccttacaatcccttgctacttcattgatcctatgcaccccgtaacaactgcccctagtaccgcccccctggctccacggatcaaatggtccagggtgtccaaagaaaaagaggttgtgttgctggtagcgacagagggtagggtcagagtgaacagcgcttaccaggacaaagtgtccctacctaactaccctgccatcccttcagatgccacactcgaagtacagtctctgcgttccaatgattcgggtgtgtaccgttgtgaagtgatgcatgggatcgaagactctgaagcaactcttgaagtggtcgtcaagggaatcgtcttccactacagagccattagcacccgatatacgttggacttcgatagggcccagagagcctgcctacaaaattccgcaatcatcgctacgccagaacagcttcaggctgcctacgaagacggattccaccagtgtgatgcaggatggctcgctgaccagactgtaaggtacccgattcacacgcctagagaaggctgctacggtgacaaagatgaattccctggagttcggacctacggtatccgcgacacaaacgagacttatgacgtgtattgtttcgccgaggaaatggaaggtgaagtattctacgcgacgtcgcctgagaagtttacctttcaggaagccgccaacgaatgccgaaggctcggcgcccgattggcaacgaccggccaattatacttagcctggcaagctggtatggatatgtgtagcgccggatggctcgcggaccgctctgtgcgctatcccatatcgaaagccagacctaattgcggcggaaacctcttgggagtacggacagtatacgtgcacgctaaccagactggatacccagaccccagctcgcgatacgacgctatctgctatacgggagaagattttgtggacattcctgaaaacttttttggagtcgggggcgaggaagatataaccgtccagaccgttacttggcctgacatggagctcccgctacctagaaatatcacagagggcgaggccaggggctctgtaatattgaccgttaaacccatattcgaggtcagtccctccccactagagcctgaggagcccttcacattcgctcccgaaatcggcgcgaccgcattcgctgaagttgaaaacgagaccggagaagcgacccgcccatggggctttcccacccctggcttaggtcccgctacggcttttacatcagaagacttagtggttcaagtgacagcggtaccagggcagccacatcttccaggtggagtggtattccactacagaccaggtccaaccaggtattcattaaccttcgaggaggcccagcaggcctgtctgcgtactggggcagtaattgcatctcctgaacaactccaggccgcttatgaggcaggttacgaacagtgtgatgcaggctggctgcgagatcagacagtgcggtacccaatcgtgtcaccccgtaccccctgtgtaggcgataaagattcgtctcctggtgttcgcacctacggcgttcggcctagcactgaaacttatgatgtgtattgcttcgtcgaccgtcttgagggagaggttttctttgctacccggcttgagcagttcacattccaggaagcccttgagttctgcgagtctcacaacgccaccttagccacaacagggcagctctatgctgcatggtcaagaggcctcgataaatgctatgccggatggctggcggatggaagtttaaggtatccaatagttaccccccgccccgcatgtgggggcgataagcccggcgtgcgtaccgtgtatctgtacccaaatcaaactggtctgccagatcccttatctaggcaccacgcgttttgctttcggggtatcagtgctgtaccctcaccaggtgaagaagaaggcggaactcctacctcaccctcaggcgtggaagagtggattgtaactcaagtagtgcctggagtcgcagctgtccccgtagaagaggaaactacggctgtcccttccggagagacgacagctattctggaatttacaacggaaccagaaaatcagactgaatgggaacccgcttatacgccggttggaacatcaccactgccagggattctcccgacttggccacctacaggagccgccactgaggaaagcaccgagggtccatctgccaccgaagtgccttctgcctctgaggagcccagcccgtccgaagtccccttccctagcgaagagccctcaccatcggaggagccatttccttctgtacgcccctttcctagcgtagaactgtttccaagtgaagaaccctttccttcaaaggagccctctccatccgaagaacctagcgcctcagaggagccctatacaccgtccccacccgttccaagttggaccgagctgccctcatctggtgaagaaagcggtgcccctgatgtgagtggtgatttcactggtagcggggacgttagcggacatcttgacttctccggccagctgtcaggcgacagagcttccggtttaccgagtggtgatctcgattccagcggtctgacatccacggtggggagcggtcttccagtggaaagtggacttccttccggcgacgaggaacgcatcgaatggccctctacacccacagtgggggagctcccctcaggggctgaaattttggaaggatctgcatcaggagtaggggatctgtcgggtctgccatcaggtgaggttttggagacatctgcgtcgggcgtgggtgatttaagtggcctgccaagcggagaagtgctggagactaccgcacccggtgtggaagatatttcaggattgccttccggggaagtgctcgaaaccactgctcctggcgtcgaagacatatccggcttacctagtggagaagttctggaaacaacagcccccggggttgaagacatttctggcctccctagcggggaggtccttgaaaccactgcacctggggttgaagatatatctggcctcccttccggcgaagtgcttgagaccactgcaccgggagttgaagacattagcggccttccttccggcgaagtcctggagactgcagcgccgggcgtagaggacataagtggattgccaagcggcgaggtccttgaaaccgcagctccaggcgtagaggatatatccggactcccgtctggagaggtactggagaccgctgccccaggggtggaagatattagtggcttgccctccggagaagttctggaaaccgcggctccaggcgtggaggatatatccggactaccaagcggtgaggtgctggaaacagccgctccgggcgtggaggacattagtggtctgccatcaggagaggtgctagagactgcagccccaggagtggaggacatatcagggttacccagtggtgaagtcttagagaccgctgctccgggtgtggaagacatctcaggtctgccttctggggaggtgctcgaaacggcggcccccggagtcgaagatatctccggattgcccagtggagaagtattggaaacggcggcacccggcgtggaggatataagcggtctcccgtctggagaagtgctagaaacggccgcccctggagttgaagacatatccggccttccaagcggcgaggttcttgagaccgctgcccccggcgtagaggatatcagtggcctgccttcaggagaggtgctagaaactactgctccaggagttgaagagataagtggacttccctctggagaagttcttgagaccacagcaccaggcgtagacgagatttccggcctgccaagcggggaggtgttagagacaactgctcctggagtggaagagatctctgggttaccctcaggagaggttctcgagacgtcgacatcagctgtgggagacttatcagggctaccttccgggggagaagttctcgaaatctctgtgtctggagttgaagatatctctggactgccatccggcgaggtggtggaaacaagcgcgtcgggaatcgaggacgtgtctgaactgcccagtggagaaggactggagacttcagccagcggtgttgaagatttatcgaggctccctagcggtgaagaagtgttggagatttctgcatcagggtttggcgatttgtcagggcttccttcgggcggagaaggcttggaaacctcggcatccgaggttggaacagacctctcaggcttaccctccggtagagagggacttgagacgtccgcgagcggagcggaagacctcagcggacttccttctgggaaagaggacttagtagggagcgccagcggggatctggacctaggaaaactgccatccgggacactgggttcaggccaggctcctgaaacatccggcctcccatctggctttagcggcgaatatagtggagtggacctcggaagcggaccccccagcggactgcctgatttctctggtctacccagcgggttcccaaccgtttcactagtagacagtacactcgtcgaagtggtcacagcaagcacagcaagtgagctcgagggcagaggaactattgggatttcaggcgccggggagatcagcggactgccatcgagcgagttagacatatctggaagagcatccgggctgccttcggggacagagttatccggccaggcctccggcagtcccgacgtcagtggagagattcccggtctgtttggagtgagcggccagccatcaggattccctgacactagcggtgaaacatcaggcgtaactgagctctccggacttagcagtgggcagccaggtattagcggcgaggcatcaggcgtcctgtatggcacctcccagcctttcggaatcacagatctgtctggagaaacatcgggcgtgcccgacctgtctgggcaaccgtcagggctcccaggattcagtggagccacgtcaggcgtacctgacctcgtgtccggcacaacatcagggtcaggggaaagcagtggcatcacctttgtcgatacgtctttagtggaagtggcaccgacaacatttaaagaggaggagggactcgggtctgtggagttatcaggtctgcctagcggcgaagctgatctcagcggcaagagtggaatggtggatgtgagcggtcagttttctgggaccgtggattcctctggcttcactagccaaacccctgaattcagcggtttaccctcaggaatcgcagaagtgagcggcgaaagttctagggctgagattgggtcctcacttcctagcggggcctactacgggagcggtaccccatcctcattccccaccgtttcacttgtcgacaggactctcgtggagagtgttacccaagcgcccactgctcaagaagccggggaaggtccctctggtatcctcgagctgtcaggagcacactccggagccccagatatgagcggcgaacactcgggcttcttagacctgagcggtctgcagtcaggcctgatcgaaccctcgggcgaacctcccggaacaccttatttctctggcgattttgctagcactacaaacgtgtcgggcgaatcctcagtggcaatgggaaccagtggggaagcctcaggtctgcctgaagttacattgatcacaagtgaatttgtggaaggcgtcacggagcctacaataagccaggagctcggccagcgccctcctgtgacccatacccctcagttattcgaaagctccgggaaagtgtcaacagcaggcgacatctcaggcgccaccccagtcctccctggaagcggagtcgaagtcagtagcgtccctgaatccagctcagagaccagtgcttatcccgaagcaggattcggtgctagcgctgccccagaggcatcccgggaagacagcggatcccctgatctgtcagaaacaacttctgcttttcatgaagctaatctcgagcgtagcagcggactgggggtgagtggcagcaccctcacttttcaagagggagaagcaagcgcagctccggaagtctctggagagtccacgacaacctctgatgtgggcacagaagcacccggcctgcctagcgctaccccgactgcctccggcgacaggaccgagatatctggagatttaagcggccacacctcccaactcggagtggtaatctcaaccagcatcccggagagtgagtggacccagcaaacacagcggcctgccgaaacacacctcgagatcgaatcatcttcattactttatagtggcgaggagacccatacagtggaaaccgctactagtccgaccgacgcttccatccccgccagcccggaatggaaaagagagtccgaatccaccgccgccgcccccgccagatcttgcgcggaagagccttgcggcgctggtacctgcaaggagactgaaggccacgtcatatgtttatgcccccctggttatacgggagaacactgtaatatagaccaagaagtgtgcgaggagggatggaataaataccagggacattgttaccgacactttcctgaccgcgagacgtgggtggacgccgagagacgatgcagggaacagcagagccacctaagcagtatagtgacaccggaggagcaggagtttgtgaacaataacgcgcaagactaccagtggattgggctgaacgatcgaacgattgagggggactttaggtggagtgatggccatcccatgcaatttgagaattggagacctaaccaacctgacaatttcttcgccgccggcgaggactgcgtggtgatgatttggcacgagaagggggagtggaacgacgtcccgtgtaattaccatttgccatttacatgcaagaaaggaaccgtcgcttgtggtgagccccccgttgtggagcacgcgcggacatttggacaaaagaaagatcgctacgaaatcaatagcctggtacgttaccagtgtacagagggattcgtacagcgccacatgccaacaattcgatgtcagccatccggacattgggaggaacctcagatcacttgtacagaccctaccacatacaaaagacgccttcaaaaacgaagctctagacatccacgacgctcccgacctagcaccgcacactag

SEQ ID NO: 175001 - DNA, 7593 bp, Artificial Sequence
  derived and/or modified sequence
atgactaccttactctgggtcttcgttacacttcgggtgatcaccgcagctgtgactgtcgaaacatccgaccatgacaatagtttgtctgtttccattcctcagccttcccccctccgagttctccttggaacgtctctgacaatcccctgctatttcatagatccgatgcacccggtgactactgctccttccactgctcccttagccccccgcatcaagtggtccagagtctctaaggaaaaggaagtggtactgctcgtggctaccgagggacgagttcgcgtaaatagtgcataccaagataaagtgagtctccccaattacccagctatcccctccgacgccaccttagaagtgcagagcctgaggagtaatgacagcggggtgtatagatgcgaggtcatgcatgggattgaagacagcgaagcaactttggaagtggttgtaaagggaattgtgtttcactatagggccatctctactagatacacactggattttgatagagctcaacgcgcatgcctgcagaatagcgctatcatcgccacccctgaacagcttcaggcagcatatgaagacgggtttcaccagtgtgacgcaggttggctcgccgatcaaaccgtcaggtaccctatacataccccaagagagggatgctatggcgataaggatgaatttcccggagttcggacctacgggattagagatacaaacgagacatacgacgtgtactgcttcgcagaagagatggagggggaggtgttttacgctacctcacctgagaaatttactttccaggaggccgccaatgaatgtagaaggctcggtgctcgcctcgccacaaccgggcagctctatttagcttggcaggcaggtatggacatgtgtagcgcaggatggcttgccgatagatctgttcgatatcccatttcgaaagcaagaccaaactgtggcggaaaccttttgggagtgcgcacagtgtacgtgcacgctaaccagaccggctaccctgacccatctagtaggtatgacgctatttgttatactggcgaagactttgtggatattcctgagaacttctttggtgttggtggagaggaagatattaccgttcaaaccgtgacgtggccagacatggagcttcccttacctaggaatattaccgagggcgaagctaggggttcagtgatcctgacagtcaagccgatcttcgaagtgagtccaagccctttggagccagaagagccttttacatttgccccagagatcggtgctacagcatttgcggaggttgaaaacgaaacaggagaggctacccggccatgggggttccccacaccgggactgggtccagccaccgcctttacatcagaggatcttgtcgtgcaagttacagccgttcctggtcagccacacctgcctggcggcgtagtcttccattatagacccggccctacgcgttattcactgacttttgaagaggcccagcaggcatgtttacgaacaggagccgtgattgcttctcctgagcaactgcaggcagcatacgaagctgggtatgaacagtgtgacgctggatggctgcgtgatcaaactgttaggtaccctattgtaagtccccggactccatgtgtgggcgacaaggacagtagccccggcgtgcgaacctacggagtgagaccttctactgagacctatgatgtctattgctttgttgatagattagaaggagaggttttcttcgctacgagactcgagcagttcacattccaggaagccctagaattttgcgaaagtcataatgcaactctagccactactggacaactgtacgccgcatggtctagaggccttgacaaatgctacgccggatggctagcagatggctccctcagatatcccatcgtgacacctaggccagcctgcggcggcgacaaacctggtgtgcgtaccgtttacctgtaccccaatcagactggcctcccagaccccttatctcggcatcacgcattctgtttccgaggaattagcgccgtcccatctccaggtgaagaagagggggggactccaacctccccgagtggggtcgaagagtggatcgttacacaagtagtcccaggcgtggctgctgtgccagtcgaggaggagactactgctgtacccagcggcgagaccaccgctatattagaatttacaaccgagcctgaaaatcagacagagtgggaacccgcatatacccccgtcgggacttctccactacctggtatcttgcctacctggcctcctacaggcgccgccaccgaggaaagcactgaaggaccctcggctactgaagtaccgagtgcctctgaagaaccatctccctctgaagtgccctttccttccgaagaacctagcccttctgaagaacccttcccgagcgtccgcccattcccaagtgtcgagctctttcctagcgaggagccattcccctccaaggagccatcgcctagtgaggaaccaagtgccagcgaggagccttacaccccttccccccccgtgccatcttggacagaactgccctctagcggagaagaaagtggcgccccagacgtcagtggagattttaccggctctggtgatgtgtcaggtcaccttgattttagcggtcagttatctggcgatcgcgcctccggattgccgtctggcgatctagatagcagcgggctgacttccaccgtgggttcaggcctcccagtggaatccggccttccaagtggcgatgaggaacgcattgaatggcctagtactcccaccgtcggggagcttccgtcaggcgccgagatactggaagggtccgcctcaggagttggagatttgtctggattgccttcgggcgaggtgctggagacctctgcaagcggtgttggagatctcagtggtctgcctagtggggaagttttagagactacagcacccggcgtggaagatatttctgggttgccgtccggcgaggtgctagagactaccgctcctggagtcgaagatataagcggactgccctccggagaagtgttggagaccaccgccccaggcgtcgaagacattagtggactgccctcaggtgaagtgctagaaactaccgctcccggtgtcgaggacatatctgggctcccctcaggcgaagtgctggaaaccaccgcgcctggagtggaagacatatccggcctgcctagcggagaagtactagaaactactgccccaggggtcgaggacatctcggggcttccatctggagaggtactggagacggctgcccccggtgttgaggacatttccggactacccagcggagaagtgttagagacagcagcccccggtgtggaggatatttccgggcttccttcaggagaggtgctggaaaccgcggcccccggggtggaagacatatccggcttgcccagcggagaggttctggaaacagctgcccctggcgtggaagatatttctggcctccccagcggtgaagttctcgagacagctgcacctggggtggaggatatcagtgggttaccatctggcgaggtgcttgaaactgccgcacctggcgtggaggacattagcggactaccctcaggcgaagttttggaaaccgccgcaccaggtgttgaagatatcagcgggctaccgtcaggagaggttttggagactgcagccccaggcgtggaggacattagcgggctgccgtcaggcgaagtcctggagactgcagcacccggagttgaagatatctcgggtctgccttctggcgaagtattagagaccgccgcacccggagtagaggacatctccggcctgccatcaggggaggtgctggaaactgcagccccgggcgtggaagacatcagcggactgcctagtggtgaagtcctcgagacggcagctcctggcgtagaggacatctcagggctaccctcaggggaagtactagaaactgctgcacctggcgtcgaagacatctccggtttgccttccggtgaggtgcttgaaactgccgcaccaggcgtcgaggacatttctggcctgcccagcggtgaagttctggagacagcagcacctggggttgaagatatatccggcttaccttccggcgaagtattggaaacagccgccccaggagtggaagacataagcggactgccaagcggagaagtgctcgagactaccgcgcccggcgttgaagaaatatctggcctgccttccggtgaagttttagaaactactgctcctggcgtggacgagatttcaggcctccctagcggcgaggttctagagacgactgcacccggcgttgaagagatcagtggtctgccctctggtgaggttctagaaacgtctacatccgctgtcggcgatctaagtgggctcccgagcggcggagaggtgttggaaatcagcgtctcgggagtggaagacattagcggattgccgtcaggagaggtggttgagacttccgcatctggcatagaagatgtgtccgaactaccctctggggaaggattagagactagcgcatcaggggttgaggatcttagtagactcccgtctggagaggaggttcttgagatttcggcaagcggttttggggatttgagtggcctgcctagcggaggagaaggactggagacatcagcaagcgaggtagggacagatctcagcggtctgccctctggccgagaggggcttgaaacgtccgcttctggcgccgaggatcttagtggcttgccatcaggcaaagaagatctggttggttctgcatccggcgatctggacttaggcaagctccccagcggaaccctcggcagtggccaggcccctgagacatccgggcttccatccggtttctccggcgagtacagcggcgttgacctgggatccggccccccttccgggcttcctgacttctctggactcccatccggctttccaaccgtcagcctggtagacagtaccctggtggaagttgtcaccgcctcgaccgcttctgagctggaaggaagaggtactatcgggatatcaggcgccggtgaaatcagcgggctcccatcttccgaactagacatctccggccgggcctctggactgccaagtggaaccgagttgtctggccaggcttccggatctccagacgtttccggagaaatacctggattattcggcgtttcagggcagccaagcggctttcccgataccagtggggagacctcaggggttaccgaactaagtggcctgtcgagcggacaaccggggattagcggggaggccagcggtgtgctttacggcaccagccaaccattcggcatcacggacttatcgggagaaacttctggcgtacccgacctgtctggacagccatcaggactgcccggcttttctggagcaacgtccggcgtacccgatctggtctctggtactacatccgggtctggcgagagttcaggcattactttcgttgacacctcactagttgaagtagctcctacgacgtttaaagaggaggaaggcttgggctctgttgagttgtctggtctgccaagtggtgaagccgatctgagtggaaaatctggcatggtggacgtgagtggacagtttagcgggactgttgactcctccggcttcacaagccaaactcccgagttctctggcctgccttctggcattgccgaggtatcaggtgagagttcgagggctgagattgggagctccctgccgagcggagcctactatggtagcggcactccgtcttccttccccacggtcagtctagttgataggacactcgttgaatcggtgacacaagcccctaccgctcaggaggccggagaggggccaagtgggatactggaattaagtggagctcacagcggagcaccagacatgagtggagagcattccgggtttttagatctctcaggattgcaaagcgggttgatcgagcccagtggagagcccccagggactccttattttagcggcgattttgccagtaccacaaacgtctcgggagagtctagcgttgcaatggggacatcaggcgaggcaagtgggttgcccgaagttaccttgatcacatccgagtttgtagaaggtgtgaccgagccaaccatttcacaggagttgggccagcgtcctcccgttactcacacaccccagctctttgagtcatccggaaaagtcagcacagcgggtgacatttctggcgctaccccagtcttaccaggcagcggtgtcgaggtgagctcagtacctgagagtagcagcgaaacgagcgcctaccctgaggccggcttcggagcgtctgcagcccccgaagcttcacgagaagattccggcagtcccgacctgagcgagacaaccagcgcttttcatgaggcaaacctggaacgaagcagcggacttggcgtgtcaggtagtacgttaacctttcaagaaggtgaagcaagtgctgctcccgaggtaagcggagagagcacgacaacctctgatgtgggtacagaagcccccgggctgccatccgccactcctactgcctctggagatcgaaccgagattagcggtgacctgtcaggacatacttcccaactgggggtagtcatatccacctctatccccgaatcagaatggacacaacagacgcagagaccggccgagacacaccttgagatcgaatctagttccctgctgtactccggtgaggagacccatacagttgagacagctacctccccaaccgatgcctccattccagcttcacccgagtggaagcgcgagagtgaaagtaccgctgctgccccggccagaagctgtgccgaagaaccctgtggagccggaacctgcaaggaaaccgaaggacatgtgatctgcttgtgtccgcccggttataccggcgaacattgcaatatcgaccaagaagtatgtgaagaaggctggaacaaataccagggacactgctacagacatttccccgatagagaaacatgggtcgacgcagagcgacggtgtcgcgaacagcagtcacacctgtctagcattgtcaccccagaggaacaggaattcgtgaataacaacgcccaggattaccagtggattggtctcaacgatcggacaatagaaggcgatttcaggtggtctgatggccatccaatgcagttcgaaaactggagaccgaatcagcccgacaatttttttgccgccggagaggattgcgtggtcatgatttggcatgaaaaaggagaatggaacgacgtgccctgtaactaccatctgccttttacttgcaagaaaggaaccgtggcctgtggtgaacctccggtggtcgaacacgccagaacgttcggacagaaaaaggacagatacgagataaatagcttggtgagatatcagtgcaccgaaggatttgttcaacgccacatgcctacaatccgctgccagcctagtggccattgggaggagcctcagataacatgcacagatccaactacatacaaaaggaggctacaaaaaagatccagtcgacatcctcgcagaagccgccctagtaccgcccattag

SEQ ID NO: 175002 - DNA, 7593 bp, Artificial Sequence
  derived and/or modified sequence
atgacaaccctcctgtgggtgtttgtaactctaagagtcatcactgccgcagttacagtcgagacttctgaccatgacaattccttatctgtgtccattccacagccttctccactccgtgttcttctgggaacaagcctgaccatcccctgttatttcatcgatccaatgcatccagtcactacagctccatctacagctcccttagccccacgtatcaaatggtcacgagttagcaaggaaaaggaagtggtgttactggtagctaccgaagggcgcgtccgggtcaattcagcctatcaggacaaggtctctctccccaactatcccgctataccttctgatgcgaccctcgaggtacaatctctgcgttcaaacgacagcggggtgtatagatgtgaagtcatgcacggtatcgaagatagtgaagcgacgcttgaagtagtggttaaggggatcgtcttccactaccgcgctattagcaccagatatacattggactttgatagggcccagcgcgcatgcttacagaattccgcgatcatcgccacacctgaacagctgcaggcagcctacgaggacggattccaccagtgtgacgctggatggctagctgaccagacagtccgctaccctatacacactccacgagagggttgttatggtgacaaagatgagttcccaggagtgaggacttacggtatcagagatacgaacgaaacctacgatgtctactgctttgctgaagaaatggaaggcgaggtgttttatgctaccagccccgagaaattcactttccaggaggccgcgaatgagtgtaggagacttggcgcgaggttagctactactggtcaattgtacctcgcttggcaggcaggcatggacatgtgctcagcaggttggcttgccgacagatccgtccgatacccaattagcaaggctaggccaaactgtggcggcaatcttctgggcgtgaggaccgtttacgtgcacgcgaaccaaaccggctacccagacccttcaagcagatacgacgctatctgctatacgggagaggatttcgtggacatacccgagaatttcttcggcgtcggcggagaggaagacattacagtgcagaccgtcacttggcctgacatggaactgcccctgcctcggaacattacagaaggagaagcgcgcggctcagtaattctcaccgtcaaacccatcttcgaagttagtccatctcccctcgagccagaagaaccctttaccttcgctcctgaaataggcgctacagccttcgcggaggtcgaaaatgaaaccggcgaagctaccagaccttggggattcccaaccccaggcttgggcccggccacagcattcacatcggaggacttggtagtgcaagtaaccgccgtccctgggcagccacacctcccggggggagttgtctttcactatagacctggtcctacacgctatagcttaacctttgaggaggctcaacaagcatgtttgcggacgggagccgtgattgcttcccctgaacagcttcaggctgcatacgaagcagggtatgaacagtgcgatgcaggatggctcagagatcaaacagtcagatatcccatcgtatcccctcgaacaccttgtgtaggtgacaaagattcatcccccggagtgagaacctatggcgtgagacctagcacggaaacctacgatgtctactgctttgtcgatcggctggaaggagaagtcttttttgctaccaggttagaacaatttacattccaagaggccctggagttttgtgaatcacacaatgccacattggctacaacgggccaactatacgccgcatggtcaagaggactggacaaatgctatgctggatggcttgcagacgggagccttcgctatcccatcgtgactcctaggcctgcgtgcggcggtgataagccaggcgttagaaccgtttatctgtacccaaatcagactggcctgcctgatcccctgtcaagacatcacgcattctgctttcgtgggatatcggcagtaccatcaccaggtgaagaagagggaggcacaccaacatctccaagcggtgtggaggaatggattgtaacccaggtggtcccaggcgtcgccgctgttcctgtggaagaggagaccactgccgtaccttctggagagacaaccgcaatcctggagtttaccacggagcccgagaaccagactgaatgggaacccgcttatacacccgtcggaacatcccccctccccgggatattgcctacatggcctccgaccggagcagccacagaagagagtacggagggaccttctgcaacagaggtacccagcgcatccgaagagccttccccctccgaagtccccttccccagtgaagaacctagcccatctgaagaaccttttccctctgtgagacccttcccttcagtagaactctttccatccgaggaacccttcccctcgaaggaaccatccccctccgaagagccctcagcatctgaggagccttacacaccttcccccccagtgccaagttggaccgagctgccatcttcaggcgaagagtccggggctcctgatgttagtggggatttcacaggttcaggcgatgtcagcggacacctagatttctctggacagctgagcggtgatcgcgcttcaggtctgccgtccggcgatctcgacagcagtggactcacctctacagtcggctcagggctgcccgtagagtcaggattacctagtggtgacgaggagaggattgaatggcctagtacccctacagtgggcgagctgccctccggcgccgaaatccttgagggatccgcctccggagtgggcgacctgtcaggcctgccttctggagaggtgctcgagacgtctgccagcggagtcggtgatttgagtggactaccctccggagaggttctggagacaaccgcacctggcgtagaggacataagtggtctgccgagcggcgaagtgcttgagactaccgctccaggagtcgaagacatctcaggtctcccttccggggaagttctggagacaacagctcccggggtggaggacattagtgggcttccgtcaggggaagtgctcgaaacgactgcacctggtgtggaggacatatccggtctgcccagcggagaggtactggaaaccaccgcacccggcgtggaagatataagcggactgcccagcggagaggtactagagactaccgcccccggcgtcgaggacattagtggcttgccctctggcgaagttcttgagactgccgcacccggcgtagaagatatcagtggactgccctccggcgaagtgctagaaaccgcagctcccggcgtcgaagacatctcgggactaccgtcgggagaggtgctcgaaacagctgcacccggagtggaagatatatccgggttgccttctggcgaagttcttgagaccgcagcaccgggagttgaggatatatccggcctgccatctggtgaggtcttggagactgctgcccccggggtggaagacatctctggcctgccctcaggagaagttttagagaccgcagccccaggggttgaagacatctcaggcctgccatccggggaggtcctggaaaccgctgcccctggcgtcgaagacatcagcgggctacccagtggagaagtgctagagacagctgccccaggagtggaggacatctcaggtctgccatccggtgaagtgttagaaactgcagctccaggcgtggaggacataagtggtctgccttcaggcgaagtattggagaccgctgcccctggggttgaggacatcagtgggttgccatcaggagaggtgctcgagaccgctgcgcccggtgtggaagatatctctggattgccctcgggggaggtgctggaaaccgctgccccgggcgtggaagacatcagcggattgccatcgggtgaggtcctggaaacagctgccccaggcgttgaggacatttcaggacttccgagtggtgaggtattagaaacagcggctccaggcgtggaagatatttccggtctgccctccggagaagtccttgaaacagcggctcctggagtggaagatatatcggggttgccaagcggagaagtccttgagacggcagctcccggcgttgaagacatatcaggcctgcctagcggtgaggtgttagaaaccacagcacccggcgtggaagagatctccggtttgccctccggagaggtgttagagacaaccgcacccggtgtggacgagatttccggactcccatccggtgaggtccttgaaacaaccgccccgggcgtcgaagaaatcagcgggctgcccagtggggaagtgctcgagaccagtacaagtgcggtgggcgatctctcaggtcttccttcaggcggagaggtcctagaaataagtgtgagcggagttgaggacataagtgggcttccatccggtgaagtggtagagaccagtgccagcgggattgaggatgtaagcgaactaccttcgggggaaggcctagagacgagcgcaagtggcgtggaagatctatctcggctccccagcggagaagaggtgttagagatctcagcaagcggatttggggacttatcaggactgcctagcgggggtgaaggactggaaactagtgccagtgaagtgggcacagatctgagcggactgccttctgggagggagggtttggaaacatctgccagtggagccgaagacttgagtggtctcccctccggtaaagaggacctagtcgggtctgcctccggagaccttgatctcggaaaactgccctctggaaccctcggatccggtcaggcaccagagacctcagggcttcctagtggatttagtggcgaatattcaggggtagacttagggagtgggcccccatctggacttcccgacttttccggtttgccatctggctttcccacagtctccttagtggactcaactttggtcgaagtggtcaccgccagtactgctagcgaactggaaggccgcggtacaattgggatctcaggagcgggtgagatttccggactgcctagctccgaattagatatctcgggacgcgcttccggactcccatctggcaccgagctttccggtcaagcgagcggcagtcctgacgtcagtggagaaattcccggcctctttggtgtaagcgggcagccctcaggatttcctgacactagtggagaaacctcaggagtaacggagctatcaggtttgtctagcggacaacccgggatctctggggaagcaagcggagtgttgtacgggacaagccagcctttcgggatcacagacttgtctggcgaaacaagtggggttcccgacctatctgggcaaccttctggcttaccaggcttctctggcgctacgagtggtgtacctgatctcgtttccggcacaacctccgggtcaggtgagtcatccggaattaccttcgttgacaccagcttggtagaggtggcaccgactacttttaaggaagaggaaggtctcggttcagtagagctctccggacttccgagcggcgaagccgacctttcaggaaaaagtggcatggtcgacgtgtccggtcaatttagtggtactgtcgacagcagcggttttacttcccagacccctgaattcagcggactgccctctgggatcgctgaagtgagtggagagagcagccgcgcagaaattggcagtagtttgccttctggcgcctactacggatcggggacccctagtagtttccccacagtgtcacttgtggatcggacacttgttgagagtgttacccaggctccaacagctcaagaggctggcgaaggaccgagcggaatcctcgagttatctggtgcccattccggagcccccgacatgtctggcgagcacagcgggtttttggacctcagtgggttgcagagtggcctgatcgaacccagcggggaaccaccaggtaccccatacttctctggcgacttcgcgtcaactaccaatgttagtggcgaaagcagtgtggctatgggcacctcaggagaggcctccggattacctgaagtgaccttaattacctcagaatttgttgaaggcgtaactgaacccaccattagccaagaactcgggcaacgcccccctgtcacccatacaccacagctcttcgagtcttcaggcaaggtctcaactgccggtgatatttcaggtgccaccccagttctgccgggaagcggggtcgaggtgtcatcagttccagagagcagcagcgagaccagcgcatacccggaggcaggatttggcgcatccgctgcccctgaggcctcccgcgaagactctggctccccagacttaagtgagacgacatctgctttccatgaagctaatctggagcgatcttctggcctgggcgtcagcgggtccaccttaacattccaagaaggcgaagcctcagcagcccccgaagttagcggtgaaagtaccaccacttcagacgtgggtaccgaagcccctggcctcccgtcagccaccccaacagccagcggcgaccgcacagaaattagcggagatttgagcggccacactagtcaactcggtgttgttatctctacttccatcccagaatcagaatggacacagcagacacagcgtcccgcagaaacacacctagaaattgagtcatcctcactattatattccggtgaggaaacacacacagtggaaacggctacctccccgaccgatgccagcatacctgcgtctcctgagtggaaaagagagtctgagagcactgccgctgcccccgctaggtcctgcgcagaagagccatgtggcgcaggaacatgcaaagagaccgagggccacgtcatttgcctgtgcccgccaggttatacaggagagcattgcaatatagaccaggaagtatgtgaagagggctggaataagtatcagggtcattgctaccgacacttccctgatcgagaaacatgggttgacgccgaaagaagatgtagagagcagcagagccatttgtcttcaatcgtgactcccgaagagcaggagttcgttaacaacaatgcacaggactatcagtggatcggcttaaatgataggaccatcgaaggcgattttagatggagcgatggacaccctatgcaatttgagaactggcgacccaaccaacctgacaacttcttcgcagccggggaggactgtgtggttatgatatggcacgaaaaaggcgaatggaacgatgtcccttgcaattatcatctgccctttacctgtaagaaaggtaccgtcgcctgtggagagccccccgtagtggaacacgctagaacctttggtcagaaaaaagatagatacgagattaatagcttggtgagatatcagtgtactgaaggctttgtccaacggcacatgcctacaatccggtgtcagcccagtggtcactgggaagaaccccagattacatgtaccgaccccacaacatacaagaggagactccagaaacgatcctcacgccaccctcgtagaagccgaccctccaccgcccattag

SEQ ID NO: 175003 - DNA, 7251 bp, Artificial Sequence
  derived and/or modified sequence
atgaccaccctgctgtgggtgttcgtgaccctgagagtgatcaccgccgccgtgaccgtggagaccagcgaccacgacaacagcctgagcgtgagcatcccccagcccagccccctgagagtgctgctgggcaccagcctgaccatcccctgctacttcatcgaccccatgcaccccgtgaccaccgcccccagcaccgcccccctggcccccagaatcaagtggagcagagtgagcaaggagaaggaggtggtgctgctggtggccaccgagggcagagtgagagtgaacagcgcctaccaggacaaggtgagcctgcccaactaccccgccatccccagcgacgccaccctggaggtgcagagcctgagaagcaacgacagcggcgtgtacagatgcgaggtgatgcacggcatcgaggacagcgaggccaccctggaggtggtggtgaagggcatcgtgttccactacagagccatcagcaccagatacaccctggacttcgacagagcccagagagcctgcctgcagaacagcgccatcatcgccacccccgagcagctgcaggccgcctacgaggacggcttccaccagtgcgacgccggctggctggccgaccagaccgtgagataccccatccacacccccagagagggctgctacggcgacaaggacgagttccccggcgtgagaacctacggcatcagagacaccaacgagacctacgacgtgtactgcttcgccgaggagatggagggcgaggtgttctacgccaccagccccgagaagttcaccttccaggaggccgccaacgagtgcagaagactgggcgccagactggccaccaccggccagctgtacctggcctggcaggccggcatggacatgtgcagcgccggctggctggccgacagaagcgtgagataccccatcagcaaggccagacccaactgcggcggcaacctgctgggcgtgagaaccgtgtacgtgcacgccaaccagaccggctaccccgaccccagcagcagatacgacgccatctgctacaccggcgaggacttcgtggacatccccgagaacttcttcggcgtgggcggcgaggaggacatcaccgtgcagaccgtgacctggcccgacatggagctgcccctgcccagaaacatcaccgagggcgaggccagaggcagcgtgatcctgaccgtgaagcccatcttcgaggtgagccccagccccctggagcccgaggagcccttcaccttcgcccccgagatcggcgccaccgccttcgccgaggtggagaacgagaccggcgaggccaccagaccctggggcttccccacccccggcctgggccccgccaccgccttcaccagcgaggacctggtggtgcaggtgaccgccgtgcccggccagccccacctgcccggcggcgtggtgttccactacagacccggccccaccagatacagcctgaccttcgaggaggcccagcaggcctgcctgagaaccggcgccgtgatcgccagccccgagcagctgcaggccgcctacgaggccggctacgagcagtgcgacgccggctggctgagagaccagaccgtgagataccccatcgtgagccccagaaccccctgcgtgggcgacaaggacagcagccccggcgtgagaacctacggcgtgagacccagcaccgagacctacgacgtgtactgcttcgtggacagactggagggcgaggtgttcttcgccaccagactggagcagttcaccttccaggaggccctggagttctgcgagagccacaacgccaccctggccaccaccggccagctgtacgccgcctggagcagaggcctggacaagtgctacgccggctggctggccgacggcagcctgagataccccatcgtgacccccagacccgcctgcggcggcgacaagcccggcgtgagaaccgtgtacctgtaccccaaccagaccggcctgcccgaccccctgagcagacaccacgccttctgcttcagaggcatcagcgccgtgcccagccccggcgaggaggagggcggcacccccaccagccccagcggcgtggaggagtggatcgtgacccaggtggtgcccggcgtggccgccgtgcccgtggaggaggagaccaccgccgtgcccagcggcgagaccaccgccatcctggagttcaccaccgagcccgagaaccagaccgagtgggagcccgcctacacccccgtgggcaccagccccctgcccggcatcctgcccacctggccccccaccggcgccgccaccgaggagagcaccgagggccccagcgccaccgaggtgcccagcgccagcgaggagcccagccccagcgaggtgcccttccccagcgaggagcccagccccagcgaggagcccttccccagcgtgagacccttccccagcgtggagctgttccccagcgaggagcccttccccagcaaggagcccagccccagcgaggagcccagcgccagcgaggagccctacacccccagcccccccgtgcccagctggaccgagctgcccagcagcggcgaggagagcggcgcccccgacgtgagcggcgacttcaccggcagcggcgacgtgagcggccacctggacttcagcggccagctgagcggcgacagagccagcggcctgcccagcggcgacctggacagcagcggcctgaccagcaccgtgggcagcggcctgcccgtggagagcggcctgcccagcggcgacgaggagagaatcgagtggcccagcacccccaccgtgggcgagctgcccagcggcgccgagatcctggagggcagcgccagcggcgtgggcgacctgagcggcctgcccagcggcgaggtgctggagaccagcgccagcggcgtgggcgacctgagcggcctgcccagcggcgaggtgctggagaccaccgcccccggcgtggaggacatcagcggcctgcccagcggcgaggtgctggagaccaccgcccccggcgtggaggacatcagcggcctgcccagcggcgaggtgctggagaccaccgcccccggcgtggaggacatcagcggcctgcccagcggcgaggtgctggagaccaccgcccccggcgtggaggacatcagcggcctgcccagcggcgaggtgctggagaccaccgcccccggcgtggaggacatcagcggcctgcccagcggcgaggtgctggagaccgccgcccccggcgtggaggacatcagcggcctgcccagcggcgaggtgctggagaccgccgcccccggcgtggaggacatcagcggcctgcccagcggcgaggtgctggagaccgccgcccccggcgtggaggacatcagcggcctgcccagcggcgaggtgctggagaccgccgcccccggcgtggaggacatcagcggcctgcccagcggcgaggtgctggagaccgccgcccccggcgtggaggacatcagcggcctgcccagcggcgaggtgctggagaccgccgcccccggcgtggaggacatcagcggcctgcccagcggcgaggtgctggagaccgccgcccccggcgtggaggacatcagcggcctgcccagcggcgaggtgctggagaccgccgcccccggcgtggaggacatcagcggcctgcccagcggcgaggtgctggagaccgccgcccccggcgtggaggacatcagcggcctgcccagcggcgaggtgctggagaccgccgcccccggcgtggaggacatcagcggcctgcccagcggcgaggtgctggagaccgccgcccccggcgtggaggacatcagcggcctgcccagcggcgaggtgctggagaccaccgcccccggcgtggaggagatcagcggcctgcccagcggcgaggtgctggagaccaccgcccccggcgtggacgagatcagcggcctgcccagcggcgaggtgctggagaccaccgcccccggcgtggaggagatcagcggcctgcccagcggcgaggtgctggagaccagcaccagcgccgtgggcgacctgagcggcctgcccagcggcggcgaggtgctggagatcagcgtgagcggcgtggaggacatcagcggcctgcccagcggcgaggtggtggagaccagcgccagcggcatcgaggacgtgagcgagctgcccagcggcgagggcctggagaccagcgccagcggcgtggaggacctgagcagactgcccagcggcgaggaggtgctggagatcagcgccagcggcttcggcgacctgagcggcctgcccagcggcggcgagggcctggagaccagcgccagcgaggtgggcaccgacctgagcggcctgcccagcggcagagagggcctggagaccagcgccagcggcgccgaggacctgagcggcctgcccagcggcaaggaggacctggtgggcagcgccagcggcgacctggacctgggcaagctgcccagcggcaccctgggcagcggccaggcccccgagaccagcggcctgcccagcggcttcagcggcgagtacagcggcgtggacctgggcagcggcccccccagcggcctgcccgacttcagcggcctgcccagcggcttccccaccgtgagcctggtggacagcaccctggtggaggtggtgaccgccagcaccgccagcgagctggagggcagaggcaccatcggcatcagcggcgccggcgagatcagcggcctgcccagcagcgagctggacatcagcggcagagccagcggcctgcccagcggcaccgagctgagcggccaggccagcggcagccccgacgtgagcggcgagatccccggcctgttcggcgtgagcggccagcccagcggcttccccgacaccagcggcgagaccagcggcgtgaccgagctgagcggcctgagcagcggccagcccggcatcagcggcgaggccagcggcgtgctgtacggcaccagccagcccttcggcatcaccgacctgagcggcgagaccagcggcgtgcccgacctgagcggccagcccagcggcctgcccggcttcagcggcgccaccagcggcgtgcccgacctggtgagcggcaccaccagcggcagcggcgagagcagcggcatcaccttcgtggacaccagcctggtggaggtggcccccaccaccttcaaggaggaggagggcctgggcagcgtggagctgagcggcctgcccagcggcgaggccgacctgagcggcaagagcggcatggtggacgtgagcggccagttcagcggcaccgtggacagcagcggcttcaccagccagacccccgagttcagcggcctgcccagcggcatcgccgaggtgagcggcgagagcagcagagccgagatcggcagcagcctgcccagcggcgcctactacggcagcggcacccccagcagcttccccaccgtgagcctggtggacagaaccctggtggagagcgtgacccaggcccccaccgcccaggaggccggcgagggccccagcggcatcctggagctgagcggcgcccacagcggcgcccccgacatgagcggcgagcacagcggcttcctggacctgagcggcctgcagagcggcctgatcgagcccagcggcgagccccccggcaccccctacttcagcggcgacttcgccagcaccaccaacgtgagcggcgagagcagcgtggccatgggcaccagcggcgaggccagcggcctgcccgaggtgaccctgatcaccagcgagttcgtggagggcgtgaccgagcccaccatcagccaggagctgggccagagaccccccgtgacccacaccccccagctgttcgagagcagcggcaaggtgagcaccgccggcgacatcagcggcgccacccccgtgctgcccggcagcggcgtggaggtgagcagcgtgcccgagagcagcagcgagaccagcgcctaccccgaggccggcttcggcgccagcgccgcccccgaggccagcagagaggacagcggcagccccgacctgagcgagaccaccagcgccttccacgaggccaacctggagagaagcagcggcctgggcgtgagcggcagcaccctgaccttccaggagggcgaggccagcgccgcccccgaggtgagcggcgagagcaccaccaccagcgacgtgggcaccgaggcccccggcctgcccagcgccacccccaccgccagcggcgacagaaccgagatcagcggcgacctgagcggccacaccagccagctgggcgtggtgatcagcaccagcatccccgagagcgagtggacccagcagacccagagacccgccgagacccacctggagatcgagagcagcagcctgctgtacagcggcgaggagacccacaccgtggagaccgccaccagccccaccgacgccagcatccccgccagccccgagtggaagagagagagcgagagcaccgccgccgcccccgccagaagctgcgccgaggagccctgcggcgccggcacctgcaaggagaccgagggccacgtgatctgcctgtgcccccccggctacaccggcgagcactgcaacatcgaccaggaggtgtgcgaggagggctggaacaagtaccagggccactgctacagacacttccccgacagagagacctgggtggacgccgagagaagatgcagagagcagcagagccacctgagcagcatcgtgacccccgaggagcaggagttcgtgaacaacaacgcccaggactaccagtggatcggcctgaacgacagaaccatcgagggcgacttcagatggagcgacggccaccccatgcagttcgagaactggagacccaaccagcccgacaacttcttcgccgccggcgaggactgcgtggtgatgatctggcacgagaagggcgagtggaacgacgtgccctgcaactaccacctgcccttcacctgcaagaagggcaccgtggcctgcggcgagccccccgtggtggagcacgccagaaccttcggccagaagaaggacagatacgagatcaacagcctggtgagataccagtgcaccgagggcttcgtgcagagacacatgcccaccatcagatgccagcccagcggccactgggaggagccccagatcacctgcaccgaccccaccacctacaagagaagactgcagaagagaagcagcagacaccccagaagaagcagacccagcaccgcccactag

SEQ ID NO: 175004 - DNA, 7593 bp, Artificial Sequence
  derived and/or modified sequence
atgaccaccctgctgtgggtgttcgtgaccctgagagtgatcaccgccgccgtgaccgtggagaccagcgaccacgacaacagcctgagcgtgagcatcccccagcccagccccctgagagtgctgctgggcaccagcctgaccatcccctgctacttcatcgaccccatgcaccccgtgaccaccgcccccagcaccgcccccctggcccccagaatcaagtggagcagagtgagcaaggagaaggaggtggtgctgctggtggccaccgagggcagagtgagagtgaacagcgcctaccaggacaaggtgagcctgcccaactaccccgccatccccagcgacgccaccctggaggtgcagagcctgagaagcaacgacagcggcgtgtacagatgcgaggtgatgcacggcatcgaggacagcgaggccaccctggaggtggtggtgaagggcatcgtgttccactacagagccatcagcaccagatacaccctggacttcgacagagcccagagagcctgcctgcagaacagcgccatcatcgccacccccgagcagctgcaggccgcctacgaggacggcttccaccagtgcgacgccggctggctggccgaccagaccgtgagataccccatccacacccccagagagggctgctacggcgacaaggacgagttccccggcgtgagaacctacggcatcagagacaccaacgagacctacgacgtgtactgcttcgccgaggagatggagggcgaggtgttctacgccaccagccccgagaagttcaccttccaggaggccgccaacgagtgcagaagactgggcgccagactggccaccaccggccagctgtacctggcctggcaggccggcatggacatgtgcagcgccggctggctggccgacagaagcgtgagataccccatcagcaaggccagacccaactgcggcggcaacctgctgggcgtgagaaccgtgtacgtgcacgccaaccagaccggctaccccgaccccagcagcagatacgacgccatctgctacaccggcgaggacttcgtggacatccccgagaacttcttcggcgtgggcggcgaggaggacatcaccgtgcagaccgtgacctggcccgacatggagctgcccctgcccagaaacatcaccgagggcgaggccagaggcagcgtgatcctgaccgtgaagcccatcttcgaggtgagccccagccccctggagcccgaggagcccttcaccttcgcccccgagatcggcgccaccgccttcgccgaggtggagaacgagaccggcgaggccaccagaccctggggcttccccacccccggcctgggccccgccaccgccttcaccagcgaggacctggtggtgcaggtgaccgccgtgcccggccagccccacctgcccggcggcgtggtgttccactacagacccggccccaccagatacagcctgaccttcgaggaggcccagcaggcctgcctgagaaccggcgccgtgatcgccagccccgagcagctgcaggccgcctacgaggccggctacgagcagtgcgacgccggctggctgagagaccagaccgtgagataccccatcgtgagccccagaaccccctgcgtgggcgacaaggacagcagccccggcgtgagaacctacggcgtgagacccagcaccgagacctacgacgtgtactgcttcgtggacagactggagggcgaggtgttcttcgccaccagactggagcagttcaccttccaggaggccctggagttctgcgagagccacaacgccaccctggccaccaccggccagctgtacgccgcctggagcagaggcctggacaagtgctacgccggctggctggccgacggcagcctgagataccccatcgtgacccccagacccgcctgcggcggcgacaagcccggcgtgagaaccgtgtacctgtaccccaaccagaccggcctgcccgaccccctgagcagacaccacgccttctgcttcagaggcatcagcgccgtgcccagccccggcgaggaggagggcggcacccccaccagccccagcggcgtggaggagtggatcgtgacccaggtggtgcccggcgtggccgccgtgcccgtggaggaggagaccaccgccgtgcccagcggcgagaccaccgccatcctggagttcaccaccgagcccgagaaccagaccgagtgggagcccgcctacacccccgtgggcaccagccccctgcccggcatcctgcccacctggccccccaccggcgccgccaccgaggagagcaccgagggccccagcgccaccgaggtgcccagcgccagcgaggagcccagccccagcgaggtgcccttccccagcgaggagcccagccccagcgaggagcccttccccagcgtgagacccttccccagcgtggagctgttccccagcgaggagcccttccccagcaaggagcccagccccagcgaggagcccagcgccagcgaggagccctacacccccagcccccccgtgcccagctggaccgagctgcccagcagcggcgaggagagcggcgcccccgacgtgagcggcgacttcaccggcagcggcgacgtgagcggccacctggacttcagcggccagctgagcggcgacagagccagcggcctgcccagcggcgacctggacagcagcggcctgaccagcaccgtgggcagcggcctgcccgtggagagcggcctgcccagcggcgacgaggagagaatcgagtggcccagcacccccaccgtgggcgagctgcccagcggcgccgagatcctggagggcagcgccagcggcgtgggcgacctgagcggcctgcccagcggcgaggtgctggagaccagcgccagcggcgtgggcgacctgagcggcctgcccagcggcgaggtgctggagaccaccgcccccggcgtggaggacatcagcggcctgcccagcggcgaggtgctggagaccaccgcccccggcgtggaggacatcagcggcctgcccagcggcgaggtgctggagaccaccgcccccggcgtggaggacatcagcggcctgcccagcggcgaggtgctggagaccaccgcccccggcgtggaggacatcagcggcctgcccagcggcgaggtgctggagaccaccgcccccggcgtggaggacatcagcggcctgcccagcggcgaggtgctggagaccaccgcccccggcgtggaggacatcagcggcctgcccagcggcgaggtgctggagaccgccgcccccggcgtggaggacatcagcggcctgcccagcggcgaggtgctggagaccgccgcccccggcgtggaggacatcagcggcctgcccagcggcgaggtgctggagaccgccgcccccggcgtggaggacatcagcggcctgcccagcggcgaggtgctggagaccgccgcccccggcgtggaggacatcagcggcctgcccagcggcgaggtgctggagaccgccgcccccggcgtggaggacatcagcggcctgcccagcggcgaggtgctggagaccgccgcccccggcgtggaggacatcagcggcctgcccagcggcgaggtgctggagaccgccgcccccggcgtggaggacatcagcggcctgcccagcggcgaggtgctggagaccgccgcccccggcgtggaggacatcagcggcctgcccagcggcgaggtgctggagaccgccgcccccggcgtggaggacatcagcggcctgcccagcggcgaggtgctggagaccgccgcccccggcgtggaggacatcagcggcctgcccagcggcgaggtgctggagaccgccgcccccggcgtggaggacatcagcggcctgcccagcggcgaggtgctggagaccgccgcccccggcgtggaggacatcagcggcctgcccagcggcgaggtgctggagaccgccgcccccggcgtggaggacatcagcggcctgcccagcggcgaggtgctggagaccgccgcccccggcgtggaggacatcagcggcctgcccagcggcgaggtgctggagaccgccgcccccggcgtggaggacatcagcggcctgcccagcggcgaggtgctggagaccgccgcccccggcgtggaggacatcagcggcctgcccagcggcgaggtgctggagaccaccgcccccggcgtggaggagatcagcggcctgcccagcggcgaggtgctggagaccaccgcccccggcgtggacgagatcagcggcctgcccagcggcgaggtgctggagaccaccgcccccggcgtggaggagatcagcggcctgcccagcggcgaggtgctggagaccagcaccagcgccgtgggcgacctgagcggcctgcccagcggcggcgaggtgctggagatcagcgtgagcggcgtggaggacatcagcggcctgcccagcggcgaggtggtggagaccagcgccagcggcatcgaggacgtgagcgagctgcccagcggcgagggcctggagaccagcgccagcggcgtggaggacctgagcagactgcccagcggcgaggaggtgctggagatcagcgccagcggcttcggcgacctgagcggcctgcccagcggcggcgagggcctggagaccagcgccagcgaggtgggcaccgacctgagcggcctgcccagcggcagagagggcctggagaccagcgccagcggcgccgaggacctgagcggcctgcccagcggcaaggaggacctggtgggcagcgccagcggcgacctggacctgggcaagctgcccagcggcaccctgggcagcggccaggcccccgagaccagcggcctgcccagcggcttcagcggcgagtacagcggcgtggacctgggcagcggcccccccagcggcctgcccgacttcagcggcctgcccagcggcttccccaccgtgagcctggtggacagcaccctggtggaggtggtgaccgccagcaccgccagcgagctggagggcagaggcaccatcggcatcagcggcgccggcgagatcagcggcctgcccagcagcgagctggacatcagcggcagagccagcggcctgcccagcggcaccgagctgagcggccaggccagcggcagccccgacgtgagcggcgagatccccggcctgttcggcgtgagcggccagcccagcggcttccccgacaccagcggcgagaccagcggcgtgaccgagctgagcggcctgagcagcggccagcccggcatcagcggcgaggccagcggcgtgctgtacggcaccagccagcccttcggcatcaccgacctgagcggcgagaccagcggcgtgcccgacctgagcggccagcccagcggcctgcccggcttcagcggcgccaccagcggcgtgcccgacctggtgagcggcaccaccagcggcagcggcgagagcagcggcatcaccttcgtggacaccagcctggtggaggtggcccccaccaccttcaaggaggaggagggcctgggcagcgtggagctgagcggcctgcccagcggcgaggccgacctgagcggcaagagcggcatggtggacgtgagcggccagttcagcggcaccgtggacagcagcggcttcaccagccagacccccgagttcagcggcctgcccagcggcatcgccgaggtgagcggcgagagcagcagagccgagatcggcagcagcctgcccagcggcgcctactacggcagcggcacccccagcagcttccccaccgtgagcctggtggacagaaccctggtggagagcgtgacccaggcccccaccgcccaggaggccggcgagggccccagcggcatcctggagctgagcggcgcccacagcggcgcccccgacatgagcggcgagcacagcggcttcctggacctgagcggcctgcagagcggcctgatcgagcccagcggcgagccccccggcaccccctacttcagcggcgacttcgccagcaccaccaacgtgagcggcgagagcagcgtggccatgggcaccagcggcgaggccagcggcctgcccgaggtgaccctgatcaccagcgagttcgtggagggcgtgaccgagcccaccatcagccaggagctgggccagagaccccccgtgacccacaccccccagctgttcgagagcagcggcaaggtgagcaccgccggcgacatcagcggcgccacccccgtgctgcccggcagcggcgtggaggtgagcagcgtgcccgagagcagcagcgagaccagcgcctaccccgaggccggcttcggcgccagcgccgcccccgaggccagcagagaggacagcggcagccccgacctgagcgagaccaccagcgccttccacgaggccaacctggagagaagcagcggcctgggcgtgagcggcagcaccctgaccttccaggagggcgaggccagcgccgcccccgaggtgagcggcgagagcaccaccaccagcgacgtgggcaccgaggcccccggcctgcccagcgccacccccaccgccagcggcgacagaaccgagatcagcggcgacctgagcggccacaccagccagctgggcgtggtgatcagcaccagcatccccgagagcgagtggacccagcagacccagagacccgccgagacccacctggagatcgagagcagcagcctgctgtacagcggcgaggagacccacaccgtggagaccgccaccagccccaccgacgccagcatccccgccagccccgagtggaagagagagagcgagagcaccgccgccgcccccgccagaagctgcgccgaggagccctgcggcgccggcacctgcaaggagaccgagggccacgtgatctgcctgtgcccccccggctacaccggcgagcactgcaacatcgaccaggaggtgtgcgaggagggctggaacaagtaccagggccactgctacagacacttccccgacagagagacctgggtggacgccgagagaagatgcagagagcagcagagccacctgagcagcatcgtgacccccgaggagcaggagttcgtgaacaacaacgcccaggactaccagtggatcggcctgaacgacagaaccatcgagggcgacttcagatggagcgacggccaccccatgcagttcgagaactggagacccaaccagcccgacaacttcttcgccgccggcgaggactgcgtggtgatgatctggcacgagaagggcgagtggaacgacgtgccctgcaactaccacctgcccttcacctgcaagaagggcaccgtggcctgcggcgagccccccgtggtggagcacgccagaaccttcggccagaagaaggacagatacgagatcaacagcctggtgagataccagtgcaccgagggcttcgtgcagagacacatgcccaccatcagatgccagcccagcggccactgggaggagccccagatcacctgcaccgaccccaccacctacaagagaagactgcagaagagaagcagcagacaccccagaagaagcagacccagcaccgcccactag

SEQ ID NO: 175005 - protein, 1237 aa, Artificial Sequence
  derived and/or modified sequence
MDAKARNCLLQHREALEKDIKTSYIMDHMISDGFLTISEEEKVRNEPTQQQRAAMLIKMILKKDNDSYVSFYNALLHEGYKDLAALLHDGIPVVSSSSVRTVLCEGGVPQRPVVFVTRKKLVNAIQQKLSKLKGEPGWVTIHGMAGCGKSVLAAEAVRDHSLLEGCFPGGVHWVSVGKQDKSGLLMKLQNLCTRLDQDESFSQRLPLNIEEAKDRLRILMLRKHPRSLLILDDVWDSWVLKAFDSQCQILLTTRDKSVTDSVMGPKYVVPVESSLGKEKGLEILSLFVNMKKADLPEQAHSIIKECKGSPLVVSLIGALLRDFPNRWEYYLKQLQNKQFKRIRKSSSYDYEALDEAMSISVEMLREDIKDYYTDLSILQKDVKVPTKVLCILWDMETEEVEDILQEFVNKSLLFCDRNGKSFRYYLHDLQVDFLTEKNCSQLQDLHKKIITQFQRYHQPHTLSPDQEDCMYWYNFLAYHMASAKMHKELCALMFSLDWIKAKTELVGPAHLIHEFVEYRHILDEKDCAVSENFQEFLSLNGHLLGRQPFPNIVQLGLCEPETSEVYQQAKLQAKQEVDNGMLYLEWINKKNITNLSRLVVRPHTDAVYHACFSEDGQRIASCGADKTLQVFKAETGEKLLEIKAHEDEVLCCAFSTDDRFIATCSVDKKVKIWNSMTGELVHTYDEHSEQVNCCHFTNSSHHLLLATGSSDCFLKLWDLNQKECRNTMFGHTNSVNHCRFSPDDKLLASCSADGTLKLWDATSANERKSINVKQFFLNLEDPQEDMEVIVKCCSWSADGARIMVAAKNKIFLFDIHTSGLLGEIHTGHHSTIQYCDFSPQNHLAVVALSQYCVELWNTDSRSKVADCRGHLSWVHGVMFSPDGSSFLTSSDDQTIRLWETKKVCKNSAVMLKQEVDVVFQENEVMVLAVDHIRRLQLINGRTGQIDYLTEAQVSCCCLSPHLQYIAFGDENGAIEILELVNNRIFQSRFQHKKTVWHIQFTADEKTLISSSDDAEIQVWNWQLDKCIFLRGHQETVKDFRLLKNSRLLSWSFDGTVKVWNIITGNKEKDFVCHQGTVLSCDISHDATKFSSTSADKTAKIWSFDLLLPLHELRGHNGCVRCSAFSVDSTLLATGDDNGEIRIWNVSNGELLHLCAPLSEEGAATHGGWVTDLCFSPDGKMLISAGGYIKWWNVVTGESSQTFYTNGTNLKKIHVSPDFKTYVTVDNLGILYILQTLE

SEQ ID NO: 175006 - DNA, 3714 bp, Artificial Sequence
  derived and/or modified sequence
atggacgcgaaagcccggaactgtttgctacagcatagggaagcgctggaaaaggacattaagacctcttacatcatggatcacatgatctccgacggcttcctgacgatttccgaggaggagaaggtgcgcaatgagccgacccagcagcagcgcgccgctatgctgatcaaaatgatcctcaaaaaggacaatgatagttacgtgagcttttacaacgccctgttgcacgaagggtataaggacctggccgctctcctccacgacgggatcccggtcgtgagttcctcgtcagttcgcacagtgttgtgcgaaggcggcgttccgcagaggcctgtagtctttgttacacggaaaaagttggtgaacgccatccagcagaagctgtccaagctcaaaggagagcccggttgggtcactatccacggaatggcagggtgcggcaagagcgttctggccgctgaggctgtgcgagaccacagtctgctggagggctgcttccccggcggtgtacactgggtatccgtggggaagcaggacaagtccggcctgctgatgaaactgcagaacttatgtacccggttagaccaagacgaaagtttctctcagcggttaccgctgaacatcgaggaggcgaaagacaggctaaggatactcatgttacgcaagcacccacgaagcctcctgatcttggacgatgtttgggattcatgggttcttaaagcattcgatagccagtgccagattctgcttactacccgcgataagtctgtcacagacagtgtgatgggtcctaagtatgtcgtccctgtggagtcctctctgggcaaggagaagggcctcgagattctctccttgtttgtcaatatgaaaaaagcggatctgccggagcaggcgcattcaatcattaaggagtgtaaaggcagtccgctggtggtgagtctgattggcgcactactgcgtgactttcccaatcgctgggagtactacctgaagcagctccagaataaacaattcaaaaggatccgcaagtctagctcttacgactacgaggctctggacgaggccatgagcatctcagtagagatgctgcgggaggacatcaaagattattacaccgatctgtctatactgcagaaagatgttaaggtgcccacaaaggtcctctgcatactgtgggatatggagaccgaggaggtagaggatatccttcaagagttcgtgaataaaagcctgctcttttgcgataggaatgggaaatcatttcgctactacctccacgatttacaggtggacttcctgaccgagaaaaactgcagccagctgcaagaccttcacaagaaaatcatcacgcagttccagagataccaccaaccacataccctgagtccagaccaggaagactgcatgtactggtataatttcctcgcataccacatggcgtctgctaaaatgcacaaagaattgtgtgctctgatgttctctctggattggatcaaggctaagactgaattggtcggccccgcacaccttatccatgaattcgttgaatacagacatatcctggacgaaaaagactgcgctgtcagtgagaatttccaggaatttctgtccctgaatggacatctgctgggcagacagccctttccgaatatcgttcaattaggcctttgcgagcccgaaacaagcgaggtctaccagcaggcaaagttgcaggccaagcaggaggtcgataatggaatgctgtacctagagtggattaacaagaaaaacatcaccaatctctcaagactggtcgtcagaccccacaccgatgccgtctaccatgcctgcttcagtgaggatggtcagcgaattgcatcctgcggggcggataagacgctccaagtgttcaaagctgaaaccggagagaaattgctcgagatcaaggcccatgaagacgaagtcctctgctgcgcattctccacggacgaccgcttcatcgccacttgcagcgtcgacaaaaaagtcaaaatctggaacagtatgactggagaactggtgcatacttatgacgagcactctgagcaagtcaactgctgtcactttaccaattcctcacaccacctgttgctggctacaggcagtagtgattgcttcctgaaactctgggacctcaatcaaaaagaatgtaggaatacaatgtttggccacacaaattcagtgaaccattgccgctttagccctgacgataaacttctcgccagctgcagcgccgacggaacccttaagctctgggacgcaaccagcgcaaatgagagaaagagtatcaacgtgaagcagttttttttgaacctcgaggatccacaggaggatatggaagtgatcgtcaagtgctgtagctggtcagcagatggagcccgtataatggtggcagccaagaacaagatattcctctttgatattcacacgagtggcctgctgggagaaatccacacaggacatcacagtactattcaatattgtgatttcagtccacagaaccatctggcggtcgtggcactctctcagtattgtgtggagttatggaatactgactccaggagtaaggtggctgattgtcgcggtcacctatcttgggttcatggcgtgatgtttagccccgacggcagttcctttctcacttcgagcgacgatcagaccatccggctctgggagactaagaaagtctgcaaaaacagtgcagtgatgctgaaacaggaagtcgatgtggtgtttcaggaaaacgaagttatggtgctggcagtggaccatatccgcagattgcagctgatcaatggcagaaccggccagatagactacttgacagaggcccaggtgtcgtgttgttgtctctcgcctcatctccagtacatcgcctttggcgacgaaaatggcgctatagaaattttggagctggttaataaccggattttccagagtcgcttccaacacaagaaaactgtttggcacattcaatttacagctgacgaaaagacacttatttccagctccgacgatgctgaaattcaagtttggaattggcagctggacaaatgcatctttcttcgcggccatcaagagacagtgaaggacttccgcctgctgaagaacagcagactcttatcttggagtttcgacggaacggttaaagtgtggaatatcataaccggcaataaggagaaagacttcgtttgtcaccagggaacagtgctgtcatgtgacatctctcatgacgcgacgaagtttagctccaccagcgccgacaagacagccaaaatttggtccttcgacctcctgctaccacttcatgagctgaggggacacaacggctgtgtcagatgtagcgccttcagcgtggattcgacgctcctcgccactggggacgataatggcgaaattaggatatggaacgttagtaacggagagttactgcacttgtgtgctccgttgtcagaagagggtgcagccacccacggaggttgggtgacagacctgtgtttcagccctgatggcaaaatgttgattagtgccggcggatatataaagtggtggaacgtcgtcacaggggagtcttcacagaccttctacactaacggcaccaatttaaaaaaaattcacgtctcacctgacttcaaaacttacgttactgtcgacaatctgggaatcctatacattctgcagacgctggagtag

SEQ ID NO: 175007 - DNA, 3714 bp, Artificial Sequence
  derived and/or modified sequence
atggatgccaaggccaggaactgcctgctgcagcaccgggaggccctggagaaggacatcaagaccagctacatcatggaccacatgatcagtgatggcttcctgaccatcagcgaggaggagaaggtgagaaatgagcccacccagcagcagagagctgccatgctgatcaagatgatcctgaagaaggacaatgacagctatgtgtccttctacaatgccctgctgcacgagggctacaaggacctggccgccctgctgcatgatggcatccctgtggtgagcagcagctctgtgaggacagtgctgtgtgagggcggcgtgccccagaggcctgtggtgtttgtgaccaggaagaagctggtgaatgccatccagcagaagctgagcaagctgaagggggagcccggctgggtgaccatccacggcatggccggctgcggcaagtctgtgctggccgctgaggccgtgcgggaccacagcctgctggagggctgcttccctgggggcgtgcactgggtgtctgtgggcaagcaggacaagagcggcctgctgatgaagctgcagaacctgtgcacccggctggaccaggatgagagcttcagccagaggctgcccctgaacatcgaggaggccaaggaccggctgcgcatcctgatgctgaggaagcaccccaggagcctgctgatcctggatgatgtgtgggacagctgggtgctgaaggcctttgacagccagtgccagatcctgctgaccacccgggacaagtctgtgacagattctgtgatgggccccaagtatgtggtgcctgtggagagcagcctgggcaaggagaagggcctggagatcctgagcctgtttgtgaacatgaagaaggctgacctgcctgagcaggcccacagcatcatcaaggaatgtaaaggcagccccctggtggtgtccctcatcggggccctgctgcgggacttccccaaccgctgggagtactacctgaagcagctgcagaacaagcagttcaagaggatcaggaagagcagcagctatgactatgaggccctggatgaggccatgagcatctctgtggagatgctgcgggaggacatcaaggactactacacagacctgagcatcctgcagaaggatgtgaaggtgcccaccaaggtgctgtgcatcctgtgggacatggagacagaggaggtggaggacatcctgcaggagtttgtgaacaagagcctgctcttctgtgacagaaatggcaagagcttccgctactacctgcatgacctgcaggtggacttcctgacagagaagaactgcagccagctgcaggacctgcacaagaagatcatcacccagttccagcgctaccaccagccccacaccctgagcccagaccaggaggactgcatgtactggtacaacttcctggcctaccacatggccagcgccaagatgcacaaggagctgtgtgccctgatgttcagcctggactggatcaaggccaagacagagctggtgggccctgcccacctgattcatgaatttgtggagtaccgccacatcctggatgagaaggactgtgctgtgtctgagaacttccaggagttcctgagcctgaatggccacctgctgggccggcagcccttccccaacatcgtgcagctgggcctgtgtgagcctgagaccagcgaggtgtaccagcaggccaagctgcaggccaagcaggaggtggacaatggcatgctgtacctggagtggatcaacaagaagaacatcaccaacctgagccggctggtggtgcggccccacacagatgctgtgtaccacgcctgcttctctgaagatggccagagaattgccagctgtggggctgacaagaccctgcaggtgttcaaggccgagactggagagaagctgctggagatcaaggcccatgaagatgaggtgctgtgctgtgccttcagcacagatgaccgcttcatcgccacctgcagcgtggacaagaaggtgaagatctggaacagcatgactggagagctggtgcacacctatgatgagcacagcgagcaggtgaactgctgccacttcaccaacagcagccaccacctgctgctggccaccggcagcagtgactgcttcctgaagctgtgggacctgaaccagaaggaatgtagaaacaccatgtttggccacaccaacagcgtgaaccactgccgcttctccccagatgacaagctgctggccagctgcagcgcagatggcaccctgaagctgtgggatgccaccagcgccaatgaaaggaagagcatcaacgtgaagcagttcttcctgaacctggaggacccccaggaggacatggaggtgattgtgaagtgctgctcctggagcgcagatggagcccgcatcatggtggccgccaagaacaagatcttcctgtttgacatccacaccagcggcctgctgggggagatccacacaggccaccacagcaccatccagtactgtgacttcagcccccagaaccacctggccgtggtggccctgagccagtactgtgtggagctgtggaacacagacagccgcagcaaggtggccgactgccggggccacctgtcctgggtgcatggagtgatgttctccccagatggcagcagcttcctgaccagcagtgatgaccagaccatccggctgtgggagaccaagaaggtgtgcaagaacagcgctgtgatgctgaagcaggaggtggatgtggtgttccaggagaatgaggtgatggtgctggccgtggaccacatccggcggctgcagctgatcaatggaagaacaggccagattgactacctgacagaggcccaggtgtcctgctgctgcctgagcccccacctgcagtacatcgcctttggagatgaaaatggagccatcgagatcctggagctggtgaacaaccgcatcttccagagccgcttccagcacaagaagacagtgtggcacatccagttcaccgcagatgagaagaccctcatcagcagcagtgatgatgctgagatccaggtgtggaactggcagctggacaagtgcatcttcctgcggggccaccaggagaccgtgaaggacttccggctgctgaagaacagccggctgctgtcctggagctttgatggcaccgtgaaggtgtggaacatcatcactggaaacaaggagaaggactttgtgtgccaccagggcaccgtgctgagctgtgacatcagccatgatgccaccaagttcagcagcaccagcgctgacaagacagccaagatctggagctttgacctgctgctgcccctgcacgagctgcggggccacaacggctgtgtgcgctgcagcgccttctctgtggacagcaccctgctggccactggagatgacaatggagagatccgcatctggaatgtgtccaatggagagctgctgcacctgtgtgcccccctgtctgaggagggcgccgccacccatggaggctgggtgacagacctgtgcttctccccagatggcaagatgctgatctctgctgggggctacatcaagtggtggaatgtggtgactggagagagcagccagaccttctacaccaacggcaccaacctgaagaagatccacgtgtccccagacttcaagacctacgtgacagtggacaacctgggcatcctgtacatcctgcagaccctggagtag

SEQ ID NO: 175008 - DNA, 3714 bp, Artificial Sequence
  derived and/or modified sequence
atggacgccaaggcccggaactgcctgctgcagcaccgggaggccctggaaaaagacatcaagactagctatataatggaccacatgattagtgacggatttttaacaatatccgaggaggaaaaagttagaaacgaacccacccagcagcagcgagctgctatgttgatcaaaatgatactcaaaaaagacaatgactcctacgtttcattttataacgccctgctccacgagggttataaggatctggctgcccttctgcatgacggtattccagtcgtgtcttcgtcttctgtcaggactgtgttgtgcgagggcggggtaccacaaagacccgtcgtgttcgtgacgaggaagaagttagtcaacgccattcaacagaaactgtccaaattaaaaggggagccaggttgggtgaccattcacgggatggcaggctgtgggaagtctgtgttggcagcagaagctgttcgtgatcatagcctgttagaaggttgtttccccggaggggtgcattgggtcagtgtgggaaaacaggacaagtctggactcttgatgaagctgcagaacctatgcacgaggttagatcaagatgagtcattctcccagagattgccattaaatattgaggaggccaaagataggctccgcatccttatgctgcgcaagcacccccggtcactgctcatcttagatgacgtatgggactcctgggtgctgaaagcctttgactctcaatgtcagatactcctgactacccgagacaaatccgtgactgatagtgtgatggggcccaagtacgtggtacctgtcgaatcctccctggggaaagagaagggattggaaatcttgtctttattcgtgaacatgaagaaggccgacctgcccgaacaggcgcactccattattaaagaatgcaaaggaagccccctggtcgtaagcctcataggcgctctgctgcgggatttcccaaacaggtgggagtactacctgaagcagctgcagaacaaacagtttaagaggatcagaaagagctccagttatgattatgaggcccttgacgaggccatgtccatctcagtggaaatgctgagggaggatatcaaggactattacaccgacctgagtattctgcagaaggatgttaaggtgcctaccaaggtgctgtgcattctttgggatatggagactgaggaagttgaggacatcctccaggagtttgtgaataagagtctgctcttctgtgatagaaacgggaagagctttcggtactaccttcacgatctgcaggtggactttctgacggaaaaaaactgcagccagctccaggacctccataaaaaaattataacccaattccagcgctaccatcagccgcacacactttctcccgaccaagaagattgcatgtattggtacaatttcctcgcctaccacatggcctcagccaaaatgcacaaggagctgtgtgccctgatgttttcactggactggatcaaggctaaaactgagctggttggaccggcacacctgatccatgagtttgttgagtacaggcacatccttgacgaaaaagattgcgccgttagcgagaactttcaggagttcctttctctgaacggccatcttttggggaggcagccttttccgaatatagtccagttggggctgtgtgaacccgagacgtccgaggtgtaccaacaagctaagcttcaggcgaagcaggaggtggataacggcatgctgtacctggaatggatcaataagaagaacataaccaatctgtctcggctggtggtgaggccacataccgatgccgtgtaccatgcctgtttttctgaagacggccagcggatagcctcatgcggagccgacaagaccctgcaagtgtttaaggccgaaactggggagaaacttctggaaatcaaagctcacgaagatgaggtcttgtgctgtgcattctctactgacgaccgcttcattgcgacatgttccgtcgataagaaagtgaagatctggaattcaatgaccggggagttagtgcacacttatgacgagcacagcgagcaggtcaattgctgccattttacgaattccagtcatcacctgctgcttgcaaccggaagttccgattgtttcctcaagttgtgggacctgaatcaaaaggagtgccgaaatactatgttcggacatacaaactcggtaaaccactgtaggtttagcccagacgacaagctgctggcctcctgctcagcggatgggactctgaagctatgggacgctacctccgccaatgagagaaagtcgatcaatgtgaaacagttttttttaaatctcgaagacccacaggaggacatggaagtgatcgtgaagtgctgtagctggtccgccgatggagctagaattatggtggccgctaagaacaagatcttcctgtttgatattcacacctccggcctgcttggcgagattcatacaggacaccactccacgatccagtattgtgatttcagcccccagaaccatttggcggtggtggccttatctcagtattgtgttgagctctggaacaccgactcccgatctaaggtcgccgattgccgcggacatctgtcttgggtgcatggcgtgatgttctctcctgatggctcttctttcctgacttcttccgacgatcagaccatcagactatgggaaacaaaaaaggtatgtaagaatagcgccgttatgctgaagcaggaagtcgatgtcgtcttccaggaaaacgaggtgatggtgcttgcggtggatcatatccgaaggctgcagctgattaacggtcggactgggcagattgattatctcactgaagcccaggtgtcttgctgttgcctgtcaccccacctgcagtacattgccttcggtgacgagaacggagccatcgagatcctggagctcgttaacaaccgtatcttccagtcccgcttccagcacaaaaagacagtgtggcacattcagttcaccgctgacgagaaaactctcatttcctccagcgacgacgccgaaatccaagtctggaattggcagctcgacaagtgcattttcctgcgaggacatcaggaaaccgttaaggatttcaggttattgaaaaactcccggctgctgtcgtggagcttcgacggtaccgtaaaagtgtggaacattatcaccggcaacaaagaaaaggacttcgtctgtcaccagggcacagtcttaagttgcgacatttcccacgacgcaaccaagttcagttccactagcgcagacaagactgccaaaatttggagtttcgatctcttactgccactgcacgaactgcggggacataatggttgtgttcggtgctcggctttcagcgtggacagcaccttgttagcgactggcgatgataacggcgaaattcggatttggaacgtttcaaacggggaattgctccatctgtgcgcaccattgagtgaggaaggggctgcaacgcacggcggctgggtgaccgatctttgcttctcaccagacggcaagatgctcattagtgccggcggatacattaagtggtggaacgttgttaccggtgagtcctcgcagaccttttatacaaacggaaccaacctaaaaaaaatccacgtcagtccagatttcaagacctatgttacagtggacaatcttggaattctgtacattctgcagaccctcgagtag

SEQ ID NO: 175009 - DNA, 3714 bp, Artificial Sequence
  derived and/or modified sequence
atggatgccaaggccagaaattgccttctgcagcatcgggaggccctcgagaaagatatcaaaaccagctacattatggaccacatgatttccgatggcttcttgactatcagcgaggaagagaaggtcagaaacgagccaacacagcaacagcgcgcagccatgcttattaaaatgatcctgaaaaaggataacgattcctacgttagcttttacaacgcgctcctccacgagggatataaagatctggccgcactccttcacgatgggatccccgtagttagttcatccagcgtgcggactgtgctgtgcgaaggtggggtgccccagagaccagtcgttttcgtgacaaggaaaaaactggtgaacgccatccagcagaagttatccaaattgaaaggcgagcccggatgggttacaattcacgggatggccggatgcgggaagtcagtgctggctgcagaggcggtgagggatcatagcctacttgaggggtgtttcccagggggagtgcactgggtgtctgtgggaaagcaggacaaatccggtttgctcatgaagctgcagaatctgtgcaccaggttagaccaagacgaatctttcagccaaaggctccccttgaacatcgaagaggcaaaagacaggctcagaatcctgatgctacgcaagcatcccaggtctctcctgatcctggacgatgtttgggactcctgggtgctgaaggcgtttgatagccagtgccaaatccttctgacgaccagagataaatctgtgaccgacagcgtgatgggacccaagtacgtggtgcccgttgaaagtagcctgggtaaagaaaagggtttggagattctgtccctgtttgtgaatatgaagaaggcagatctacccgagcaggcccacagcattatcaaagagtgtaaggggagtccactagtggtgagtttgatcggagccctgcttagggatttccccaaccgctgggaatattatctcaagcagcttcagaataagcagtttaagagaataagaaagagctctagctatgattatgaggccctcgacgaggctatgtcgatctccgtggagatgctgagagaggacatcaaagactactatacagacctctcaatcctgcagaaagacgtgaaagttcccactaaggtgctttgcattctctgggatatggagaccgaagaagtagaagatatactccaggagttcgtgaataaaagtttactgttctgtgacagaaacggcaaatcctttagatattatttacacgaccttcaggtggattttctaacagaaaaaaattgctcacagctacaagacctccacaagaaaattataacacaatttcagaggtatcatcagccacacaccctctcccccgaccaggaagactgcatgtattggtacaatttcctcgcctatcatatggcttccgccaagatgcataaggagctttgcgccttgatgttctcccttgattggattaaggctaagacagagttggtgggccctgcacatctgattcatgagttcgtggaatacagacacatactggatgaaaaggactgcgctgtgtctgagaacttccaggaattcttgtccctgaacgggcacctcctggggagacagccttttcccaacattgtacagctgggactgtgcgaacccgagacctcagaggtctatcaacaggcaaaacttcaagcaaagcaggaggtggataacggcatgctgtatctggagtggatcaataagaaaaacattaccaacctgtcacgactagtggtgagacctcacacagacgccgtgtaccatgcttgctttagtgaagatggccagcggattgccagttgtggagctgataagacactgcaggtgtttaaggctgagactggcgagaagcttctggagatcaaggcacacgaagatgaggtgctctgttgtgcattcagcacggacgatagatttatcgccacctgcagcgtggataaaaaggtcaaaatctggaattccatgacaggagaactcgtgcatacttatgacgagcactccgaacaggtaaactgctgtcacttcaccaactcctctcaccatctgttgctggcgacaggctcttctgactgctttctgaagctgtgggaccttaaccagaaggagtgcaggaatacaatgtttggccatactaattctgtgaaccactgtaggttctcaccagacgataagctgttggcctcatgctcagctgatggaacccttaagctctgggacgctaccagcgctaatgaacgcaaatccattaacgttaagcaattcttcctgaacctcgaggatccccaggaagatatggaagtgatcgtcaagtgttgctcatggagtgctgacggggctaggattatggtggcagccaagaataagattttcctgttcgacattcatacttctggtctgctgggcgagatccataccgggcatcattctactattcagtattgtgacttctctccccaaaaccacctcgccgttgttgccttgagccagtattgcgttgagctgtggaatactgacagcagatcaaaggtagccgactgtagaggccatctaagttgggtgcacggagtgatgttttctcccgatggctcttcatttctcacctcgtcagatgaccagaccatccggctttgggagaccaaaaaagtgtgcaaaaactctgcagtcatgctgaagcaggaggtcgacgtcgtcttccaggagaatgaggtgatggtgctcgctgtggaccatattagacgcttgcagctgatcaatggtcggacagggcagattgactatttgactgaagctcaggtgtcatgctgctgtctctcacctcatcttcagtacatcgcctttggagacgagaacggtgcaatcgagatattggaactggtcaacaaccgcatcttccagtctcgctttcagcataaaaaaacagtgtggcatattcagtttacggccgacgaaaaaacacttattagctccagcgatgatgccgaaatccaggtctggaactggcagctggataagtgcatcttcctaagaggccaccaggagactgtaaaagactttcggctgttaaagaactcaaggctgctcagctggagtttcgacggcacagtgaaggtttggaacatcataacagggaacaaggagaaagattttgtctgccatcaggggaccgtgctctcctgcgacatctcacatgacgctacaaagtttagctcgacatctgccgacaagacggcaaaaatctggtcatttgacctccttcttcccctgcatgaactccggggacataatggctgtgttaggtgcagtgccttttccgttgattctacccttcttgccactggagacgataatggggagatccgcatatggaatgtctcaaatggcgagctgctgcacctatgcgcacccctctccgaagaaggagctgcgacgcatgggggatgggtcacagacctctgtttcagccccgatggaaaaatgctcatcagcgctggtggctatatcaaatggtggaacgtagtgacaggcgagtcatctcagaccttctacacgaacgggaccaatctcaagaaaattcatgtatcgccagacttcaaaacatacgtcaccgttgataatctcggcatactctacattcttcaaaccctggaatag

SEQ ID NO: 175010 - DNA, 6581 bp, Artificial Sequence
  derived and/or modified sequence
agggaagatggatgcaaaagctcgaaattgtttgcttcaacatagagaagctctggaaaaggacatcaagacatcctacatcatggatcacatgattagtgatggatttttaacaatatcagaagaggaaaaagtaagaaatgagcccactcaacagcaaagagcagctatgctgattaaaatgatacttaaaaaagataatgattcctacgtatcattctacaatgctctactacatgaaggatataaagatcttgctgcccttctccatgatggcattcctgttgtctcttcttccagtgtaaggacagtcctgtgtgaaggtggagtaccacagaggccagttgtttttgtcacaaggaagaagctggtgaatgcaattcagcagaagctctccaaattgaaaggtgaaccaggatgggtcaccatacatggaatggcaggctgtgggaagtctgtattagctgcagaagctgttagagatcattcccttttagaaggttgtttcccagggggagtgcattgggtttcagttgggaaacaagacaaatctgggcttctgatgaaactgcagaatctttgcacacggttggatcaggatgagagtttttcccagaggcttccacttaatattgaagaggctaaagaccgtctccgcattctgatgcttcgcaaacacccaaggtctctcttgatcttggatgatgtttgggactcttgggtgttgaaagcttttgacagtcagtgtcagattcttcttacaaccagagacaagagtgttacagattcagtaatgggtcctaaatatgtagtccctgtggagagttccttaggaaaggaaaaaggacttgaaattttatccctttttgttaatatgaagaaggcagatttgccagaacaagctcatagtattataaaagaatgtaaaggctctccccttgtagtatctttaattggtgcacttttacgtgattttcccaatcgctgggagtactacctcaaacagcttcagaataagcagtttaagagaataaggaaatcttcgtcttatgattatgaggctctagatgaagccatgtctataagtgttgaaatgctcagagaagacatcaaagattattacacagatctttccatccttcagaaggacgttaaggtgcctacaaaggtgttatgtattctctgggacatggaaactgaagaagttgaagacatactgcaggagtttgtaaataagtctcttttattctgtgatcggaatggaaagtcgtttcgttattatttacatgatcttcaagtagattttcttacagagaagaattgcagccagcttcaggatctacataagaagataatcactcagtttcagagatatcaccagccgcatactctttcaccagatcaggaagactgtatgtattggtacaactttctggcctatcacatggccagtgccaagatgcacaaggaactttgtgctttaatgttttccctggattggattaaagcaaaaacagaacttgtaggccctgctcatctgattcatgaatttgtggaatacagacatatactagatgaaaaggattgtgcagtcagtgagaattttcaggagtttttatctttaaatggacaccttcttggacgacagccatttcctaatattgtacaactgggtctctgtgagccggaaacttcagaagtttatcagcaagctaagctgcaggccaagcaggaggtcgataatggaatgctttacctggaatggataaacaaaaaaaacatcacgaatctttcccgcttagttgtccgcccccacacagatgctgtttaccatgcctgcttttctgaggatggtcagagaatagcttcttgtggagctgataaaaccttacaggtgttcaaagctgaaacaggagagaaacttctagaaatcaaggctcatgaggatgaagtgctttgttgtgcattctctacagatgacagatttatagcaacctgctcagtggataaaaaagtgaagatttggaattctatgactggggaactagtacacacctatgatgagcactcagagcaagtcaattgctgccatttcaccaacagtagtcatcatcttctcttagccactgggtcaagtgactgcttcctcaaactttgggatttgaatcaaaaagaatgtcgaaataccatgtttggtcatacaaattcagtcaatcactgcagattttcaccagatgataagcttttggctagttgttcagctgatggaaccttaaagctttgggatgcgacatcagcaaatgagaggaaaagcattaatgtgaaacagttcttcctaaatttggaggaccctcaagaggatatggaagtgatagtgaagtgttgttcgtggtctgctgatggtgcaaggataatggtggcagcaaaaaataaaatctttctttttgacattcatactagtggcctattgggagaaatccacacgggccatcacagcaccatccagtactgtgacttctccccacaaaaccatttggcagtggttgctttgtcccagtactgtgtagagttgtggaatacagactcacgttcaaaggtggctgattgcagaggacatttaagttgggttcatggtgtgatgttttctcctgatggatcatcatttttgacatcttctgatgaccagacaatcaggctctgggagacaaagaaagtatgtaagaactctgctgtaatgttaaagcaagaagtagatgttgtgtttcaagaaaatgaagtgatggtccttgcagttgaccatataagacgtctgcaactcattaatggaagaacaggtcagattgattatctgactgaagctcaagttagctgctgttgcttaagtccacatcttcagtacattgcatttggagatgaaaatggagccattgagattttagaacttgtaaacaatagaatcttccagtccaggtttcagcacaagaaaactgtatggcacatccagttcacagccgatgagaagactcttatttcaagttctgatgatgctgaaattcaggtatggaattggcaattggacaaatgtatctttctacgaggccatcaggaaacagtgaaagactttagactcttgaaaaattcaagactgctttcttggtcatttgatggaacagtgaaggtatggaatattattactggaaataaagaaaaagactttgtctgtcaccagggtacagtactttcttgtgacatttctcacgatgctaccaagttttcatctacctctgctgacaagactgcaaagatctggagttttgatctccttttgccacttcatgaattgaggggccacaacggctgtgtgcgctgctctgccttctctgtggacagtaccctgctggcaacgggagatgacaatggagaaatcaggatatggaatgtctcaaacggtgagcttcttcatttgtgtgctccgctttcagaagaaggagctgctacccatggaggctgggtgactgacctttgcttttctccagatggcaaaatgcttatctctgctggaggatatattaagtggtggaacgttgtcactggggaatcctcacagaccttctacacaaatggaaccaatcttaagaaaatacacgtgtcccctgacttcaaaacatatgtgactgtggataatcttggtattttatatattttacagactttagaataaaatagttaagcattaatgtagttgaactttttaaatttttgaattggaaaaaaattctaatgaaaccctgatatcaactttttataaagctcttaattgttgtgcagtattgcattcattacaaaagtgtttgtggttggatgaataatattaatgtagctttttcccaaatgaacatacctttaatcttgtttttcatgatcatcattaacagtttgtccttaggatgcaaatgaaaatgtgaatacataccttgttgtactgttggtaaaattctgtcttgatgcattcaaaatggttgacataattaatgagaagaatttggaagaaattggtattttaatactgtctgtatttattactgttatgcaggctgtgcctcagggtagcagtggcctgctttttgaaccacacttaccccaagggggttttgttctcctaaatacaatcttagaggttttttgcactctttaaatttgctttaaaaatattgtgtctgtgtgcatagtctgcagcatttcctttaattgactcaataagtgagtcttggatttagcaggcccccccaccttttttttttgtttttggagacagagtcttgctttgttgccaggctggagtgcagtggcgcgatctcggctcaccacaatcgctgcctcctgggttcaagcaattctcctgcctcagcctcccgagtagctgggactacaggtgtgcgcacatgccaggctaatttttgtatttttagtagagacggggtttcaccatgttggccgggatggtctcgatctcttgacctcatgatctacccgccttggcctcccaaagtgctgagattacaggcgtgagccaccgtgcctggccaggccccttctcttttaatggagacagggtcttgcactatcacccaggctggagtgcagtggcataatcatacctcattgcagcctcagactcctgggttcaagcaatcctcctgcctcagcctcccaagtagctgagactacaggcacgagccaccacacccagctaatttttaagttttcttgtagagacagggtctcactatgttgtctaggctggtcttgaactcttggcctcaagtaatcctcctgcctcagcctcccaaagtgttgggattgcagatatgagccactggcctggccttcagcagttctttttgtgaagtaaaacttgtatgttggaaagagtagattttattggtctacccttttctcactgtagctgctggcagccctgtgccatatctggactctagttgtcagtatctgagttggacactattcctgctccctcttgtttcttacatatcagacttcttacttgaatgaaacctgatctttcctaatcctcacttttttcttttttaaaaagcagtttctccactgctaaatgttagtcattgaggtggggccaattttaatcataagccttaataagatttttctaagaaatgtgaaatagaacaattttcatctaattccatttacttttagatgaatggcattgtgaatgccattcttttaatgaatttcaagagaattctctggttttctgtgtaattccagatgagtcactgtaactctagaagattaaccttccagccaacctattttcctttcccttgtctctctcatcctcttttccttccttctttcctttctcttcttttatctccaaggttaatcaggaaaaatagcttttgacaggggaaaaaactcaataactagctatttttgacctcctgatcaggaactttagttgaagcgtaaatctaaagaaacattttctctgaaatatattattaagggcaatggagataaattaatagtagatgtggttcccagaaaatataatcaaaattcaaagattttttttgtttctgtaactggaactaaatcaaatgattactagtgttaatagtagataacttgtttttattgttggtgcatattagtataactgtggggtaggtcggggagagggtaagggaatagatcactcagatgtattttagataagctatttagcctttgatggaatcataaatacagtgaatacaatcctttgcattgttaaggaggttttttgtttttaaatggtgggtcaaggagctagtttacaggcttactgtgatttaagcaaatgtgaaaagtgaaaccttaattttatcaaaagaaatttctgtaaatggtatgtctccttagaatacccaaatcataattttatttgtacacactgttaggggctcatctcatgtaggcagagtataaagtattaccttttggaattaaaagccactgactgttataaagtataacaacacacatcaggttttaaaaagccttgaatggcccttgtcttaaaaagaaattaggagccaggtgcggtggcacgtgcctgtaatcccagctccttgggaggctaagacaggaggattccttgagccctggagtttgagtccagcctgggtgacatagcaagaccctgtcttaaaagaaaaatgggaagaaagacaaggtaacatgaagaaagaagagatacctagtatgatggagctgcaaatttcatggcagttcatgcagtcggtcaagaggaggattttgttttgtagtttgcagatgagcatttctaaagcattttcccttgctgtatttttttgtattataaattacattggacttcatatatataatttttttttacattatatgtctcttgtatgttttgaaactcttgtatttatgatatagcttatatgatttttttgccttggtatacattttaaaatatgaatttaaaaaatttttgtaaaaataaaattcacaaaattgttttg

SEQ ID NO: 175011 - DNA, 3714 bp, Artificial Sequence
  derived and/or modified sequence
atggacgccaaggccagaaactgcctgctgcagcacagagaggccctggagaaggacatcaagaccagctacatcatggaccacatgatcagcgacggcttcctgaccatcagcgaggaggagaaggtgagaaacgagcccacccagcagcagagagccgccatgctgatcaagatgatcctgaagaaggacaacgacagctacgtgagcttctacaacgccctgctgcacgagggctacaaggacctggccgccctgctgcacgacggcatccccgtggtgagcagcagcagcgtgagaaccgtgctgtgcgagggcggcgtgccccagagacccgtggtgttcgtgaccagaaagaagctggtgaacgccatccagcagaagctgagcaagctgaagggcgagcccggctgggtgaccatccacggcatggccggctgcggcaagagcgtgctggccgccgaggccgtgagagaccacagcctgctggagggctgcttccccggcggcgtgcactgggtgagcgtgggcaagcaggacaagagcggcctgctgatgaagctgcagaacctgtgcaccagactggaccaggacgagagcttcagccagagactgcccctgaacatcgaggaggccaaggacagactgagaatcctgatgctgagaaagcaccccagaagcctgctgatcctggacgacgtgtgggacagctgggtgctgaaggccttcgacagccagtgccagatcctgctgaccaccagagacaagagcgtgaccgacagcgtgatgggccccaagtacgtggtgcccgtggagagcagcctgggcaaggagaagggcctggagatcctgagcctgttcgtgaacatgaagaaggccgacctgcccgagcaggcccacagcatcatcaaggagtgcaagggcagccccctggtggtgagcctgatcggcgccctgctgagagacttccccaacagatgggagtactacctgaagcagctgcagaacaagcagttcaagagaatcagaaagagcagcagctacgactacgaggccctggacgaggccatgagcatcagcgtggagatgctgagagaggacatcaaggactactacaccgacctgagcatcctgcagaaggacgtgaaggtgcccaccaaggtgctgtgcatcctgtgggacatggagaccgaggaggtggaggacatcctgcaggagttcgtgaacaagagcctgctgttctgcgacagaaacggcaagagcttcagatactacctgcacgacctgcaggtggacttcctgaccgagaagaactgcagccagctgcaggacctgcacaagaagatcatcacccagttccagagataccaccagccccacaccctgagccccgaccaggaggactgcatgtactggtacaacttcctggcctaccacatggccagcgccaagatgcacaaggagctgtgcgccctgatgttcagcctggactggatcaaggccaagaccgagctggtgggccccgcccacctgatccacgagttcgtggagtacagacacatcctggacgagaaggactgcgccgtgagcgagaacttccaggagttcctgagcctgaacggccacctgctgggcagacagcccttccccaacatcgtgcagctgggcctgtgcgagcccgagaccagcgaggtgtaccagcaggccaagctgcaggccaagcaggaggtggacaacggcatgctgtacctggagtggatcaacaagaagaacatcaccaacctgagcagactggtggtgagaccccacaccgacgccgtgtaccacgcctgcttcagcgaggacggccagagaatcgccagctgcggcgccgacaagaccctgcaggtgttcaaggccgagaccggcgagaagctgctggagatcaaggcccacgaggacgaggtgctgtgctgcgccttcagcaccgacgacagattcatcgccacctgcagcgtggacaagaaggtgaagatctggaacagcatgaccggcgagctggtgcacacctacgacgagcacagcgagcaggtgaactgctgccacttcaccaacagcagccaccacctgctgctggccaccggcagcagcgactgcttcctgaagctgtgggacctgaaccagaaggagtgcagaaacaccatgttcggccacaccaacagcgtgaaccactgcagattcagccccgacgacaagctgctggccagctgcagcgccgacggcaccctgaagctgtgggacgccaccagcgccaacgagagaaagagcatcaacgtgaagcagttcttcctgaacctggaggacccccaggaggacatggaggtgatcgtgaagtgctgcagctggagcgccgacggcgccagaatcatggtggccgccaagaacaagatcttcctgttcgacatccacaccagcggcctgctgggcgagatccacaccggccaccacagcaccatccagtactgcgacttcagcccccagaaccacctggccgtggtggccctgagccagtactgcgtggagctgtggaacaccgacagcagaagcaaggtggccgactgcagaggccacctgagctgggtgcacggcgtgatgttcagccccgacggcagcagcttcctgaccagcagcgacgaccagaccatcagactgtgggagaccaagaaggtgtgcaagaacagcgccgtgatgctgaagcaggaggtggacgtggtgttccaggagaacgaggtgatggtgctggccgtggaccacatcagaagactgcagctgatcaacggcagaaccggccagatcgactacctgaccgaggcccaggtgagctgctgctgcctgagcccccacctgcagtacatcgccttcggcgacgagaacggcgccatcgagatcctggagctggtgaacaacagaatcttccagagcagattccagcacaagaagaccgtgtggcacatccagttcaccgccgacgagaagaccctgatcagcagcagcgacgacgccgagatccaggtgtggaactggcagctggacaagtgcatcttcctgagaggccaccaggagaccgtgaaggacttcagactgctgaagaacagcagactgctgagctggagcttcgacggcaccgtgaaggtgtggaacatcatcaccggcaacaaggagaaggacttcgtgtgccaccagggcaccgtgctgagctgcgacatcagccacgacgccaccaagttcagcagcaccagcgccgacaagaccgccaagatctggagcttcgacctgctgctgcccctgcacgagctgagaggccacaacggctgcgtgagatgcagcgccttcagcgtggacagcaccctgctggccaccggcgacgacaacggcgagatcagaatctggaacgtgagcaacggcgagctgctgcacctgtgcgcccccctgagcgaggagggcgccgccacccacggcggctgggtgaccgacctgtgcttcagccccgacggcaagatgctgatcagcgccggcggctacatcaagtggtggaacgtggtgaccggcgagagcagccagaccttctacaccaacggcaccaacctgaagaagatccacgtgagccccgacttcaagacctacgtgaccgtggacaacctgggcatcctgtacatcctgcagaccctggagtag

SEQ ID NO: 175012 - protein, 660 aa, Artificial Sequence
  derived and/or modified sequence
MGLQTTKWPSHGAFFLKSWLIISLGLYSQVSKLLACPSVCRCDRNFVYCNERSLTSVPLGIPEGVTVLYLHNNQINNAGFPAELHNVQSVHTVYLYGNQLDEFPMNLPKNVRVLHLQENNIQTISRAALAQLLKLEELHLDDNSISTVGVEDGAFREAISLKLLFLSKNHLSSVPVGLPVDLQELRVDENRIAVISDMAFQNLTSLERLIVDGNLLTNKGIAEGTFSHLTKLKEFSIVRNSLSHPPPDLPGTHLIRLYLQDNQINHIPLTAFSNLRKLERLDISNNQLRMLTQGVFDNLSNLKQLTARNNPWFCDCSIKWVTEWLKYIPSSLNVRGFMCQGPEQVRGMAVRELNMNLLSCPTTTPGLPLFTPAPSTASPTTQPPTLSIPNPSRSYTPPTPTTSKLPTIPDWDGRERVTPPISERIQLSIHFVNDTSIQVSWLSLFTVMAYKLTWVKMGHSLVGGIVQERIVSGEKQHLSLVNLEPRSTYRICLVPLDAFNYRAVEDTICSEATTHASYLNNGSNTASSHEQTTSHSMGSPFLLAGLIGGAVIFVLVVLLSVFCWHMHKKGRYTSQKWKYNRGRRKDDYCEAGTKKDNSILEMTETSFQIVSLNNDQLLKGDFRLQPIYTPNGGINYTDCHIPNNMRYCNSSVPDLEHCHT

SEQ ID NO: 175013 - protein, 313 aa, Artificial Sequence
  derived and/or modified sequence
MAVRELNMNLLSCPTTTPGLPLFTPAPSTASPTTQPPTLSIPNPSRSYTPPTPTTSKLPTIPDWDGRERVTPPISERIQLSIHFVNDTSIQVSWLSLFTVMAYKLTWVKMGHSLVGGIVQERIVSGEKQHLSLVNLEPRSTYRICLVPLDAFNYRAVEDTICSEATTHASYLNNGSNTASSHEQTTSHSMGSPFLLAGLIGGAVIFVLVVLLSVFCWHMHKKGRYTSQKWKYNRGRRKDDYCEAGTKKDNSILEMTETSFQIVSLNNDQLLKGDFRLQPIYTPNGGINYTDCHIPNNMRYCNSSVPDLEHCHT

SEQ ID NO: 175014 - DNA, 7943 bp, Artificial Sequence
  derived and/or modified sequence
agttgtacgttcgaaacctgtcgccgtcacttgcgcgtttggcattatccattgtcaccgcggaggaacgagcgctcgagatatcatcagtgcccgcaaatctccgcgccaaggcgctgagctactcctttccgaggtgcgcctctggtcctccgtccctggtgcccagcagcggcgaggcggcatctccgctcccgccgccgtgtccaccgagccctgggatcagggtggcagttctcaacgatgggcaggagggacctcggcggcgacccctaaaacaataccatgccccgggatccccgctgctgccgcgccagcgtcttccctttccacctccctgaccctgtcggattcggatgagcccattgcaaggagaagacgcagccgtcagattgcagattgagcttaaccaagaagttcgtaggctaatcaaggctggcttgacctacaaaagaagaagagagttctgcctgcccacttgggcttgtgttgacacggctgataacttgccatcacctgttgccagtgtggaaaaattctccctgttgaattttttgcacatggaggacagcagcaaagagggcaacacaggctgataagaccagagacagcagggagattattttaccatacgccctcaggacgttccctctagctggagttctggacttcaacagaaccccatccagtcattttgattttgctgtttattttttttttctttttctttttcccaccacattgtattttatttccgtacttcagaaatgggcctacagaccacaaagtggcccagccatggggcttttttcctgaagtcttggcttatcatttccctggggctctactcacaggtgtccaaactcctggcctgccctagtgtgtgccgctgcgacaggaactttgtctactgtaatgagcgaagcttgacctcagtgcctcttgggatcccggagggcgtaactgtactctacctccacaacaaccaaattaataatgctggatttcctgcagaactgcacaatgtacagtcggtgcacacggtctacctgtatggcaaccaactggacgaattccccatgaaccttcccaagaatgtcagagttctccatttgcaggaaaacaatattcagaccatttcacgggctgctcttgcccagctcttgaagcttgaagagctgcacctggatgacaactccatatccacagtgggggtggaagacggggccttccgggaggctattagcctcaaattgttgtttttgtctaagaatcacctgagcagtgtgcctgttgggcttcctgtggacttgcaagagctgagagtggatgaaaatcgaattgctgtcatatccgacatggccttccagaatctcacgagcttggagcgtcttattgtggacgggaacctcctgaccaacaagggtatcgccgagggcaccttcagccatctcaccaagctcaaggaattttcaattgtacgtaattcgctgtcccaccctcctcccgatctcccaggtacgcatctgatcaggctctatttgcaggacaaccagataaaccacattcctttgacagccttctcaaatctgcgtaagctggaacggctggatatatccaacaaccaactgcggatgctgactcaaggggtttttgataatctctccaacctgaagcagctcactgctcggaataacccttggttttgtgactgcagtattaaatgggtcacagaatggctcaaatatatcccttcatctctcaacgtgcggggtttcatgtgccaaggtcctgaacaagtccgggggatggccgtcagggaattaaatatgaatcttttgtcctgtcccaccacgacccccggcctgcctctcttcaccccagccccaagtacagcttctccgaccactcagcctcccaccctctctattccaaaccctagcagaagctacacgcctccaactcctaccacatcgaaacttcccacgattcctgactgggatggcagagaaagagtgaccccacctatttctgaacggatccagctctctatccattttgtgaatgatacttccattcaagtcagctggctctctctcttcaccgtgatggcatacaaactcacatgggtgaaaatgggccacagtttagtagggggcatcgttcaggagcgcatagtcagcggtgagaagcaacacctgagcctggttaacttagagccccgatccacctatcggatttgtttagtgccactggatgcttttaactaccgcgcggtagaagacaccatttgttcagaggccaccacccatgcctcctatctgaacaacggcagcaacacagcgtccagccatgagcagacgacgtcccacagcatgggctccccctttctgctggcgggcttgatcgggggcgcggtgatatttgtgctggtggtcttgctcagcgtcttttgctggcatatgcacaaaaaggggcgctacacctcccagaagtggaaatacaaccggggccggcggaaagatgattattgcgaggcaggcaccaagaaggacaactccatcctggagatgacagaaaccagttttcagatcgtctccttaaataacgatcaactccttaaaggagatttcagactgcagcccatttacaccccaaatgggggcattaattacacagactgccatatccccaacaacatgcgatactgcaacagcagcgtgccagacctggagcactgccatacgtgacagccagaggcccagcgttatcaaggcggacaattagactcttgagaacacactcgtgtgtgcacataaagacacgcagattacatttgataaatgttacacagatgcatttgtgcatttgaatactctgtaatttatacggtgtactatataatgggatttaaaaaaagtgctatcttttctatttcaagttaattacaaacagttttgtaactctttgctttttaaatcttaaaaaaaaaaaagttgctgaagtactgtacagggttgtacaatgagaacccaatgccaaggcaaaaagaacgagtgatttttccttaggatacacatcaaccactttgctgttgaagctgtcagaataaattcctggtggtcagatgaaagggcagattaaatggactcatcagggtaagaggaataatatgggtaaaacaagaaatggcccgatagtttcacactattcctatacctccaggtccggaagacaggtaaaaaattctataatgtaagaatggaggtagttaccctgatttgaccctgtgtgggaaatgctgaaagcaccaggaggaagccggttcccgtgagataagttaacccggcctgacagaatcaagaaaattgagatgagatttgaaaggacccgaaaatgcaggggttggctttctgactgggaacttaaaaatcactcttcatgcttccctggtcctatgtgataacagagttagagacttgagtctgatttcagtcatcttcagggaccagtctgatgttgtagcaagaagactccctttaaaagtgttactgttcaaatcatatatcaggttgaatcacattcaacagagatatattctagaatacttttttagaagaggctaataaagggaagaattatattgaatggaattatttttgataatgagaattatttgggtagattcactgaggctatgtcaacatgatatttagaccaacaggtgatcaatgtttggaaaatacaacaatgacttatttaaaaattacccttcctgctatttagacaaaaacaactgatcagtggttctgttatgtcagctgactttgttagtatcatgttgaaatagcttgaagtaatatcttttatccccttgcaaattcttgtcttccaatcatctcccatatattttcataattagttgtttatgacacctttgtttttctccctctgttcagtatttcaaggaaaattatggatgccagtcttggctgcacaagatatccattacgtacttatacattttaaaatgagtactaattttcactgctaataattctgtaaggacacatcaaagctggccaaaataatgaattttttttaaaaagcaatacctggtttccaccttggactgactttgatcctgttccacttttgaaattttatttgttccttttccatcgtggatgttcctctactttggcaattgtggagggctaatcaatcttatgttagcaggacaacccatgaaaaacaagtcagagagtgaaggctttttcccctaatcctggcagagcagggcgtagaaaagagaggatgtccgtgcttaattctagatacttttgagacaacaccttcagaaaacacataatttaatctttgccatccttagatagagaagggctatagatcacatacgttatcaaaaactactcccttggaaaaaatatctttcgaaaatcaaatttaaacatttcactctgtgctgcatatttcttttaccattgaccattattatagggacccatgaagtaaatgtcacaatcatcttactagctctctctctctcagcaaaataaaactgtgatgtgtcttctttgtaaaagtttaggtataaaatgctatgcaactttttctttatagtaagagctttattttctttaataatatagcccaacttatatgttttaatctcccttgtccctcagaataagcagaaaatataactgcagctgtatgtcgtagacacaagaattgaaactgtgcagtcagtagagctgaacttagctatgaattaatttaaattaattctaaagtgactctggtttccattttagtctattagctagagggttttggctgttgctttttttaaagttaggtccacacagtgaagggaaaagagtctgtgaaggtgatcagtgtagcagtaagacatctaaaatcaagacaatgacatgggggctttgtgtacttagctggataattcccttctactgtcctcttccccttggctgtgtagataaaattgtgcattcaaatgatggtactttgacttttgagggtttttatttctgttattcacaaaatactcattctcatttatgtatattgtatgtttaacccccagtgggatttctggctgctgaaaccactttgggccaggaagaacaaggatgaagaggttcctgtcatttcttatggggttcacagaattatttggggcttaaatggtacaatggagacagtcatgtgcaatgcttaagatggtctgacagggtcccttttgctggaggtgttcctgaagagattgaacctagtaacaggctttattttcaccttgtgtacaacatggcaaagactgctaagattaaaatccgtctcccatttgttacagcctcacctgcaccaggatagaaagcacgtgatggaatctgtgatgtctaatgtgtcttatgaaaattgccaaacaactgtccctggggattctgctttgattggcatttttagtcatgggaatgtatatttgctgatatatctgctctgtgtttgggcctctcttgctgtcattatgatgtattttgagatgattagtcaagagtcaaggttgcgagtacaggccaagaccatgggaaaaaaagccatgctcactggccaataaagagcttgatgctgcctggccaaatgaggtgactcagatagaatctgatcccattcagagcttggtaaatgtcactgtacagaagacattgaaaaggaagaggcatagtcatgatcaaaaggatatattgacagttatctatagccagggtagttgttaatacctgcttgtttggggagatatgtttgattatagagagactctgggccaccctcaaacaccgtcagatgcattagcagcccactgcatgggacaatcgcaggcagatacgaggaatgtatcccctgcctattttccttgtgtaacaaatggaaaacattctcccctgtgagaaataatgcaatttctaattatctggatgttcgttgaaaatatattagacattctccctgaggttaaaaacaaaaagtacgtgaccagtctggtaagaagtattaatgaagtagctaatattacagcttcattttctactagcacctatcataatggtcttagtcatttcacacaaatcagaacttccttccccaccagggaggacaacatcttcatgctgtgattgaagcatccattcagaacacgaggcaatattgcagtccacagggaatggatgcttcacttgatctccggaccttggctgcagaggccatcgcagcttttgaaaagtgaaggggttaattcccattggtgtctttgcttatagcatttttctctaacctataacaaggagacattacattttactttagaacatgagaatagcagttttgctcatgacttaccattccagctgcatgggaaagcaaagcagaaaacagtgccccaaatggaaaaaagatactcacacagaacaaaacagttcttggtcttgttcttggtcttgtcaaaccttgcctgatgctctttctaaagtcaaaatatgaatgctaagaaggcataacctacatccttctctgatttcttcagcagggtcaaaagacagttactagcaatggggaatgcttgtcactgtggagaaagagttttgtatatgtctgataccgttgttataacaaaacaaatttttttactatagttttttgttttctacctgcacacccaccagaagagcacaaagcaaggccattgcaacaggcatttaaaaattattatcaaacatgcacatgcttgtacacacacacacacacacacacaaacaggggcatttgtaaaggtgtccctggaatgtaagatttataatgtttaaggcaaggtgaaggcattgccaagtgtgtgtcgctcataggactagtgtatattcactgaaagttaacctgatgatttgttattgtttgaaccatatgctgatttgcttctggtttctgtttagtgtgttctctctgataaggggctgaaagattctgcatcacacatcctctgagacctaccatgtcgcacactttgttaatgacaaacttcactctacactatacagtaccttgttgatatattcagtaaagtcttattttaaaagaaaaccacattgtgtttatctgagtaagttcattgggatacagtcaatacttgtgctgttaatgtagaagaaatgacgcaggagggcaggaataaaagaggtaataggactttcgtattctcctatcatgaatatgacttgcatttctaaaggccatttgatcctttttgtgtgaggagtttatatgaaatcctcatgttcttttaaatttcccaactaaattgtgtgttcctacgaataccttttaggtatgcacacatacacagagcatcttattttatactggtgaaatctatgttgtttaggatacagataatgtcattgtatttatcctatcagaataggcttttcccctatttcaaaatagatgctattggctttattttttatttttaaattttttttaaacacggtcttaccatgttgcccaggctggtctcaaactcctagatgcaagcaatcatcccacctcgatcacccaaagtgctgggagtacaggcagaggacaccatgcccagccacgctattggttttaaatgtcagatttctttaagaattctcatagtacttttctgccgcagaatttatagcacatctgtccatcctttcaataggcactcaaggaaatgtatctattcatatgctcaacttcaattgattagtctcatatgatttttcagaaccccttttgctaacccctcttggccatttcattaataatgtatttgacagagattgaatcaggaaataaattcatgacatttcagttaa

SEQ ID NO: 175015 - DNA, 1557 bp, Artificial Sequence
  derived and/or modified sequence
agagcgcgagggacggagggagaggaggagcgcgggagctgcggaggcgatcccgcgaattcattactgtaaacatatccgggggtgtcaggaggggtaggggggatggccgtcagggaattaaatatgaatcttttgtcctgtcccaccacgacccccggcctgcctctcttcaccccagccccaagtacagcttctccgaccactcagcctcccaccctctctattccaaaccctagcagaagctacacgcctccaactcctaccacatcgaaacttcccacgattcctgactgggatggcagagaaagagtgaccccacctatttctgaacggatccagctctctatccattttgtgaatgatacttccattcaagtcagctggctctctctcttcaccgtgatggcatacaaactcacatgggtgaaaatgggccacagtttagtagggggcatcgttcaggagcgcatagtcagcggtgagaagcaacacctgagcctggttaacttagagccccgatccacctatcggatttgtttagtgccactggatgcttttaactaccgcgcggtagaagacaccatttgttcagaggccaccacccatgcctcctatctgaacaacggcagcaacacagcgtccagccatgagcagacgacgtcccacagcatgggctccccctttctgctggcgggcttgatcgggggcgcggtgatatttgtgctggtggtcttgctcagcgtcttttgctggcatatgcacaaaaaggggcgctacacctcccagaagtggaaatacaaccggggccggcggaaagatgattattgcgaggcaggcaccaagaaggacaactccatcctggagatgacagaaaccagttttcagatcgtctccttaaataacgatcaactccttaaaggagatttcagactgcagcccatttacaccccaaatgggggcattaattacacagactgccatatccccaacaacatgcgatactgcaacagcagcgtgccagacctggagcactgccatacgtgacagccagaggcccagcgttatcaaggcggacaattagactcttgagaacacactcgtgtgtgcacataaagacacgcagattacatttgataaatgttacacagatgcatttgtgcatttgaatactctgtaatttatacggtgtactatataatgggatttaaaaaaagtgctatcttttctatttcaagttaattacaaacagttttgtaactctttgctttttaaatcttaaaaaaaaaaaagttgctgaagtactgtacagggttgtacaatgagaacccaatgccaaggcaaaaagaacgagtgatttttccttaggatacacatcaaccactttgctgttgaagctgtcagaataaattcctggtggtcagatgaaagggcagattaaatggactcatcagggtaagaggaataatatgggtaaaacaagaaatggcccgatagtttcacactattcctatacctccaggtccggaagacaggtaaaaaattctataatgtaag

SEQ ID NO: 175016 - DNA, 3278 bp, Artificial Sequence
  derived and/or modified sequence
catcagtgcccgcaaatctccgcgccaaggcgctgagctactcctttccgaggtgcgcctctggtcctccgtccctggtgcccagcagcggcgaggcggcatctccgctcccgccgccgtgtccaccgagccctgggatcagggtggcagttctcaacgatgggcaggagggacctcggcggcgacccctaaaacaataccatgccccgggatccccgctgctgccgcgccagcgtcttccctttccacctccctgaccctgtcggattcggatgagcccattgcaaggagaagacgcagccgtcaggtaaaaggggctgcgttgccagattgcagattgagcttaaccaagaagttcgtaggctaatcaaggctggcttgacctacaaaagaagaagagagttctgcctgcccacttgggcttgtgttgacacggctgataacttgccatcacctgttgccagtgtggaaaaattctccctgttgaattttttgcacatggaggacagcagcaaagagggcaacacaggctgataagaccagagacagcagggagattattttaccatacgccctcaggacgttccctctagctggagttctggacttcaacagaaccccatccagtcattttgattttgctgtttattttttttttctttttctttttcccaccacattgtattttatttccgtacttcagaaatgggcctacagaccacaaagtggcccagccatggggcttttttcctgaagtcttggcttatcatttccctggggctctactcacaggtgtccaaactcctggcctgccctagtgtgtgccgctgcgacaggaactttgtctactgtaatgagcgaagcttgacctcagtgcctcttgggatcccggagggcgtaactgtactctacctccacaacaaccaaattaataatgctggatttcctgcagaactgcacaatgtacagtcggtgcacacggtctacctgtatggcaaccaactggacgaattccccatgaaccttcccaagaatgtcagagttctccatttgcaggaaaacaatattcagaccatttcacgggctgctcttgcccagctcttgaagcttgaagagctgcacctggatgacaactccatatccacagtgggggtggaagacggggccttccgggaggctattagcctcaaattgttgtttttgtctaagaatcacctgagcagtgtgcctgttgggcttcctgtggacttgcaagagctgagagtggatgaaaatcgaattgctgtcatatccgacatggccttccagaatctcacgagcttggagcgtcttattgtggacgggaacctcctgaccaacaagggtatcgccgagggcaccttcagccatctcaccaagctcaaggaattttcaattgtacgtaattcgctgtcccaccctcctcccgatctcccaggtacgcatctgatcaggctctatttgcaggacaaccagataaaccacattcctttgacagccttctcaaatctgcgtaagctggaacggctggatatatccaacaaccaactgcggatgctgactcaaggggtttttgataatctctccaacctgaagcagctcactgctcggaataacccttggttttgtgactgcagtattaaatgggtcacagaatggctcaaatatatcccttcatctctcaacgtgcggggtttcatgtgccaaggtcctgaacaagtccgggggatggccgtcagggaattaaatatgaatcttttgtcctgtcccaccacgacccccggcctgcctctcttcaccccagccccaagtacagcttctccgaccactcagcctcccaccctctctattccaaaccctagcagaagctacacgcctccaactcctaccacatcgaaacttcccacgattcctgactgggatggcagagaaagagtgaccccacctatttctgaacggatccagctctctatccattttgtgaatgatacttccattcaagtcagctggctctctctcttcaccgtgatggcatacaaactcacatgggtgaaaatgggccacagtttagtagggggcatcgttcaggagcgcatagtcagcggtgagaagcaacacctgagcctggttaacttagagccccgatccacctatcggatttgtttagtgccactggatgcttttaactaccgcgcggtagaagacaccatttgttcagaggccaccacccatgcctcctatctgaacaacggcagcaacacagcgtccagccatgagcagacgacgtcccacagcatgggctccccctttctgctggcgggcttgatcgggggcgcggtgatatttgtgctggtggtcttgctcagcgtcttttgctggcatatgcacaaaaaggggcgctacacctcccagaagtggaaatacaaccggggccggcggaaagatgattattgcgaggcaggcaccaagaaggacaactccatcctggagatgacagaaaccagttttcagatcgtctccttaaataacgatcaactccttaaaggagatttcagactgcagcccatttacaccccaaatgggggcattaattacacagactgccatatccccaacaacatgcgatactgcaacagcagcgtgccagacctggagcactgccatacgtgacagccagaggcccagcgttatcaaggcggacaattagactcttgagaacacactcgtgtgtgcacataaagacacgcagattacatttgataaatgttacacagatgcatttgtgcatttgaatactctgtaatttatacggtgtactatataatgggatttaaaaaaagtgctatcttttctatttcaagttaattacaaacagttttgtaactctttgctttttaaatcttaaaaaaaaaaaagttgctgaagtactgtacagggttgtacaatgagaacccaatgccaaggcaaaaagaacgagtgatttttccttaggatacacatcaaccactttgctgttgaagctgtcagaataaattcctggtggtcagatgaaagggcagattaaatggactcatcagggtaagaggaataatatgggtaaaacaagaaatggcccgatagtttcacactattcctatacctccaggtccggaagacaggtaaaaaattctataatgtaagaatggaggtagttaccctgatttgaccctgtgtgggaaatgctgaaagcaccaggaggaagccggttcccgtgagataag

SEQ ID NO: 175017 - DNA, 1983 bp, Artificial Sequence
  derived and/or modified sequence
atgggcctgcagactacgaagtggccctctcatggggcctttttcctcaagagctggctcatcatctctctcgggctgtactctcaggtttctaagctgctggcctgtccttcagtatgcagatgcgatcgaaattttgtctactgcaacgaacggtctctaacttccgtgcccctcggcatcccagaaggcgtgacagtgctgtatctacataataaccagattaataacgccggatttcctgcggagctgcacaatgtgcagagtgttcacaccgtatacctctacggtaaccagctcgacgagtttcctatgaacctgccaaaaaacgtaagggtgctccacctacaggagaataacatccagaccattagtcgcgccgctctggctcagttgttgaaattagaggagttacatctggacgacaacagcatcagcactgtaggggtagaggatggggcctttcgagaggcgatctcgctcaaactgctgtttctcagtaagaatcatctgtcttctgttcccgtgggactgcccgttgatctgcaggaactaagggtggacgagaacagaattgctgtcatctccgacatggcttttcagaacctcacatctcttgagcgcctgatcgtggacggcaaccttctgacgaataagggcattgcagagggcaccttctctcatctgactaagctgaaagaattctcgattgttcggaactcactgagccatcctccaccggacctgccgggcacacatctcatacgactatatctccaggataaccaaatcaatcatattcctctgacagctttcagtaatctgagaaaacttgagaggttggatatctctaacaatcagttgcgtatgttgacgcagggggtatttgacaacctatccaatctgaagcagttgaccgccagaaataacccttggttctgcgactgtagcatcaagtgggtgacagagtggctgaaatacatacccagcagcttaaatgtgaggggattcatgtgccaggggcccgagcaggttcgaggaatggctgtgagggagttgaatatgaacctcttgagctgtcccaccacgacccctggcctcccactcttcacaccagcaccatcaaccgctagtccaaccactcagccaccaacattatcgatcccaaacccttcaagaagttacactcctccgacccccacaacatcgaaattgcccacaatccctgactgggacggtagggagcgcgtgacccccccgatctcagagagaattcagctttcaatacattttgtaaatgatacatccatccaagtgtcctggctcagcctgtttacagtgatggcctacaagctgacctgggtgaaaatgggacactctctggtgggggggatcgtgcaggagaggatcgttagtggagaaaaacagcatctcagcctggtaaacttggagcctaggtcaacttaccggatttgtctagtgccattagatgccttcaattatcgggcagtcgaggataccatctgctctgaagctactacccacgcctcgtaccttaataatggaagtaataccgcatcaagtcacgagcagactacaagtcacagcatgggctcacctttcctcctggctgggctgattgggggggcagtgatatttgtgctcgtggtcctactttctgtgttttgctggcacatgcacaagaaaggacggtacacgtctcagaaatggaaatacaatcgtgggcggcgtaaagatgattactgcgaagccggtaccaagaaagataactccattctggagatgacagagacgtcgtttcagatcgtctctcttaataacgatcagcttctaaagggagattttagactccaaccaatatatactcctaacggtggaataaactacacagactgccacatccctaacaacatgagatactgtaattcgtccgtacctgaccttgaacactgccatacatag

SEQ ID NO: 175018 - DNA, 942 bp, Artificial Sequence
  derived and/or modified sequence
atggccgtccgcgagttgaacatgaaccttctctcttgcccaactacaaccccggggcttcccctgtttactccggctccatcaactgcgtcccccacgacccagccacctacattgtctatacctaaccccagcaggtcctacacccctccaactcctacaacttcaaaattgcctacaatccccgattgggacggtagagagagggtgacccctcccattagcgagcggatccagttaagtattcactttgtgaacgacacaagcatacaggtatcatggttatccctgttcacagtcatggcctacaagctgacttgggttaagatggggcatagtcttgtgggaggaatcgtgcaggaaagaattgtgtctggcgaaaaacaacacctgtcactcgtgaatctggagccaagaagcacctatcgcatttgtctcgttccacttgacgcctttaattacagagcggtggaggacaccatctgcagcgaggccacaacacatgcttcttatttgaataacgggtccaacacggcttctagccatgagcagaccacctcccattcgatggggtcgccatttctcctagccggattaatcggaggcgccgttatcttcgtgcttgtggtcctattgagtgtgttttgttggcacatgcataaaaaaggcagatacacatcgcagaaatggaagtataacagaggtcgccgaaaggatgactattgcgaggccggcaccaagaaagataactccatcctggaaatgactgaaaccagcttccaaattgtcagcctcaataacgaccagcttctaaaaggcgatttccgactccagccaatttacacccccaatggcggcataaactataccgattgtcacatccccaataacatgcgctactgtaactctagcgtgccagacctggaacactgccatacatag

SEQ ID NO: 175019 - DNA, 1983 bp, Artificial Sequence
  derived and/or modified sequence
atgggtctccagacaacaaagtggccctctcacggggctttttttctgaagtcatggttaattatctcactagggctgtattcccaagtaagcaagttactggcttgcccatcagtgtgtcggtgtgaccgcaactttgtgtattgcaatgagcgatcacttacatccgtcccacttggcatcccggagggcgtcacagtgttatacctccataataatcagattaacaatgccggtttccctgcggagctacacaatgtgcagagtgttcatactgtttacttatacgggaatcagctggacgaattccccatgaatctgccgaaaaacgtccgggtactgcacctgcaggaaaacaacatccagaccatctcacgtgctgccttagctcagctgctaaaactagaggaacttcatttagacgacaacagcatatctacggtcggtgtggaggacggtgcctttagggaagctatatcactcaagttgttgttcctgagcaagaaccacctgagcagtgttccagtgggactgcccgttgatttgcaggagttgcgggtggacgaaaatagaatcgctgtgatcagcgacatggctttccagaatctgaccagtctcgagcggctcatcgtggatggcaacctactgaccaataaagggatcgcagagggtacgttttctcatttaaccaagctaaaagagttctctatcgtgcggaacagtctttcccacccgccaccagatctacctggaacacaccttataagactgtatcttcaagataaccaaattaaccatatacccctaaccgctttctccaacttgagaaagctcgaacgccttgacattagtaacaatcagctccgaatgcttacgcaaggagtgtttgacaacctcagcaatctgaagcagcttactgcccgaaacaatccgtggttttgtgattgtagcatcaaatgggtcaccgagtggctgaaatacataccaagctcactgaacgtcaggggattcatgtgccaaggccctgagcaagtccggggcatggccgttcgagaactgaatatgaacctcctgagttgccccaccaccacgccaggcctcccgcttttcacccccgccccctcgactgcatcccctactacccaaccacccacgttgtcaatccccaatccttcacggagctatactccaccaactcctaccacttccaagctaccaactatacctgactgggacggtagggagagagtcactccaccgatatcagagcgcatccagctttccattcacttcgttaacgatacatccattcaggtgtcctggttgtctctcttcaccgtgatggcatataagctaacttgggtaaagatgggccatagtctcgtgggaggcatcgttcaggagaggatagtctccggtgaaaaacagcacttgagtctggtcaatctcgaaccccgctcaacttatcgaatttgtttagtgcctttagacgcctttaattatagagctgtcgaggatacgatctgctcggaggcaactactcatgctagctatttgaataacggatccaatacagcatcttcacatgagcagacgaccagccactcaatgggttcccccttcctactggctggactcatcggaggggcagtgatcttcgtcctcgtggtgttgttgtctgtgttttgctggcacatgcacaagaaggggaggtacaccagccagaaatggaaatataacaggggccggaggaaagatgactattgcgaagccgggacaaaaaaagacaatagtattttagaaatgacggagacttcatttcagatcgtctccttgaacaatgaccagctgctcaagggggactttaggctccaaccaatttacacccccaatggtggaattaactatactgactgccacatccccaataatatgaggtactgtaattcttccgtgcctgatctggaacactgccacacgtag

SEQ ID NO: 175020 - DNA, 1983 bp, Artificial Sequence
  derived and/or modified sequence
atgggcctgcagaccaccaagtggcccagccatggagccttcttcctgaagtcctggctgatcatcagcctgggcctgtacagccaggtgtccaagctgctggcctgccccagcgtgtgccgctgtgacaggaactttgtgtactgcaatgaaagaagcctgacctctgtgcccctgggcatccctgagggcgtgacagtgctgtacctgcacaacaaccagatcaacaatgccggcttccctgctgagctgcacaacgtgcagagcgtgcacacagtgtacctgtatggcaaccagctggatgagttccccatgaacctgcccaagaatgtgcgggtgctgcacctgcaggagaacaacatccagaccatcagcagagctgccctggcccagctgctgaagctggaggagctgcacctggatgacaacagcatcagcacagtgggcgtggaggatggagccttccgggaggccatcagcctgaagctgctcttcctgagcaagaaccacctgagctctgtgcctgtgggcctgcctgtggacctgcaggagctgcgggtggatgaaaatagaattgctgtgatcagtgacatggccttccagaacctgaccagcctggagcggctcatcgtggatggcaacctgctgaccaacaagggcattgctgagggcaccttcagccacctgaccaagctgaaggagttcagcatcgtgaggaacagcctgagccaccccccaccagacctgcccggcacccacctgatccggctgtacctgcaggacaaccagatcaaccacatccccctgacagccttcagcaacctgaggaagctggagcggctggacatcagcaacaaccagctgaggatgctgacccagggcgtgtttgacaacctgagcaacctgaagcagctgacagccaggaacaacccctggttctgtgactgcagcatcaagtgggtgacagagtggctgaagtacatccccagcagcctgaatgtgcggggcttcatgtgccagggccctgagcaggtgcggggcatggctgtgcgggagctgaacatgaacctgctgagctgccccaccaccaccccaggcctgcccctcttcaccccagcccccagcacagccagccccaccacccagccccccaccctgagcatccccaaccccagccgcagctacaccccacccacccccaccaccagcaagctgcccaccatcccagactgggatggccgggagcgggtgaccccacccatcagcgagcgcatccagctgagcatccactttgtgaatgacaccagcatccaggtgtcctggctgagcctcttcaccgtgatggcctacaagctgacctgggtgaagatgggccacagcctggtgggcggcatcgtgcaggagcgcatcgtgtctggagagaagcagcacctgagcctggtgaacctggagcccaggagcacctaccgcatctgcctggtgcccctggatgccttcaactacagagctgtggaggacaccatctgcagcgaggccaccacccacgccagctacctgaacaacggcagcaacacagccagcagccatgagcagaccaccagccacagcatgggcagccccttcctgctggccggcctgattggaggagctgtgatctttgtgctggtggtgctgctgagcgtcttctgctggcacatgcacaagaagggccgctacaccagccagaagtggaagtacaacagaggaagaaggaaggatgactactgtgaggccggcaccaagaaggacaacagcatcctggagatgacagagaccagcttccagatcgtgtccctgaacaatgaccagctgctgaagggggacttccggctgcagcccatctacaccccaaatggaggcatcaactacacagactgccacatccccaacaacatgagatactgcaacagctctgtgcctgacctggagcactgccacacctag

SEQ ID NO: 175021 - DNA, 942 bp, Artificial Sequence
  derived and/or modified sequence
atggctgtgcgggagctgaacatgaacctgctgagctgccccaccaccaccccaggcctgcccctcttcaccccagcccccagcacagccagccccaccacccagccccccaccctgagcatccccaaccccagccgcagctacaccccacccacccccaccaccagcaagctgcccaccatcccagactgggatggccgggagcgggtgaccccacccatcagcgagcgcatccagctgagcatccactttgtgaatgacaccagcatccaggtgtcctggctgagcctcttcaccgtgatggcctacaagctgacctgggtgaagatgggccacagcctggtgggcggcatcgtgcaggagagaattgtgtctggagagaagcagcacctgagcctggtgaacctggagcccaggagcacctaccgcatctgcctggtgcccctggatgccttcaactacagagctgtggaggacaccatctgcagcgaggccaccacccacgccagctacctgaacaacggcagcaacacagccagcagccatgagcagaccaccagccacagcatgggcagccccttcctgctggccggcctcatcggcggcgctgtgatctttgtgctggtggtgctgctgtctgtgttctgctggcacatgcacaagaagggccgctacaccagccagaagtggaagtacaacagaggccgcaggaaggatgactactgtgaggccggcaccaagaaggacaacagcatcctggagatgacagagaccagcttccagatcgtgtccctgaacaatgaccagctgctgaagggggacttccggctgcagcccatctacacccccaacggcggcatcaactacacagactgccacatccccaacaacatgagatactgcaacagctctgtgcctgacctggagcactgccacacctag

SEQ ID NO: 175022 - DNA, 1983 bp, Artificial Sequence
  derived and/or modified sequence
atgggcctgcagaccaccaagtggcccagccacggcgccttcttcctgaaatcatggcttataatcagtcttgggttgtattcccaggtatccaagctgttagcctgtccctccgtgtgtaggtgcgatcgtaacttcgtgtactgcaacgagagatctttgacatcagtaccactgggcatcccggaaggcgtgacggtgctctaccttcacaataaccagataaataatgctggcttcccggcagaactccacaacgtgcagtccgtgcatacggtttatctgtatggcaatcagctggatgagttcccaatgaatttgcctaaaaatgttagggtcctacacttgcaggagaacaacattcagactattagccgcgccgccttggcacagctcctgaaactggaggagctacatttagacgataacagcatcagtactgtgggcgtggaggacggcgcattccgggaagctatcagcctcaaactgctatttctttctaaaaaccacctgtctagcgttcccgttgggttgccagtagacctgcaagagctgagggtagatgaaaacagaatcgccgtgataagtgacatggccttccaaaacctcacttcactcgaaagattgatcgttgacggaaacctgctcaccaacaaggggatcgctgagggcactttcagtcacctgactaaactgaaagagttttccattgtgcggaactccctatctcatcctccccctgaccttcctggaacgcatctgattaggttatatctgcaggacaatcagatcaatcacattcctcttactgctttctcaaatcttagaaagcttgagcgactggatatctccaacaaccaattacggatgcttacccagggcgtatttgataacctttcaaatcttaaacaactcacagccaggaacaatccctggttttgcgattgttccattaaatgggtgaccgagtggctgaaatacattccatcttcccttaacgtacggggtttcatgtgtcaaggacctgaacaggtgcggggcatggcagttagggaactgaacatgaacctgctgtcctgcccgactacaaccccaggactcccccttttcacacccgccccatcaaccgcttctccgaccacccagccccccacgctcagcatcccgaaccccagcagaagctacaccccgccaaccccgacaacctctaaattaccaaccatccccgactgggacggccgggagagagttacccctcctataagcgagcggattcagttaagcattcattttgttaatgacacatccattcaggtgagttggctttcattatttaccgtcatggcatataagctgacatgggtgaagatgggccatagccttgttgggggaatagtccaggaaagaatcgtctcaggagagaagcagcacctgtcactggtaaatctggagcctcgatccacataccgaatctgcctggtacctttggatgcttttaattacagagccgtcgaggacacgatctgttctgaggccactacccacgcgtcatatctcaataatggtagcaataccgctagtagtcatgagcagaccacctctcactccatgggttcaccattcctgctggctggcctcattgggggggctgtgattttcgtcctggtggtcctgctgtccgtgttttgttggcatatgcacaaaaagggaaggtacacgtctcagaaatggaagtataatcgcggtagacggaaggacgattactgcgaggcaggtaccaaaaaagacaatagtattctggagatgacggaaactagctttcaaatagtgtcacttaataacgaccagcttcttaagggggacttcagactacagcctatctacacacccaatgggggcattaattacaccgactgtcacatcccgaataatatgcgctattgcaactcctccgtgcctgacctagaacattgtcatacgtag

SEQ ID NO: 175023 - DNA, 942 bp, Artificial Sequence
  derived and/or modified sequence
atggccgtgcgggagctgaacatgaacctgctgagctgccccaccaccacccctggcttacctttgttcacccctgcaccttccaccgcctccccaaccactcagcctccgaccttatcgatccctaacccgtctcgaagctacacaccacctacgccgacgacctcaaagctgcccacaatacccgattgggacggtagggagcgggtgacccccccaatctctgagagaatacagctaagcattcactttgtgaacgacaccagtatccaggtttcttggctaagcttgtttactgtgatggcgtacaaacttacgtgggtcaaaatggggcactcacttgtaggtggcattgttcaggaacgcatcgtgtctggcgaaaaacagcatctgtctttagttaatctcgagccacgctctacgtacaggatctgtctcgtgcctttggacgcctttaactatagagctgtggaggataccatttgctctgaagcaaccactcacgccagttatttgaataacggctctaacactgcatcctctcacgagcagactacttcccactcaatgggcagcccgttcttactggctgggcttattgggggtgccgtaattttcgtcctggtggttctcctcagcgtgttttgttggcacatgcataaaaaaggaagatacaccagtcagaagtggaaatacaaccgggggcgccggaaggatgactactgcgaggccggcaccaagaaagacaactctattctggaaatgaccgagactagctttcagatcgtgtcactaaacaatgaccagctcctgaagggtgactttagactgcaaccaatctacactcccaatgggggcatcaactatacggactgtcatattcctaacaatatgcgatattgcaattcgtcagtgcccgacctggagcattgtcacacatag

SEQ ID NO: 175024 - DNA, 1983 bp, Artificial Sequence
  derived and/or modified sequence
atgggcctgcagaccaccaagtggcccagccacggcgccttcttcctgaagtcctggctcattatatcattgggcttgtattcacaggtgtcgaaactgttggcctgcccctctgtttgccggtgcgacagaaacttcgtgtattgtaatgagaggtctctgacctccgtccccctgggcatcccagagggagtgaccgtgctgtacttgcacaacaaccaaataaacaacgccggttttccagctgagctgcacaatgttcagtctgtgcacactgtctatctctacggaaatcaattagatgagttccctatgaatctcccaaaaaacgttcgggtcctgcacctgcaagaaaataacatccagactatctctagggccgctcttgcccaactactcaaactagaagaactgcacctggatgacaacagcatttccaccgtaggggttgaggacggggcgtttcgcgaagctatttctctaaaactgctatttctctccaagaaccacttgagttcagttcccgtggggttacctgtggatcttcaggagcttcgcgtggacgagaacagaattgctgtcatctccgacatggcctttcaaaacctaacctctctggaaagactcatagtcgatgggaacctgctgacgaataaggggattgctgaaggcaccttctcgcacctgactaagctaaaggagttttccattgtgcggaactctctgagtcacccgccccctgaccttcctgggactcacctaatccgactttatctgcaggacaatcagattaatcacattccactgacggcattctctaatctgcgcaagcttgagcgactggacatatccaacaaccagttgaggatgctgacgcagggggttttcgacaacctgagcaacctgaagcagctgacggcccgaaacaatccatggttttgcgattgttcaatcaaatgggttacagagtggctgaaatacatccccagttcattgaacgtgagaggctttatgtgtcaaggcccagagcaggttagaggcatggccgttagggagctcaacatgaacttattgagctgccctaccacgacgccaggcctgcctttgttcaccccagcacccagcaccgccagcccaaccacacagccgcccacgctgtctattcccaatcctagcagaagctatacccctcctactcccacaactagtaagctcccaacaatccctgattgggatggacgagagagggttacccctcctattagtgaacgaatacagctgtccattcacttcgtcaacgatacaagtatccaggtctcttggttgtcgttatttaccgtgatggcatacaagctcacatgggtaaagatggggcatagcctggtcggcggcattgtgcaggaaaggatcgtgtccggcgagaagcagcatctcagtttggttaaccttgaaccacgatccacatacaggatttgcctggtgcctctagacgcgtttaactaccgcgctgtggaagatacaatctgtagtgaggccacaacacacgcttcctacttgaataatggttcaaacaccgcatcaagtcatgagcaaaccacctcccactcaatgggtagtccgttcttgctggccggactcatcggaggagccgttatctttgtgctggtggtcttgctcagcgtgttctgctggcacatgcacaaaaaggggcgctacacgtcacagaaatggaaatataaccggggccgaagaaaggacgactactgcgaggcagggacaaaaaaggataattcaatccttgaaatgactgagacttcttttcagattgtgagcctgaacaacgaccagctgctgaaaggggactttaggctgcagcccatatatacgcccaacgggggcatcaactacacagattgccacatcccgaataatatgcgttactgtaacagctcagttcctgacctggagcattgccatacatag

SEQ ID NO: 175025 - DNA, 1983 bp, Artificial Sequence
  derived and/or modified sequence
atgggactacagaccacaaagtggccttctcacggtgcctttttccttaagtcctggcttattatatcactgggtctttactcgcaggtgtcaaaactcctagcttgtccctcggtatgtcgctgtgatcggaatttcgtgtattgcaacgagcggagtctcacctccgtgccactcggaatccccgagggggtcactgttctctaccttcacaataaccaaatcaacaacgccggattcccagccgagctccataacgttcagagcgtgcataccgtttacctgtacggcaatcagctggatgagtttcccatgaatctgccaaaaaatgtgagagtgcttcatctacaggagaacaacattcagaccatcagccgcgcagccttagcacagctcttaaaattagaagagctccacttagatgataattccattagtacagtgggtgtcgaggacggggcatttcgcgaggccattagcctcaagctgctcttcttaagtaaaaatcacctgagctcagttcccgtggggctgcctgtcgatctgcaagagctcagggtcgatgagaatagaatcgccgtcatctctgacatggcattccagaatctcacttcgctggaaaggctaatagtggacggaaatcttctaacaaacaaagggatcgccgaagggactttttctcacctgacaaaacttaaagagttttctatcgttcgcaactcactatcccatcctccacccgacttgccagggacccacttaattcgcctgtacctccaggataatcagattaatcacatccccctcacggcttttagcaatctgcggaaactggagcggcttgacatctctaataatcagctgcggatgcttactcagggggtgtttgacaacctttccaacctcaagcagctgaccgctaggaataatccttggttctgtgactgcagcataaaatgggtcactgagtggttgaagtatattccttcttctttgaacgttcggggattcatgtgtcagggcccagaacaggtgagaggaatggctgtgagagaattgaatatgaatctcctcagttgtccaaccactaccccgggtttgccactgttcactccggcaccctcaacagcttccccaaccactcagcccccaacactgtcgattcctaacccctcccggtcatacacaccacctaccccaaccaccagcaagctgccgaccattcctgactgggacgggagggaacgggtcacgccccctattagcgagcgcattcaactgagcatacactttgtgaatgatacgtcaattcaggtgagttggctgagtctgtttacagttatggcctataagctcacttgggtcaaaatgggtcatagcctcgtggggggaatcgtccaggaaagaatagttagcggcgagaagcagcacctgtctctggttaacctcgaacccaggtctacatatcggatttgtctggtgccccttgatgcttttaattatagggctgtggaggatacaatttgtagtgaggcaaccacacatgcttcatatttgaataacggttctaataccgcctccagccacgagcagacaacaagtcatagcatgggctccccgttcctgttggccggacttatcgggggagcagtgattttcgttcttgtggtcctgctgagcgtattctgttggcacatgcataaaaagggtcgctacacctcccaaaaatggaaatataacagaggcaggagaaaggatgactactgtgaggcaggtactaagaaggataatagcattctcgaaatgactgaaacgagcttccagattgtctcactgaataacgaccagttactgaagggcgacttccgtttgcagcccatttacaccccaaacggcggaattaactataccgattgccatattcccaacaatatgaggtactgtaacagctccgtgcccgatctggagcattgccatacctag

SEQ ID NO: 175026 - DNA, 942 bp, Artificial Sequence
  derived and/or modified sequence
atggccgttcgcgagctgaatatgaacctcctcagctgccccaccacaactccaggactgcctctctttacgccggctcctagtaccgctagccccaccacccagccaccaacattgagtatcccaaatcctagtcggagctacaccccacccactcccactacaagtaagctgccaacaatccccgactgggacggcagggagagagtgaccccacccatctctgagaggatccaattgagtatccattttgtgaatgacacttccatccaggtgagctggctgtcactgtttaccgtgatggcgtacaagctcacttgggtgaaaatgggccacagtttagtggggggaatcgtgcaagaaagaattgtgagtggtgagaaacagcacctgtccctcgtgaacctcgaacccagaagtacctatcggatctgccttgtgccgttggatgcattcaactacagggcagttgaagacaccatttgcagtgaagcaaccacacatgccagttatttgaataatgggagtaacacagcgtcaagccacgaacaaaccactagtcattccatgggctccccattcctgctggccggattgatcggaggagccgttattttcgtcctggtggtacttctctcagtcttctgctggcatatgcacaagaagggcagatatactagtcagaagtggaagtataatagaggccgacggaaagatgattattgcgaagccggaacaaaaaaagataactccatcctggaaatgaccgagacaagctttcaaatcgtcagcctcaataatgaccaactgctgaagggcgacttccgcctccagcctatttatacgcccaacgggggaataaattatacagactgccatataccaaataatatgcggtactgcaacagctctgtccccgatctggagcactgtcatacgtag

SEQ ID NO: 175027 - DNA, 1983 bp, Artificial Sequence
  derived and/or modified sequence
atgggtttgcagacgacgaagtggccaagccatggagcatttttcctgaagtcctggctgatcatctccctcggcctgtattcgcaagtcagtaaactcctagcgtgccccagcgtctgtaggtgtgatcggaactttgtctattgtaacgagagaagtctcaccagtgtgcctttggggatccccgaaggcgttacagtactgtacctgcacaacaaccaaatcaacaatgctggatttccagcagaactgcacaatgttcagtcagtgcataccgtgtatctctacggaaaccagctcgatgaatttcccatgaacttacctaagaacgtccgcgtgttgcacctccaagaaaataacatacagacaattagcagggccgcattagcacagttgttaaaactagaggagctgcacctggacgataattccatatctacagtgggggtagaagatggagccttcagggaagcgatcagcctgaaattgctgttcctctctaagaaccacctgagtagcgttcccgtaggcctgccggtagatctgcaggaactgagagtggacgagaatagaattgccgtaatttccgacatggcgttccagaacttgaccagcctggagagactaattgtcgacgggaatctattaaccaacaaaggcatcgcagaagggaccttcagtcacctgactaagctaaaggagttcagtatcgtcagaaatagcctcagccatccgccaccagacctgccaggtacccacctgattcgtctgtacttacaggacaatcagatcaatcacattcctcttaccgccttttctaatctccgaaagctggagcgactggacatttctaataaccaattgcgtatgctgactcagggggtcttcgataacctgagtaacctcaaacaactgaccgctaggaataacccgtggttctgtgactgctcaattaagtgggtgacggagtggttgaagtacatccccagtagtctgaatgtcagaggctttatgtgccaaggccctgaacaggtaagaggaatggcggtcagagagcttaatatgaatctgctctcttgccccacaactacacctggcctcccactgtttacgccggctccctccactgccagcccaaccacccagcctccgacgctgtctatccctaatccctccaggagctataccccccctacaccaacaaccagtaaactgcccactattcccgattgggacggacgagagcgtgtgacacctcctatatcagaacgaatccagttatctatccacttcgtgaatgataccagcatacaggtaagttggctaagcctgtttaccgtgatggcctacaaactgacttgggtgaagatgggccactctctagtgggcggtatcgtccaagaaaggatagtaagcggcgagaagcagcacttatccctggtcaatttggaacccagatcaacttatcgcatttgcctggttccattggacgcctttaattatcgcgctgtagaagacaccatttgttccgaggcaactactcacgcatcctacctgaacaacgggagcaatactgcctcctcccacgaacagacaacctcccacagcatggggtcgccatttctgctggcgggactgatcggcggtgcagtgatatttgtcttagttgtgctgctatcggttttttgttggcatatgcataagaagggtagatataccagccaaaagtggaagtataatcgaggccgacgcaaggacgattattgcgaggcagggactaagaaagataattccatcttggaaatgacggagacctcgtttcagatcgtctccctcaataacgaccagcttttaaaaggggattttcggttgcagccaatctatacccctaatgggggtatcaactacactgactgccacatacccaataacatgcgctactgcaatagttcagtacccgatctggagcactgtcacacttag

SEQ ID NO: 175028 - DNA, 1983 bp, Artificial Sequence
  derived and/or modified sequence
atgggcctgcagaccaccaagtggcccagccacggcgccttcttcctgaagagctggctgatcatcagcctgggcctgtacagccaggtgagcaagctgctggcctgccccagcgtgtgcagatgcgacagaaacttcgtgtactgcaacgagagaagcctgaccagcgtgcccctgggcatccccgagggcgtgaccgtgctgtacctgcacaacaaccagatcaacaacgccggcttccccgccgagctgcacaacgtgcagagcgtgcacaccgtgtacctgtacggcaaccagctggacgagttccccatgaacctgcccaagaacgtgagagtgctgcacctgcaggagaacaacatccagaccatcagcagagccgccctggcccagctgctgaagctggaggagctgcacctggacgacaacagcatcagcaccgtgggcgtggaggacggcgccttcagagaggccatcagcctgaagctgctgttcctgagcaagaaccacctgagcagcgtgcccgtgggcctgcccgtggacctgcaggagctgagagtggacgagaacagaatcgccgtgatcagcgacatggccttccagaacctgaccagcctggagagactgatcgtggacggcaacctgctgaccaacaagggcatcgccgagggcaccttcagccacctgaccaagctgaaggagttcagcatcgtgagaaacagcctgagccaccccccccccgacctgcccggcacccacctgatcagactgtacctgcaggacaaccagatcaaccacatccccctgaccgccttcagcaacctgagaaagctggagagactggacatcagcaacaaccagctgagaatgctgacccagggcgtgttcgacaacctgagcaacctgaagcagctgaccgccagaaacaacccctggttctgcgactgcagcatcaagtgggtgaccgagtggctgaagtacatccccagcagcctgaacgtgagaggcttcatgtgccagggccccgagcaggtgagaggcatggccgtgagagagctgaacatgaacctgctgagctgccccaccaccacccccggcctgcccctgttcacccccgcccccagcaccgccagccccaccacccagccccccaccctgagcatccccaaccccagcagaagctacaccccccccacccccaccaccagcaagctgcccaccatccccgactgggacggcagagagagagtgaccccccccatcagcgagagaatccagctgagcatccacttcgtgaacgacaccagcatccaggtgagctggctgagcctgttcaccgtgatggcctacaagctgacctgggtgaagatgggccacagcctggtgggcggcatcgtgcaggagagaatcgtgagcggcgagaagcagcacctgagcctggtgaacctggagcccagaagcacctacagaatctgcctggtgcccctggacgccttcaactacagagccgtggaggacaccatctgcagcgaggccaccacccacgccagctacctgaacaacggcagcaacaccgccagcagccacgagcagaccaccagccacagcatgggcagccccttcctgctggccggcctgatcggcggcgccgtgatcttcgtgctggtggtgctgctgagcgtgttctgctggcacatgcacaagaagggcagatacaccagccagaagtggaagtacaacagaggcagaagaaaggacgactactgcgaggccggcaccaagaaggacaacagcatcctggagatgaccgagaccagcttccagatcgtgagcctgaacaacgaccagctgctgaagggcgacttcagactgcagcccatctacacccccaacggcggcatcaactacaccgactgccacatccccaacaacatgagatactgcaacagcagcgtgcccgacctggagcactgccacacctag

SEQ ID NO: 175029 - DNA, 942 bp, Artificial Sequence
  derived and/or modified sequence
atggccgtgagagagctgaacatgaacctgctgagctgccccaccaccacccccggcctgcccctgttcacccccgcccccagcaccgccagccccaccacccagccccccaccctgagcatccccaaccccagcagaagctacaccccccccacccccaccaccagcaagctgcccaccatccccgactgggacggcagagagagagtgaccccccccatcagcgagagaatccagctgagcatccacttcgtgaacgacaccagcatccaggtgagctggctgagcctgttcaccgtgatggcctacaagctgacctgggtgaagatgggccacagcctggtgggcggcatcgtgcaggagagaatcgtgagcggcgagaagcagcacctgagcctggtgaacctggagcccagaagcacctacagaatctgcctggtgcccctggacgccttcaactacagagccgtggaggacaccatctgcagcgaggccaccacccacgccagctacctgaacaacggcagcaacaccgccagcagccacgagcagaccaccagccacagcatgggcagccccttcctgctggccggcctgatcggcggcgccgtgatcttcgtgctggtggtgctgctgagcgtgttctgctggcacatgcacaagaagggcagatacaccagccagaagtggaagtacaacagaggcagaagaaaggacgactactgcgaggccggcaccaagaaggacaacagcatcctggagatgaccgagaccagcttccagatcgtgagcctgaacaacgaccagctgctgaagggcgacttcagactgcagcccatctacacccccaacggcggcatcaactacaccgactgccacatccccaacaacatgagatactgcaacagcagcgtgcccgacctggagcactgccacacctag

SEQ ID NO: 175030 - protein, 191 aa, Artificial Sequence
  derived and/or modified sequence
MAAYSYRPGPGAGPGPAAGAALPDQSFLWNVFQRVDKDRSGVISDTELQQALSNGTWTPFNPVTVRSIISMFDRENKAGVNFSEFTGVWKYITDWQNVFRTYDRDNSGMIDKNELKQALSGFGYRLSDQFHDILIRKFDRQGRGQIAFDDFIQGCIVLQRLTDIFRRYDTDQDGWIQVSYEQYLSMVFSIV

SEQ ID NO: 175031 - DNA, 576 bp, Artificial Sequence
  derived and/or modified sequence
atggccgcctacagctacagacccggccccggcgccggccccggccccgccgccggcgccgccctgcccgaccagagcttcctgtggaacgtgttccagagagtggacaaggacagaagcggcgtgatcagcgacaccgagctgcagcaggccctgagcaacggcacctggacccccttcaaccccgtgaccgtgagaagcatcatcagcatgttcgacagagagaacaaggccggcgtgaacttcagcgagttcaccggcgtgtggaagtacatcaccgactggcagaacgtgttcagaacctacgacagagacaacagcggcatgatcgacaagaacgagctgaagcaggccctgagcggcttcggctacagactgagcgaccagttccacgacatcctgatcagaaagttcgacagacagggcagaggccagatcgccttcgacgacttcatccagggctgcatcgtgctgcagagactgaccgacatcttcagaagatacgacaccgaccaggacggctggatccaggtgagctacgagcagtacctgagcatggtgttcagcatcgtgtag

SEQ ID NO: 175032 - DNA, 576 bp, Artificial Sequence
  derived and/or modified sequence
atggctgcttactcttaccggcccggccctggagccggcccaggacctgcagcaggagctgcacttccagaccagtccttcctgtggaatgtattccaaagggttgacaaagatcggtctggtgtaatcagtgatactgaactacagcaggcactttctaatggcacatggacacctttcaacccggtgacggtgcggtctattatcagcatgttcgacagggagaacaaggccggcgtcaactttagtgagtttaccggagtgtggaagtacatcaccgattggcagaacgtgtttagaacctatgatcgcgataacagtgggatgattgataagaatgaactgaaacaagccctcagtggattcggatatcgactgtctgatcagtttcatgatatccttatcaggaagtttgaccggcagggaaggggtcaaatcgcgttcgacgatttcatacagggatgcattgtgctccagagactcacagatatcttcaggagatatgatactgatcaggacggttggattcaggtctcttacgagcagtacttgtctatggtcttctccatcgtgtag

SEQ ID NO: 175033 - DNA, 576 bp, Artificial Sequence
  derived and/or modified sequence
atggccgcctacagctaccggcccggccctggggccggccctggccctgctgctggggccgccctgcctgaccagagcttcctgtggaatgtgttccagagggtggacaaggacagaagtggagtcatcagtgacacagagctgcagcaggccctgagcaatggcacctggacccccttcaaccctgtgacagtgcgcagcatcatctccatgtttgaccgggagaacaaggccggcgtgaacttcagcgagttcaccggggtgtggaagtacatcacagactggcagaatgtgttccgcacctatgaccgggacaacagcggcatgattgacaagaatgagctgaagcaggccctgagcggcttcggctaccgcctgagtgaccagttccatgacatcctgatcaggaagtttgaccggcagggccggggccagatcgcctttgatgacttcatccagggctgcatcgtgctgcagaggctgacagacatcttccgccgctatgacacagaccaggacggctggatccaggtgtcctatgagcagtacctgtccatggtgttcagcatcgtgtag

SEQ ID NO: 175034 - DNA, 576 bp, Artificial Sequence
  derived and/or modified sequence
atggccgcctacagctaccggcccggccccggcgccggccccggccccgcagccggagccgctctgccagatcagagtttcctctggaacgtattccaacgtgttgacaaagatagaagtggggttatcagcgatacggagttgcaacaagccctgagcaacggcacatggaccccattcaatcctgtgactgttagaagcatcatctccatgttcgaccgggaaaataaagccggcgtgaatttctccgaattcactggcgtctggaaatacatcaccgactggcagaacgtgttccggacttacgacagagataatagtggaatgatcgacaagaatgagctgaaacaggcattgtctggattcgggtatcgcctgtctgatcagtttcacgatatcttgattagaaaatttgacaggcagggtagggggcaaattgccttcgatgatttcatccagggctgtatagtactccaacgcctgactgatatcttccgcaggtacgacaccgaccaggacggatggatccaggtgtcctacgagcagtacctctcgatggtttttagtatcgtctag

SEQ ID NO: 175035 - DNA, 1135 bp, Artificial Sequence
  derived and/or modified sequence
gataatgccaggccctgcccccggcagaggcggaagcggagtcggcctgagaggtctctcgtcgctgcaggcgcctcagcccagccgcgtgccttggcccatggccgcctactcttaccgccccggccctggggccggccctgggcctgctgcaggcgcggcgctgccggaccagagcttcctgtggaacgttttccagagggtcgataaagacaggagtggagtgatatcagacaccgagcttcagcaagctctctccaacggcacgtggactccctttaatccagtgactgtcaggtcgatcatatccatgtttgaccgtgagaacaaggccggcgtgaacttcagcgagttcacgggtgtgtggaagtacatcacggactggcagaacgtcttccgcacgtacgaccgggacaactccgggatgatcgataagaacgagctgaagcaggccctctcaggtttcggctaccggctctctgaccagttccacgacatcctcattcgaaagtttgacaggcagggacgggggcagattgccttcgacgacttcatccagggctgcatcgtcctgcagaggttgacggatatattcagacgttacgacacggatcaggacggctggattcaggtgtcgtacgaacagtacctgtccatggtcttcagtatcgtatgaccctggcctctcgtgaagagcagcacaacatggaaagagccaaaatgtcacagttcctatctgtgagggaatggagcacaggtgcagttagatgctgttcttcctttagattttgtcacgtggggacccagctgtacatatgtggataagctgattaatggttttgcaactgtaatagtagctgtatcgttctaatgcagacattggatttggtgactgtctcattgtgccatgaggtaaatgtaatgtttcaggcattctgcttgcaaaaaaatctatcatgtgcttttctagatgtctctggttctatagtgcaaatgcttttattagccaataggaattttaaaataacatggaacttacacaaaaggcttttcatgtgccttacttttttaaaaaggagtttattgtattcattggaatatgtgacgtaagcaataaagggaatgttagacgtgt

SEQ ID NO: 175036 - DNA, 576 bp, Artificial Sequence
  derived and/or modified sequence
atggccgcttacagttaccggcctggtcccggtgctggcccaggccctgcagccggtgcagccttacccgatcaatcattcttgtggaatgtattccaaagagtagataaggacaggtcgggagtgatcagtgatacggaacttcagcaggcactgtcaaacgggacctggactcccttcaacccagtgaccgttcggtccatcatatctatgttcgatcgagagaacaaggccggagtgaatttttctgaattcactggggtctggaaatacatcaccgactggcaaaatgtgtttcggacctatgacagggataacagcggaatgattgataagaatgagctgaagcaggcgctatcaggtttcggctatcggctaagcgatcagtttcatgacatcttgatccgaaagttcgaccggcagggtcgtgggcaaatcgcgttcgacgattttatccaaggctgtattgtgctgcagagactgactgacattttccggagatacgacacggaccaagacgggtggattcaagtgagttatgagcagtatctcagcatggtattctccatcgtttag

SEQ ID NO: 175037 - protein, 545 aa, Artificial Sequence
  derived and/or modified sequence
MAEPSGSPVHVQLPQQAAPVTAAAAAAPAAATAAPAPAAPAAPAPAPAPAAQAVGWPICRDAYELQEVIGSGATAVVQAALCKPRQERVAIKRINLEKCQTSMDELLKEIQAMSQCSHPNVVTYYTSFVVKDELWLVMKLLSGGSMLDIIKYIVNRGEHKNGVLEEAIIATILKEVLEGLDYLHRNGQIHRDLKAGNILLGEDGSVQIADFGVSAFLATGGDVTRNKVRKTFVGTPCWMAPEVMEQVRGYDFKADMWSFGITAIELATGAAPYHKYPPMKVLMLTLQNDPPTLETGVEDKEMMKKYGKSFRKLLSLCLQKDPSKRPTAAELLKCKFFQKAKNREYLIEKLLTRTPDIAQRAKKVRRVPGSSGHLHKTEDGDWEWSDDEMDEKSEEGKAAFSQEKSRRVKEENPEIAVSASTIPEQIQSLSVHDSQGPPNANEDYREASSCAVNLVLRLRNSRKELNDIRFEFTPGRDTADGVSQELFSAGLVDGHDVVIVAANLQKIVDDPKALKTLTFKLASGCDGSEIPDEVKLIGFAQLSVS

SEQ ID NO: 175038 - DNA, 1638 bp, Artificial Sequence
  derived and/or modified sequence
atggccgagccgtcagggagtcccgtgcatgtgcagttgcctcagcaggcggccccggtgactgcggctgccgctgccgccccagctgcggccacagccgccccggcgcctgcggcccccgctgcccctgcccccgccccagcccctgcagcacaagcagtgggatggcccatttgccgggatgcctatgaactacaggaggttatagggtccggcgccaccgctgttgtccaagctgcactgtgtaaaccaaggcaagaacgggtcgcaatcaaaagaattaacctggaaaaatgtcaaacttctatggatgaactgctgaaggaaattcaggccatgtcccaatgttctcaccccaacgtcgtgacgtactacacaagctttgtggtcaaagatgagctctggctcgttatgaaactgctgtccggagggagcatgctggatataatcaagtacatcgtcaaccggggggagcataaaaacggtgttctggaggaggctatcatcgcaaccatcctgaaggaagttcttgaaggactggactatctacacaggaacgggcagattcacagagatctgaaggctggtaatatactgctaggagaggatggatcagtgcagatcgcggacttcggcgtgtctgcttttttggctactggaggtgacgtaactcgcaacaaagtacgcaaaacgtttgtgggaactccatgttggatggctccggaagttatggaacaagtgcggggctacgattttaaggctgatatgtggtcttttgggatcacagccatcgaactcgctacgggtgcggctccatatcacaagtatccacctatgaaagtcttaatgctgacactccagaatgatccccctacactcgaaactggcgtggaagataaggagatgatgaagaaatatgggaagtccttccgcaagttattgagtctgtgtctgcagaaggatccctcgaagcgtcctacagctgcagaactgctcaagtgcaaatttttccagaaagcgaaaaatagggagtaccttattgaaaaactcctgacccgaaccccagacattgcacagcgggccaaaaaggtgcggcgggtaccaggatcctcgggccatttacataagactgaggatggcgactgggagtggtccgatgacgaaatggacgagaaatctgaggagggaaaggcagccttctcacaggagaaatctagaagagtgaaagaagaaaatccagagatcgcagtgagtgccagtacgatccccgagcaaatccaatctttatcggtacatgattcccagggcccacccaatgccaatgaagactaccgggaagcctcttcctgcgctgtgaacctcgtgttacgactccggaacagccgcaaggaacttaacgacattcgattcgagttcacacctgggagagacacagctgacggcgtctcgcaggaactcttctctgcgggcttggtcgatggacatgacgttgtaattgtggccgcgaatcttcagaaaatagttgacgaccccaaagccctcaagacgcttactttcaaactggccagtggttgtgatggatctgaaatccccgatgaggttaagttgattggcttcgcccagttgtcagtttcatag

SEQ ID NO: 175039 - DNA, 1638 bp, Artificial Sequence
  derived and/or modified sequence
atggccgagcccagcggcagccctgtgcacgtgcagctgccccagcaggccgcccctgtgacagctgctgctgctgctgccccagctgctgccacagctgccccagccccagctgccccagctgccccagccccagccccagccccagctgcccaggccgtgggctggcccatctgcagagatgcctatgagctgcaggaggtgattggcagcggggccacagctgtggtgcaggccgccctgtgcaagccccggcaggagcgggtggccatcaagaggatcaacctggagaagtgccagacctccatggatgagctgctgaaggagatccaggccatgagccagtgcagccaccccaacgtggtgacctactacaccagctttgtggtgaaggatgagctgtggctggtgatgaagctgctgagcggcggctccatgctggacatcatcaagtacatcgtgaacagaggagagcacaagaatggagtgctggaggaggccatcatcgccaccatcctgaaggaggtgctggagggcctggactacctgcacagaaatggccagatccaccgggacctgaaggccggcaacatcctgctgggggaggatggctctgtgcagattgctgactttggagtgtctgccttcctggccactggaggagatgtgaccaggaacaaggtgaggaagacctttgtgggcaccccctgctggatggcccctgaggtgatggagcaggtgcggggctatgacttcaaggctgacatgtggagctttggcatcacagccatcgagctggccaccggggccgccccctaccacaagtacccacccatgaaggtgctgatgctgaccctgcagaatgacccccccaccctggagactggagtggaggacaaggagatgatgaagaagtatggcaagagcttcaggaagctgctgagcctgtgcctgcagaaggaccccagcaagaggcccacagctgctgagctgctgaagtgcaagttcttccagaaggccaagaaccgggagtacctgattgagaagctgctgaccaggaccccagacatcgcccagagggccaagaaggtgagaagagtgcccggcagcagcggccacctgcacaagacagaagatggagactgggagtggagcgatgatgagatggatgagaagtctgaggagggcaaggccgccttcagccaggagaagagccggcgggtgaaggaggagaaccctgagattgctgtgtctgccagcaccatccctgagcagatccagagcctgtctgtgcatgacagccagggccccccaaatgccaatgaagactaccgggaggccagcagctgtgctgtgaacctggtgctgcggctgaggaacagcaggaaggagctgaatgacatccgctttgagttcaccccaggccgggacacagcagatggagtgtcccaggagctgttctctgctggcctggtggatggccatgatgtggtgattgtggccgccaacctgcagaagatcgtggatgaccccaaggccctgaagaccctgaccttcaagctggccagcggctgtgatggcagcgagatcccagatgaggtgaagctgattggatttgcccagctgtctgtgtcctag

SEQ ID NO: 175040 - DNA, 1638 bp, Artificial Sequence
  derived and/or modified sequence
atggccgagcccagcggcagccccgtgcacgtgcagctgccccagcaggccgctcccgttacagccgccgcggcagcagctcctgctgccgcaaccgccgcgcctgcgcccgccgctcctgcggcgcctgctccagctccggcccccgctgcccaagcagtagggtggcccatttgccgagacgcctacgagcttcaggaagtgattggttccggtgctaccgccgtggtccaagccgctctgtgcaagcccaggcaagaacgcgtcgccatcaagcgcatcaatctggagaaatgtcagacttctatggatgagctgctgaaagagatccaagcaatgagtcagtgttctcatcctaacgtagtgacttactacacatcatttgtcgtaaaggacgagttgtggttggtgatgaaacttttgtcaggagggagcatgctcgatattattaaatacattgttaaccgaggcgaacataaaaacggtgtgctggaggaggctatcatcgcaacaattctaaaggaagtgctggaagggctcgactacctccaccgtaacggccagatacacagagatcttaaggcagggaacatcctgctgggggaggacggcagcgttcagattgccgattttggtgtaagcgcttttttggccacaggaggggacgtgacccgtaataaagtgcgcaaaacatttgtgggcaccccctgctggatggcgcccgaagtgatggaacaggtgagaggatacgatttcaaggccgatatgtggtcatttgggattaccgctatcgaattggcaaccggtgctgctccttatcacaagtatcccccaatgaaagttctgatgcttacactccagaatgatcccccaacattggagactggagtagaagacaaggaaatgatgaagaagtacgggaagagctttaggaaattgctgtcactgtgcctccaaaaagacccctcaaaacgcccgactgccgccgagctcttaaaatgtaaattcttccaaaaagccaagaaccgcgaatacctcatcgagaagttgctcacacgaacccccgacatcgctcagcgagcaaagaaggtaaggcgcgttcccggaagcagcggacacctgcacaaaacagaggacggcgactgggagtggagcgatgacgagatggacgaaaaaagtgaggaagggaaggccgccttttctcaagaaaaatctcgccgggtgaaggaagaaaacccagaaatcgccgtgagcgcctccactatacctgagcagattcagtcactgtctgtgcatgattcccagggcccccctaacgcgaacgaggactacagggaagcctcatcgtgtgctgtgaacctggtgctgcggctgaggaactcgcgaaaagaactgaatgatatccggtttgaattcacaccagggagagataccgccgacggtgtatctcaagaactctttagtgctggacttgtggatgggcacgatgtggtgatagttgctgctaacctccagaagattgtagacgatcctaaggctctgaaaactctcacctttaagctggccagtgggtgcgacggaagcgagattcctgatgaagttaaattgatcggtttcgcccagctgagcgtgtcatag

SEQ ID NO: 175041 - DNA, 1638 bp, Artificial Sequence
  derived and/or modified sequence
atggccgagccttcagggagtcccgtccatgtgcaattgccccagcaggcagcacctgtgaccgccgctgccgctgctgcacccgcagccgcaacggctgctcccgctcctgcagcacccgcagccccagctcctgcccctgcacccgctgcccaggccgttgggtggccgatctgtagggacgcctacgaactgcaggaagttatagggagtggcgcaactgcagttgtgcaggcagctctctgcaaaccacggcaggaacgagtcgcaataaagcggatcaatctggagaagtgtcagacgagcatggatgagctactgaaagagattcaagctatgtcgcagtgctcacatccaaatgttgtgacctactacacctcttttgtggttaaggacgagctatggttggttatgaaactgcttagcggtgggtccatgctggacatcattaagtatatcgtcaaccgcggagagcataaaaacggagttctggaggaagccattattgctaccatcctgaaggaagtgctggaagggctggattacttgcataggaacggccagatacatcgggacctcaaggcaggtaatatcttgctgggagaggacggctcagtacaaattgctgactttggcgtgagcgcttttctggctactgggggagatgtaactcggaacaaagtgcggaagacttttgtgggcactccgtgctggatggctcccgaggttatggagcaggtgagggggtatgactttaaggccgatatgtggtcctttggaatcaccgctatcgaactggcaacaggagcagcaccctaccataagtacccgcctatgaaagtgctgatgcttacattgcaaaacgatccgccaacccttgagacaggtgttgaggataaggaaatgatgaagaaatacggcaaaagcttccgcaagctcctgtctctgtgcctccagaaggatccttccaaacggcctacagcagctgaattgctcaaatgcaagttttttcaaaaggccaaaaaccgagagtaccttatcgagaagctgttgacccgcacaccagatatcgcccagcgagcaaaaaaggtccggcgagtgcccggaagctctggccatctccacaaaactgaggacggcgactgggaatggtccgacgacgaaatggatgagaaaagcgaggaaggaaaggcagcattttctcaagagaagtcaaggcgggtcaaagaggagaatccagagatcgctgtcagcgctagcacaattcccgagcagattcagtccctgagcgtgcatgattcgcaggggccacccaacgcaaacgaggactatcgtgaagcttcatcttgcgctgtgaacttggtcttgcggctccgtaacagccgtaaggagctgaatgatataagattcgaattcacgcccggacgtgacaccgctgacggcgtctctcaagagctattctctgcgggactggttgatggccacgatgttgtgatcgtagccgcaaacctgcagaaaatcgtggatgatccaaaagccctcaaaacacttacatttaagctcgcttcagggtgcgatggctccgagattccagacgaggtgaagctgattggcttcgctcagctgagtgtttcctag

SEQ ID NO: 175042 - DNA, 3820 bp, Artificial Sequence
  derived and/or modified sequence
aaactagaaggactgcgattagattaggcaaggtgggaaagggataccggcaagtaaagcgccggaaacttacaacttgggttattttctaactggcgtcttgcaaagggacaccatgtaggtatcccgctcgtcaacttgtaaatgaacttcaggttctctttggtggcaggagaattctgaatgtgagaacctggcggccgttcaacgaccccgccctcggggtccccagggggcgtcctccggcaagcctgatcgtctggggccaaggcgcagggcgagcagggagggaggaggagaaccagggccggtggccccgaaagcacacacaaagcggcctgactcctttggtgggaacttccccggccgccagcggagcgggagcgggagggggcggcggagagggggggcggcggttcccctcgccgaggcggagaacagcgcgcgctaggctctgggcgcgcggcgagcgcagcggccgccgcctcctcccttccccgcctccgccggcgctgcctcctccctccgcccagctcggcctcccttgctccctcccctcctagctggcttcggcggggacggcggcggcggcggcgggcggggagggcgtgcgccggccgagaggtgtcggcggcgaggcaaaggaagtttcaagtggaaggtcgtccgtcggccggcgcgtcctcctgctctcctccgcagcatcatggcggagccgagcggctcgcccgtgcacgtccagcttccccagcaggcggccccggtgacagcggcggcggcggcggccccggcggccgcgacagcagcgccggccccggcagctcccgcggccccggccccggccccggccccggcggcacaggctgtcggctggcccatctgcagggacgcgtacgagctgcaggaggttatcggcagtggagctactgctgtggttcaggcagccctatgcaaacccaggcaagaacgtgtagcaataaaacggatcaacttggaaaaatgccagaccagtatggatgaactattaaaagaaattcaagccatgagtcagtgcagccatcccaacgtagtgacctattacacctcttttgtggtcaaagatgaactttggctggtcatgaaattactaagtggaggttcaatgttggatatcataaaatacattgtcaaccgaggagaacacaagaatggagttctggaagaggcaataatagcaacaattcttaaagaggttttggaaggcttagactatctacacagaaacggtcagattcacagggatttgaaagctggtaatattcttctgggtgaggatggttcagtacaaatagcagattttggggtaagtgcgttcctagcaacagggggtgatgttacccgaaataaagtaagaaaaacattcgttggcaccccatgttggatggctcctgaagtcatggaacaggtgagaggctatgacttcaaggctgacatgtggagttttggaataactgccattgaattagcaacaggagcagcgccttatcacaaatatcctcccatgaaagtgttaatgttgactttgcaaaatgatccacccactttggaaacaggggtagaggataaagaaatgatgaaaaagtacggcaagtcctttagaaaattactttcactgtgtcttcagaaagatccttccaaaaggcccacagcagcagaacttttaaaatgcaaattcttccagaaagccaagaacagagagtacctgattgagaagctgcttacaagaacaccagacatagcccaaagagccaaaaaggtaagaagagttcctgggtcaagtggtcaccttcataaaaccgaagacggggactgggagtggagtgacgacgagatggatgagaagagcgaagaagggaaagcagctttttctcaggaaaagtcacgaagagtaaaagaagaaaatccagagattgcagtgagtgccagcaccatccccgaacaaatacagtccctctctgtgcacgactctcagggcccacccaatgctaatgaagactacagagaagcttcttcttgtgccgtgaacctcgttttgagattaagaaactccagaaaggaacttaatgacatacgatttgagtttactccaggaagagatacagcagatggtgtatctcaggagctcttctctgctggcttggtggatggtcacgatgtagttatagtggctgctaatttacagaagattgtagatgatcccaaagctttaaaaacattgacatttaagttggcttctggctgtgatgggtcggagattcctgatgaagtgaagctgattgggtttgctcagttgagtgtcagctgatgtatgtcccttgatgtcaccctgatctgtcatgccccaccgccacccctactcccttcaaccctccctctttctgcccatttcctcccaccccctcactcccatttcctagcaaaatcagaagattgtgaagaggccggcttcaacaaaatgggataaaaaaataattttttaaaacttacaacactccgagttctgctttattctctagcaatccacagtacaagaacaagcaaatgccacagctgcacgactgttgctcatttttccaaaagctatttaatattcttagcaatcaatttggatatcccttaagtgaaaagaatctgaaatacactcaggtggtcttatttattggcaacaaaaggaattttctatccagaagcctatttctcctttcattgttgttatttctgttataatactttaattgtacatctgacaatactgcctcttttatgttgtatttagaaattaatatacttataaaattaagatttattagccaaacttgaattctagttttaaaactgactgtgaattttatttttcatatatttatgcattacacaccttagctataagaaaaaaagggttttgattatatgcttcttgcagttaatctcgttatttaaacaaaaagttttgggtctgtctttggagtatttgtaacttctaaattttgaaatgactgaattaggaatttggatgcttattcttttagtctgtttgcctaaaaaccaatttacaatctgactgtctcttgggagagggaggtgccttgcaaactttcacattaagaatgtgcctgaggctgctttactctggaatagtctcagatctaaaatttcctctatataaggtggcatatgttaagttttgcttcattggaccgtttagaatgctatgtaaaatgttgccattctgttagattgctaactatatacccatctctgatttggctctccttaagtgataggatttgttattctaaaggtgataaacttgaaaatatcagaatctgagttttacttgaaattttgcagaatacccaggtggagtgaaaattggaagggttttgtgcaatgactaaaaggtaaaacgctgttaaggttcaagaatcaatactttcaacccaagtagccctctgcttgactgtatattatggaactagtaaaccttaggattttgaaaattggagtctaatctttcaaggaggtgggctcccaggatggtaccattgctctttcctagctaaccctagatatggcagctctttaatgtacttcaaaaagcaaatatatattactaaggaaaaaaagttatttataattgccttgtcataattgttaaggtgttctagagccatttgcatacaatttaatgtaatttcattccattctattgtttacacaacgattactcgaagatgactgcaaaggtaaaaggaaaataaaagtgtattgcacaatgaga

SEQ ID NO: 175043 - DNA, 1638 bp, Artificial Sequence
  derived and/or modified sequence
atggccgagcccagcggcagccccgtgcacgtgcagctgccccagcaggccgcccccgtgaccgccgccgccgccgccgcccccgccgccgccaccgccgcccccgcccccgccgcccccgccgcccccgcccccgcccccgcccccgccgcccaggccgtgggctggcccatctgcagagacgcctacgagctgcaggaggtgatcggcagcggcgccaccgccgtggtgcaggccgccctgtgcaagcccagacaggagagagtggccatcaagagaatcaacctggagaagtgccagaccagcatggacgagctgctgaaggagatccaggccatgagccagtgcagccaccccaacgtggtgacctactacaccagcttcgtggtgaaggacgagctgtggctggtgatgaagctgctgagcggcggcagcatgctggacatcatcaagtacatcgtgaacagaggcgagcacaagaacggcgtgctggaggaggccatcatcgccaccatcctgaaggaggtgctggagggcctggactacctgcacagaaacggccagatccacagagacctgaaggccggcaacatcctgctgggcgaggacggcagcgtgcagatcgccgacttcggcgtgagcgccttcctggccaccggcggcgacgtgaccagaaacaaggtgagaaagaccttcgtgggcaccccctgctggatggcccccgaggtgatggagcaggtgagaggctacgacttcaaggccgacatgtggagcttcggcatcaccgccatcgagctggccaccggcgccgccccctaccacaagtacccccccatgaaggtgctgatgctgaccctgcagaacgacccccccaccctggagaccggcgtggaggacaaggagatgatgaagaagtacggcaagagcttcagaaagctgctgagcctgtgcctgcagaaggaccccagcaagagacccaccgccgccgagctgctgaagtgcaagttcttccagaaggccaagaacagagagtacctgatcgagaagctgctgaccagaacccccgacatcgcccagagagccaagaaggtgagaagagtgcccggcagcagcggccacctgcacaagaccgaggacggcgactgggagtggagcgacgacgagatggacgagaagagcgaggagggcaaggccgccttcagccaggagaagagcagaagagtgaaggaggagaaccccgagatcgccgtgagcgccagcaccatccccgagcagatccagagcctgagcgtgcacgacagccagggcccccccaacgccaacgaggactacagagaggccagcagctgcgccgtgaacctggtgctgagactgagaaacagcagaaaggagctgaacgacatcagattcgagttcacccccggcagagacaccgccgacggcgtgagccaggagctgttcagcgccggcctggtggacggccacgacgtggtgatcgtggccgccaacctgcagaagatcgtggacgaccccaaggccctgaagaccctgaccttcaagctggccagcggctgcgacggcagcgagatccccgacgaggtgaagctgatcggcttcgcccagctgagcgtgagctag

SEQ ID NO: 175044 - protein, 218 aa, Artificial Sequence
  derived and/or modified sequence
MAMFEQMRANVGKLLKGIDRYNPENLATLERYVETQAKENAYDLEANLAVLKLYQFNPAFFQTTVTAQILLKALTNLPHTDFTLCKCMIDQAHQEERPIRQILYLGDLLETCHFQAFWQALDENMDLLEGITGFEDSVRKFICHVVGITYQHIDRWLLAEMLGDLSDSQLKVWMSKYGWSADESGQIFICSQEESIKPKNIVEKIDFDSVSSIMASSQ

SEQ ID NO: 175045 - protein, 124 aa, Artificial Sequence
  derived and/or modified sequence
MIDQAHQEERPIRQILYLGDLLETCHFQAFWQALDENMDLLEGITGFEDSVRKFICHVVGITYQHIDRWLLAEMLGDLSDSQLKVWMSKYGWSADESGQIFICSQEESIKPKNIVEKIDFDSEW

SEQ ID NO: 175046 - protein, 211 aa, Artificial Sequence
  derived and/or modified sequence
MAMFEQMRANVGKLLKGIDRYNPENLATLERYVETQAKENAYDLEANLAVLKLYQFNPAFFQTTVTAQILLKALTNLPHTDFTLCKCMIDQAHQEERPIRQILYLGDLLETCHFQAFWQALDENMDLLEGITGFEDSVRKFICHVVGITYQHIDRWLLAEMLGDLSDSQLKVWMSKYGWSADESGQIFICSQEESIKPKNIVEKIDFDSEW

SEQ ID NO: 175047 - DNA, 879 bp, Artificial Sequence
  derived and/or modified sequence
agtcacgtggcagccggaaagcgtggcggctgctgctagagcctttccctttaccgcacccaaggagctggagcgacaacaacgacgtcgtttccgtttccaccacctcttcctgttcccgtccttgaggacgccgtgccgggtcagtgttagcctccagccctggttgtggaaggcgacagaagtcatggcgatgtttgagcagatgagagccaacgtgggcaagttgctcaagggtatcgacaggtacaatcctgagaacctggccaccctggagcgctatgtagagacgcaggccaaggaaaatgcctatgatctggaagccaacctggctgtcctgaagctgtaccagttcaacccagccttctttcagaccacggtcaccgcccagatcctgctgaaggccctcaccaacttgccgcacacagacttcaccctgtgcaagtgcatgatcgaccaggcacatcaagaagaacggccaatccgacagattttgtacctcggggacctgctggagacctgccatttccaggccttctggcaagccctggatgaaaacatggacctcttggaaggtataactggctttgaagactctgtccgaaagtttatctgccatgttgtgggtatcacttaccagcacattgaccgctggctgctggccgagatgctcggggatctgtcggacagccagctaaaggtgtggatgagcaaatacggctggagtgccgacgagtcggggcagatcttcatctgtagccaagaagagagcattaaacccaagaacattgtggagaagattgactttgacagtgtgtccagcatcatggcctcctcccagtaacttcaggtgtttaataaagatgtgttgactcagcc

SEQ ID NO: 175048 - DNA, 966 bp, Artificial Sequence
  derived and/or modified sequence
acctcttcctgttcccgtccttgaggacgccgtgccgggtcagtgttagcctccagccctggttgtggaaggcgacagaagtcatggcgatgtttgagcagatgagagccaacgtgggcaagttgctcaagggtaccagttcaacccagccttctttcagaccacggtcaccgcccagatcctgctgaaggccctcaccaacttgccgcacacagacttcaccctgtgcaagtgcatgatcgaccaggcacatcaagaagaacggccaatccgacagattttgtacctcggggacctgctggagacctgccatttccaggccttctggcaagccctggatgaaaacatggacctcttggaaggtataactggctttgaagactctgtccgaaagtttatctgccatgttgtgggtatcacttaccagcacattgaccgctggctgctggccgagatgctcggggatctgtcggacagccagctaaaggtgtggatgagcaaatacggctggagtgccgacgagtcggggcagatcttcatctgtagccaagaagagagcattaaacccaagaacattgtggagaagattgactttgacagtgagtggtgacccacggcctcgggctttggggctaagggggtgcccctcaagggaggccgaggcaggggcccagaggacctgggtagatctgctcgtgttctgggctgggaagtctgcacctgccagattccattcaccttgtgtcttggggctcccgcccaggaggaatagcggggagctgggtgatcttccctggaacttctaggccctgtgtcctgccccatagcactcagcaagacttcctggggcccagcggggcctcacagggggtctctgcacccttatttgtccctgaggcctgtctcgttggccatcttttattcttggggtgcccaagcctcatgtgcagacttggaatccggtga

SEQ ID NO: 175049 - DNA, 1027 bp, Artificial Sequence
  derived and/or modified sequence
ctgttcccgtccttgaggacgccgtgccgggtcagtgttagcctccagccctggttgtggaaggcgacagaagtcatggcgatgtttgagcagatgagagccaacgtgggcaagttgctcaagggtatcgacaggtacaatcctgagaacctggccaccctggagcgctatgtagagacgcaggccaaggaaaatgcctatgatctggaagccaacctggctgtcctgaagctgtaccagttcaacccagccttctttcagaccacggtcaccgcccagatcctgctgaaggccctcaccaacttgccgcacacagacttcaccctgtgcaagtgcatgatcgaccaggcacatcaagaagaacggccaatccgacagattttgtacctcggggacctgctggagacctgccatttccaggccttctggcaagccctggatgaaaacatggacctcttggaaggtataactggctttgaagactctgtccgaaagtttatctgccatgttgtgggtatcacttaccagcacattgaccgctggctgctggccgagatgctcggggatctgtcggacagccagctaaaggtgtggatgagcaaatacggctggagtgccgacgagtcggggcagatcttcatctgtagccaagaagagagcattaaacccaagaacattgtggagaagattgactttgacagtgagtggtgacccacggcctcgggctttggggctaagggggtgcccctcaagggaggccgaggcaggggcccagaggacctgggtagatctgctcgtgttctgggctgggaagtctgcacctgccagattccattcaccttgtgtcttggggctcccgcccaggaggaatagcggggagctgggtgatcttccctggaacttctaggccctgtgtcctgccccatagcactcagcaagacttcctggggcccagcggggcctcacagggggtctctgcacccttatttgtccctgaggcctgtctcgttggccatcttttattctt

SEQ ID NO: 175050 - DNA, 657 bp, Artificial Sequence
  derived and/or modified sequence
atggctatgttcgagcagatgcgggctaacgtcggaaagttacttaaagggatcgatcggtacaatcccgagaacctagctaccctggagaggtatgtagagactcaagcaaaagaaaatgcttatgacctggaggcaaacctggccgtcctgaagctgtaccagttcaatcctgcgttctttcagactaccgtaactgcccaaattctcctcaaggccctgaccaacttaccacatacagacttcacactatgtaagtgcatgattgaccaggcgcatcaggaggagcggccaattaggcaaatattgtacctgggcgaccttctcgaaacttgccacttccaggcattttggcaggcgctcgatgaaaacatggatttgttggagggtataactgggtttgaagactctgtcaggaaatttatatgccacgtagtcggcattacgtaccagcatattgatcggtggctgctagctgagatgctcggcgacctcagtgattcccagctcaaagtctggatgtctaaatacgggtggtcagctgacgagtccgggcagatattcatctgcagccaggaagaaagtatcaagccaaaaaatattgtcgagaagattgacttcgattccgtctcctcaataatggcctcctcccagtag

SEQ ID NO: 175051 - DNA, 636 bp, Artificial Sequence
  derived and/or modified sequence
atggcaatgttcgagcagatgagggccaatgtgggcaagttgctcaagggcatagaccgctacaaccctgaaaacctcgccaccttagagagatatgtggagacccaggccaaggagaacgcctatgatctcgaggcaaacctcgccgttctgaagctgtatcaattcaatccagcctttttccagacaactgttacggcccagatcttgcttaaagccctgaccaatctcccccacaccgactttacactgtgcaagtgtatgattgaccaggcacaccaggaggagcgtccgattaggcaaatcctgtacctcggtgacctcttagagacatgccactttcaagcattctggcaggcactggatgagaacatggatctgctggaggggatcaccggcttcgaggacagtgtcagaaagtttatatgccatgtggttgggattacctatcagcacatcgaccgctggctgctagctgagatgctgggcgacttgagtgattctcagctgaaggtctggatgagcaaatatggttggtccgctgatgagtccgggcaaattttcatttgcagccaggaggaaagcatcaaacctaagaatatcgtcgagaaaatagattttgacagtgaatggtag

SEQ ID NO: 175052 - DNA, 657 bp, Artificial Sequence
  derived and/or modified sequence
atggccatgtttgagcagatgagggccaacgtgggcaagctgctgaagggcatcgaccgctacaaccctgagaacctggccaccctggagcgctacgtggagacccaggccaaggaaaatgcctatgacctggaggccaacctggccgtgctgaagctgtaccagttcaacccagccttcttccagaccaccgtgacagcccagatcctgctgaaggccctgaccaacctgccccacacagacttcaccctgtgcaagtgcatgattgaccaggcccaccaggaggagcggcccatccggcagatcctgtacctgggggacctgctggagacctgccacttccaggccttctggcaggccctggatgagaacatggacctgctggagggcatcaccggctttgaagattctgtgaggaagttcatctgccacgtggtgggcatcacctaccagcacatcgaccgctggctgctggccgagatgctgggggacctgagtgacagccagctgaaggtgtggatgagcaaatatggctggagcgcagatgagagcggccagatcttcatctgcagccaggaggagagcatcaagcccaagaacatcgtggagaagattgactttgattctgtgagcagcatcatggccagcagccagtag

SEQ ID NO: 175053 - DNA, 636 bp, Artificial Sequence
  derived and/or modified sequence
atggccatgtttgagcagatgagggccaacgtgggcaagctgctgaagggcatcgaccgctacaaccctgagaacctggccaccctggagcgctacgtggagacccaggccaaggaaaatgcctatgacctggaggccaacctggccgtgctgaagctgtaccagttcaacccagccttcttccagaccaccgtgacagcccagatcctgctgaaggccctgaccaacctgccccacacagacttcaccctgtgcaagtgcatgattgaccaggcccaccaggaggagcggcccatccggcagatcctgtacctgggggacctgctggagacctgccacttccaggccttctggcaggccctggatgagaacatggacctgctggagggcatcaccggctttgaagattctgtgaggaagttcatctgccacgtggtgggcatcacctaccagcacatcgaccgctggctgctggccgagatgctgggggacctgagtgacagccagctgaaggtgtggatgagcaaatatggctggagcgcagatgagagcggccagatcttcatctgcagccaggaggagagcatcaagcccaagaacatcgtggagaagattgactttgattctgagtggtag

SEQ ID NO: 175054 - DNA, 657 bp, Artificial Sequence
  derived and/or modified sequence
atggccatgttcgagcagatgcgggccaacgtgggcaagctgctgaaaggcattgatcgatacaatccggaaaatttggctacactggagcgctacgttgaaactcaggccaaagaaaacgcgtatgatttggaggccaacctggccgtgctcaaactctatcagttcaaccccgctttttttcagacaaccgtgactgctcagatcttgttgaaggctttaacaaatctcccacacaccgacttcacactatgtaagtgcatgatagatcaggcccaccaggaggaacggcccatccggcagatcctctatctgggtgatctcctggaaacctgtcacttccaggccttctggcaagccctggatgagaatatggacctcctcgagggcataaccgggttcgaggactccgtgcgaaaatttatctgtcacgtggtgggtattacctaccagcacattgatcgctggctgcttgcagagatgctgggggacctgagcgatagccaactgaaagtttggatgagtaaatacggctggtccgccgacgagtcgggccagatattcatctgctctcaggaggaatccattaagccaaagaacattgtggagaagatcgattttgattcggtaagtagcatcatggctagtagccagtag

SEQ ID NO: 175055 - DNA, 636 bp, Artificial Sequence
  derived and/or modified sequence
atggccatgttcgagcagatgcgggccaacgtgggcaagctgctgaagggaatcgaccggtataatcccgaaaacctcgccactcttgaacgatacgtcgagactcaagcgaaagaaaacgcctatgatttagaagccaacctcgcggtgctgaagctttaccaatttaaccccgcgttctttcaaaccaccgtgaccgcacagatcctcctgaaagccctgacaaatctaccgcacactgatttcaccctgtgcaaatgcatgatcgaccaggcccatcaggaagagcgcccgatccgacaaattctgtacctgggtgatcttctggagacatgccactttcaggctttttggcaggcgctagacgagaacatggacctgctggaaggaatcactggtttcgaagacagcgtgaggaagtttatttgtcacgtggtggggattacctatcaacacatcgatcggtggctgctggcagagatgttgggcgacctgtccgactctcagctcaaagtctggatgtctaagtacggctggtccgcagacgagtccggccagatcttcatatgttctcaggaggaatctattaaaccaaagaatattgtggaaaaaatcgactttgattctgaatggtag

SEQ ID NO: 175056 - DNA, 657 bp, Artificial Sequence
  derived and/or modified sequence
atggctatgtttgaacagatgcgagcaaatgtggggaagctgttaaagggcatcgaccggtacaatcctgagaacctggccactttggagcgctatgtggagactcaggccaaggagaacgcctatgacttggaggcaaatctagccgtcctgaagctgtatcagttcaaccccgcattcttccagaccactgttacggctcagatcctgctgaaagctctcactaaccttccccataccgattttacactgtgcaaatgtatgatcgatcaggctcaccaagaggagagacccatccggcagatcctctatctgggtgacctgctggagacatgccacttccaagcgttttggcaagcactcgacgagaacatggacctgttggaaggtatcaccggctttgaggacagtgtgcgaaaatttatttgtcacgtggttgggataacgtaccagcacatagacagatggctgttggcggaaatgctgggggacctgtccgattcacaactcaaggtgtggatgtctaaatatgggtggtctgctgatgagtccgggcaaatcttcatttgtagccaggaggagagcataaaacctaaaaatatcgtcgaaaagattgactttgattctgtcagctccataatggccagttcccagtag

SEQ ID NO: 175057 - DNA, 636 bp, Artificial Sequence
  derived and/or modified sequence
atggcaatgtttgagcagatgcgagcaaacgtgggtaaactgctcaaaggtatcgacagatacaatcctgaaaatttagccaccctggagagatacgtggagactcaagccaaggaaaacgcttacgatctcgaagctaatttagccgtgttgaagctttaccagtttaacccagccttctttcagaccacagtgaccgcccagatcctgctgaaggctctgactaatctgccacataccgatttcactctgtgtaagtgcatgattgaccaagctcaccaagaagaacgccctatcagacagatcctgtatcttggtgacttgttggagacatgccacttccaagcattctggcaagcccttgatgagaatatggacctcctagaaggaatcaccggctttgaggactctgtcagaaagttcatctgtcacgtggtcggcattacgtaccagcacatagaccggtggttacttgccgagatgctcggggacctttccgactcgcagttaaaggtgtggatgtctaaatacggatggagcgctgatgaatccggccagattttcatctgttcacaagaggaaagtatcaaacccaaaaacattgttgagaaaattgacttcgattcagagtggtag

SEQ ID NO: 175058 - DNA, 657 bp, Artificial Sequence
  derived and/or modified sequence
atggccatgttcgagcagatgagagccaacgtgggcaagctgctgaagggcatcgacagatacaaccccgagaacctggccaccctggagagatacgtggagacccaggccaaggagaacgcctacgacctggaggccaacctggccgtgctgaagctgtaccagttcaaccccgccttcttccagaccaccgtgaccgcccagatcctgctgaaggccctgaccaacctgccccacaccgacttcaccctgtgcaagtgcatgatcgaccaggcccaccaggaggagagacccatcagacagatcctgtacctgggcgacctgctggagacctgccacttccaggccttctggcaggccctggacgagaacatggacctgctggagggcatcaccggcttcgaggacagcgtgagaaagttcatctgccacgtggtgggcatcacctaccagcacatcgacagatggctgctggccgagatgctgggcgacctgagcgacagccagctgaaggtgtggatgagcaagtacggctggagcgccgacgagagcggccagatcttcatctgcagccaggaggagagcatcaagcccaagaacatcgtggagaagatcgacttcgacagcgtgagcagcatcatggccagcagccagtag

SEQ ID NO: 175059 - DNA, 636 bp, Artificial Sequence
  derived and/or modified sequence
atggccatgttcgagcagatgagagccaacgtgggcaagctgctgaagggcatcgacagatacaaccccgagaacctggccaccctggagagatacgtggagacccaggccaaggagaacgcctacgacctggaggccaacctggccgtgctgaagctgtaccagttcaaccccgccttcttccagaccaccgtgaccgcccagatcctgctgaaggccctgaccaacctgccccacaccgacttcaccctgtgcaagtgcatgatcgaccaggcccaccaggaggagagacccatcagacagatcctgtacctgggcgacctgctggagacctgccacttccaggccttctggcaggccctggacgagaacatggacctgctggagggcatcaccggcttcgaggacagcgtgagaaagttcatctgccacgtggtgggcatcacctaccagcacatcgacagatggctgctggccgagatgctgggcgacctgagcgacagccagctgaaggtgtggatgagcaagtacggctggagcgccgacgagagcggccagatcttcatctgcagccaggaggagagcatcaagcccaagaacatcgtggagaagatcgacttcgacagcgagtggtag

SEQ ID NO: 175060 - protein, 1374 aa, Artificial Sequence
  derived and/or modified sequence
MMQGNTCHRMSFHPGRGCPRGRGGHGARPSAPSFRPQNLRLLHPQQPPVQYQYEPPSAPSTTFSNSPAPNFLPPRPDFVPFPPPMPPSAQGPLPPCPIRPPFPNHQMRHPFPVPPCFPPMPPPMPCPNNPPVPGAPPGQGTFPFMMPPPSMPHPPPPPVMPQQVNYQYPPGYSHHNFPPPSFNSFQNNPSSFLPSANNSSSPHFRHLPPYPLPKAPSERRSPERLKHYDDHRHRDHSHGRGERHRSLDRRERGRSPDRRRQDSRYRSDYDRGRTPSRHRSYERSRERERERHRHRDNRRSPSLERSYKKEYKRSGRSYGLSVVPEPAGCTPELPGEIIKNTDSWAPPLEIVNHRSPSREKKRARWEEEKDRWSDNQSSGKDKNYTSIKEKEPEETMPDKNEEEEEELLKPVWIRCTHSENYYSSDPMDQVGDSTVVGTSRLRDLYDKFEEELGSRQEKAKAARPPWEPPKTKLDEDLESSSESECESDEDSTCSSSSDSEVFDVIAEIKRKKAHPDRLHDELWYNDPGQMNDGPLCKCSAKARRTGIRHSIYPGEEAIKPCRPMTNNAGRLFHYRITVSPPTNFLTDRPTVIEYDDHEYIFEGFSMFAHAPLTNIPLCKVIRFNIDYTIHFIEEMMPENFCVKGLELFSLFLFRDILELYDWNLKGPLFEDSPPCCPRFHFMPRFVRFLPDGGKEVLSMHQILLYLLRCSKALVPEEEIANMLQWEELEWQKYAEECKGMIVTNPGTKPSSVRIDQLDREQFNPDVITFPIIVHFGIRPAQLSYAGDPQYQKLWKSYVKLRHLLANSPKVKQTDKQKLAQREEALQKIRQKNTMRREVTVELSSQGFWKTGIRSDVCQHAMMLPVLTHHIRYHQCLMHLDKLIGYTFQDRCLLQLAMTHPSHHLNFGMNPDHARNSLSNCGIRQPKYGDRKVHHMHMRKKGINTLINIMSRLGQDDPTPSRINHNERLEFLGDAVVEFLTSVHLYYLFPSLEEGGLATYRTAIVQNQHLAMLAKKLELDRFMLYAHGPDLCRESDLRHAMANCFEALIGAVYLEGSLEEAKQLFGRLLFNDPDLREVWLNYPLHPLQLQEPNTDRQLIETSPVLQKLTEFEEAIGVIFTHVRLLARAFTLRTVGFNHLTLGHNQRMEFLGDSIMQLVATEYLFIHFPDHHEGHLTLLRSSLVNNRTQAKVAEELGMQEYAITNDKTKRPVALRTKTLADLLESFIAALYIDKDLEYVHTFMNVCFFPRLKEFILNQDWNDPKSQLQQCCLTLRTEGKEPDIPLYKTLQTVGPSHARTYTVAVYFKGERIGCGKGPSIQQAEMGAAMDALEKYNFPQMAHQKRFIERKYRQELKEMRWEREHQEREPDETEDIKK

SEQ ID NO: 175061 - DNA, 4125 bp, Artificial Sequence
  derived and/or modified sequence
atgatgcagggcaacacctgtcacagaatgtcatttcatcccggaaggggatgtccccggggccggggagggcatggcgccagaccaagtgctccgagctttagacctcagaatctcagactgcttcatcctcagcaaccccccgtccaataccagtatgagcctccatccgccccaagcaccacgttctccaattccccagcacccaattttttgccacctcgcccagattttgtgccattccctccgcccatgcccccctccgctcagggacctctgcccccgtgcccgattcgccctcccttcccaaatcaccagatgcgtcacccattccccgttcctccatgttttccaccaatgcccccacccatgccatgccccaacaaccctccagtacctggagcacctcccgggcagggaacttttccttttatgatgcctcctccatcaatgccccatcctcccccccctcccgttatgcctcagcaagtgaactatcagtaccccccaggatattcacaccacaactttccgccgccttcatttaacagttttcagaataatccctcctcatttctgccctctgctaacaacagttcgtctcctcactttaggcacctgcccccgtatcccctgcccaaggcgccatccgaacggcgatccccagagcgcctgaagcactacgatgaccaccgacatagggatcattctcatggtcgcggtgaacgccaccgcagtctcgaccgacgagagagagggcgctcacctgacagaagacgccaggacagtcgatatagaagtgactacgatcgcggccgaactccgtcacggcaccggtcatacgagaggtcacgcgaaagggaacgggaacgccacagacatcgggataacagacgcagcccttcgctggaacggtcctataaaaaggaatacaagagaagcgggcgaagctatggcctttcagtcgtgcccgagccagccgggtgcacccccgaactgcctggcgagattattaaaaacactgactcctgggccccccccctagagatagtgaatcacagatccccctcacgggagaagaagagggcacgctgggaggaagaaaaggatcggtggtcagataatcagtcgtcggggaaagacaagaattacaccagcataaaagagaaggagcctgaagaaactatgcccgataagaatgaagaggaggaagaagagttattaaaaccagtgtggatacggtgcacgcatagtgagaactattatagcagcgatcctatggatcaggtcggggattccacggtcgtcggaacatctaggctcagggacttgtatgacaaattcgaggaggaactcggttcaagacaagagaaagctaaggctgccaggcctccctgggaacccccaaaaaccaagctagatgaagatctggaatcgtcgtcggagtccgagtgtgaaagcgatgaagattccacttgctcttcctcaagcgattcggaggtgttcgatgtgatcgccgaaattaaaagaaaaaaggcccatcccgatcggctgcacgacgaactgtggtataatgaccctggtcagatgaacgacggccctctgtgcaaatgcagcgccaaggctcgacgcactggcattcgacattcgatctatcccggcgaggaggccatcaagccttgtcggcctatgaccaacaatgccgggaggctattccattatcggatcacggtatcgccacccacaaattttctgaccgatcgtccgacagtgattgagtatgatgaccatgaatatatattcgaagggttttccatgtttgcacatgcccctctgacaaatatccccctgtgtaaagtaatacgatttaacattgactataccatccatttcattgaagaaatgatgccggagaatttctgcgttaagggactcgagctatttagtcttttcctgtttagagacattctggaattgtacgattggaacctcaaagggcctttgttcgaagacagccccccctgttgccctaggtttcactttatgcctagatttgtccggttcctccctgacggcgggaaggaggttctgtctatgcaccaaatcctcctttatcttttgaggtgctcgaaggcactggtgcccgaggaggagattgccaatatgcttcagtgggaggagttggagtggcagaaatatgcggaggagtgtaaaggcatgatagttacaaatccagggacaaaaccttcctccgtacgcatcgaccagctggaccgggagcagttcaatcccgacgtgattacctttcccattattgtgcacttcggcattcgtcctgcacagctgtcatatgccggtgacccgcagtaccaaaaactctggaagtcctatgtgaaactgcggcacctgctcgcgaattctcccaaggtaaaacaaaccgataaacaaaaactggcacagcgtgaagaggcattgcagaagataaggcagaagaatacgatgagacgagaggtcacggtggaattgtcaagccagggattctggaagacaggaatccgcagcgatgtctgccagcatgcaatgatgctccctgtgctcacccaccacatcaggtatcaccagtgtctaatgcacctggataagctgattggatacactttccaggatagatgtctcctccagcttgccatgacacatccctctcaccaccttaatttcggtatgaatcctgatcatgcgcgaaactccctcagtaactgtgggatccgccagcctaagtacggtgataggaaagtgcatcacatgcatatgaggaagaaaggaattaacacactcattaacattatgagccgcttaggacaggatgatccgactccctcccgtatcaatcataacgagcggttggaatttctgggggatgctgtcgttgagtttctaacgtctgttcacttgtattacctgttcccctcattggaggagggtggtctggcgacttatcggactgctatcgtccagaatcaacacttggccatgcttgccaagaaattggagctggacagattcatgctgtatgcccatggccccgacttatgccgggaatccgatcttcgacacgccatggcaaattgcttcgaggcccttatcggtgctgtgtacctggaggggtccctggaggaggccaaacagctttttggcagactgctctttaacgatcccgacttgcgagaggtgtggttgaattaccctctgcacccattgcagcttcaagagccgaacacagacaggcagctcatagagacaagccccgtactccaaaaactcacggagttcgaggaggcaatcggtgtgatcttcacgcatgttcgcttactcgcgcgggcattcacactgcgtacagtcggtttcaatcatctcacgcttgggcataatcagagaatggagtttttaggagacagcatcatgcaactggtggctactgagtatctgttcatacacttccctgaccatcatgaagggcacctaactctgttaaggtcatccctggtgaacaacaggactcaggccaaagtagcagaagagctgggaatgcaggaatacgctattaccaacgacaaaacgaaaaggcctgtggcccttagaacaaaaactctcgcggatctgttggaaagctttatcgctgctctgtacatcgataaggacctggaatacgtgcacacatttatgaacgtatgcttcttccctcgcttaaaagaatttattctcaaccaggattggaacgaccccaaaagccaactgcagcagtgctgtctcacgttgcggacggaaggcaaagaaccggatatccccctgtacaaaaccttacagaccgtggggcctagccacgcaaggacctacacggtggccgtgtactttaaaggggagcggatcggctgtggtaaaggaccctccattcaacaggctgagatgggagccgctatggacgcactagaaaagtacaattttccacagatggcacaccagaaacgcttcatcgagaggaaatatagacaggaattgaaagagatgcgatgggaacgcgagcatcaagagcgggaacccgacgagaccgaagacatcaagaaatag

SEQ ID NO: 175062 - DNA, 4125 bp, Artificial Sequence
  derived and/or modified sequence
atgatgcagggcaacacctgccaccgcatgtccttccatcccgggcgggggtgcccacgggggcgcggtggacacggagcacgtccctcagctccaagcttccgccctcagaacctgaggctactgcatccccaacagccaccagtccagtatcaatatgagccaccctctgctccatccactaccttttccaatagtcctgctccaaactttcttccccccagaccggattttgttcccttcccgccgcctatgcccccgtctgcccagggtcccctccctccttgtcccatccggcctccttttcccaaccaccagatgaggcatccctttccagtgcctccctgctttccgcctatgccgccaccgatgccttgtccaaataatccccctgttcccggggctccacctggccaggggacctttccctttatgatgcctcctcccagtatgcctcatcccccacctccccctgtgatgccgcagcaggtaaattatcagtatcctccaggatattcacaccataatttcccaccgccctcatttaactcctttcagaacaacccctcatcttttctaccatcagcaaacaacagtagtagtccccatttccgccatctccccccgtatccactgcccaaagcccctagtgagaggagaagcccagaacgtctgaaacattatgatgatcaccggcaccgtgatcatagtcacggacgaggggaacgtcaccggagtctggacaggcgggagcgtggtcgctctcccgaccggcgccggcaggatagccggtaccggtccgactatgaccgagggcggacaccgtccaggcatagaagttatgaaagatctagggaacgggagcgagagcggcatcgccatagagacaatagacggagtccatcactggaaagatcatacaaaaaggagtataaaagatcaggacgctcctacggactgagcgtagtgccggagcccgctgggtgtacacctgaactccctggagaaatcataaaaaacaccgactcctgggcccccccactcgagatcgtcaatcatagatcacccagccgcgagaagaagcgagctcgctgggaagaagaaaaagacagatggtctgacaaccagtcatccgggaaggacaagaactacacgtccataaaggagaaggagcctgaggagactatgcctgacaaaaacgaagaggaggaggaggagctccttaaacccgtgtggatccgttgtactcatagtgagaattactatagcagcgacccgatggaccaggtgggtgatagcaccgtggtcgggacctcccgcctaagggacctctacgataaattcgaggaggaactgggctccagacaggagaaggccaaagcggcgcgccccccctgggaacctcctaagactaaactggacgaagatttggagagctcatccgaatcagagtgcgagagcgatgaggacagcacctgcagcagtagttccgactctgaggtattcgatgtcatcgccgaaataaagcgcaaaaaggctcaccctgataggttgcatgatgagctctggtacaacgaccccggccagatgaacgatggcccactctgcaaatgttccgctaaggcccgccgcaccggaattcggcacagtatctacccaggtgaagaagccattaagccatgccggccaatgacgaacaatgctgggcggttattccattataggatcacagtgtcccctcccacaaactttcttaccgataggccaacagtgattgagtacgacgatcatgagtatatcttcgagggtttctctatgtttgcccatgctcctctgactaacattccactttgtaaagtcattaggttcaatatcgactacacaatccattttatcgaggagatgatgccggagaatttctgtgtaaagggattggagttgttcagtttattcttgtttcgtgatattctagagctgtacgattggaatttgaaaggacccctctttgaagacagcccgccatgttgcccacgattccattttatgccgcgcttcgtcaggttcctgcccgatggaggaaaagaagttctttctatgcaccaaattctgctctaccttctgagatgtagcaaagcacttgtacctgaggaagaaattgccaacatgctacagtgggaggagctggagtggcaaaagtacgcagaggaatgtaagggcatgatagtgactaatccgggcacaaagccgagctctgtgcgtatcgatcaactggatagagagcagttcaacccagacgttattacattcccgatcattgttcactttggcatacgcccagcgcagctgagttatgccggtgatccacaataccagaaactctggaagtcctatgttaagcttcgacacctgctggctaacagccccaaagtgaaacaaacagacaaacagaagctggcccagcgggaagaggcactccagaagatccgccagaagaacactatgaggcgtgaggttaccgttgagcttagctcgcaggggttctggaagaccggcatcagatccgatgtgtgccaacacgcaatgatgctgcctgtgctcacacaccacattaggtatcaccagtgtcttatgcacctggataagttaatcgggtacacctttcaggacaggtgcttactccagctggcgatgactcacccatctcatcatctgaattttggcatgaatcccgaccatgcgagaaattcattatccaactgcggaattcgacagccgaaatacggggaccggaaggtgcaccacatgcatatgcggaagaagggcatcaacaccctgattaatattatgtccaggctaggtcaggacgaccccacccctagtagaataaatcacaacgaacgactggagttccttggagacgctgtggtcgaattcctgacgtccgttcatctctattatttgtttcctagcctggaagaaggaggtctggccacctataggacagcaattgtgcaaaaccagcacctagccatgcttgccaaaaaactggagctggatcggttcatgctctacgcccacgggcctgacctttgtcgggagagcgacctccgacatgcaatggccaactgtttcgaggcgctgattggcgccgtttacctggaaggtagtctggaggaggccaagcagctgtttggacggttgctgttcaatgatccggatctccgagaggtgtggctgaattaccctcttcacccgctgcagcttcaggagccaaatacagaccgacagctgattgagacttcaccagtgctccagaaactgacggagttcgaggaagcgatcggggtgattttcacgcacgttaggctgctcgctcgagcctttaccttgaggaccgtcggattcaatcatctaactcttggccacaaccagagaatggagtttcttggcgactccataatgcagctggtagccacagagtacctgtttatacactttccagatcatcacgagggccatctaacattactgaggagcagtctggtcaacaataggacccaggctaaagtggctgaagagctgggcatgcaggaatacgccataacaaacgataagactaagcggccagtcgcactgagaacgaagacactggccgaccttttggagagctttatagcggcgctgtatattgacaaagatttagagtacgttcatactttcatgaatgtctgctttttccccagactcaaagagttcattctcaaccaagattggaacgaccccaaatcccagctgcagcagtgttgtttaacactgcgcactgaaggaaaggagcccgatattccattgtataaaaccttgcagaccgtgggaccctcccacgccaggacatacaccgttgccgtgtattttaagggcgagaggatagggtgcggcaagggacccagcatccagcaggccgagatgggggccgcaatggacgcactggaaaaatacaacttcccccaaatggcccaccagaagagattcattgaaagaaaatatcgccaagaactgaaggaaatgcggtgggagagagaacaccaggaacgcgaacctgatgagactgaagacattaaaaaatag

SEQ ID NO: 175063 - DNA, 4125 bp, Artificial Sequence
  derived and/or modified sequence
atgatgcagggcaacacctgccacaggatgtccttccaccctggccggggctgcccccggggccggggcggccatggagcccggcccagcgcccccagcttccggccccagaacctgcggctgctgcacccccagcagccccctgtgcagtaccagtatgagcccccatctgcccccagcaccaccttcagcaacagccctgcccccaacttcctgccccccaggccagactttgtgcccttccccccacccatgccacccagcgcccagggccccctgcccccctgccccatccggccccccttccccaaccaccagatgaggcaccccttccctgtgcccccctgcttcccccccatgcccccacccatgccctgccccaacaacccccctgtgcctggggcccctcctggccagggcaccttccccttcatgatgcccccacccagcatgccccaccccccacctcctcctgtgatgccccagcaggtgaactaccagtacccacctggctacagccaccacaacttccccccacccagcttcaacagcttccagaacaaccccagcagcttcctgcccagcgccaacaacagcagcagcccccacttccgccacctgcccccctaccccctgcccaaggcccccagcgagaggaggagccctgagcggctgaagcactatgatgaccaccgccaccgggaccacagccacggccgcggggagcggcacaggagcctggacagaagagagcggggccgcagcccagacagaagacggcaggacagccgctacagaagtgactatgaccggggccgcacccccagccgccacaggagctatgaaagaagccgggagcgggagcgggagcggcaccgccaccgggacaacagaagaagccccagcctggagaggagctacaagaaggagtacaagaggagcggccgctcctatggcctgtctgtggtgcctgagcctgctggctgcaccccagagctgcccggggagatcatcaagaacacagacagctgggccccacccctggagatcgtgaaccacaggagccccagccgggagaagaagagggcccgctgggaggaggagaaggaccgctggagcgacaaccagagcagcggcaaggacaagaactacaccagcatcaaggagaaggagcctgaggagaccatgccagacaagaatgaggaggaggaggaggagctgctgaagcctgtgtggatccgctgcacccacagcgagaactactacagcagtgaccccatggaccaggtgggggacagcacagtggtgggcaccagccggctgcgggacctgtatgacaagtttgaggaggagctgggcagccggcaggagaaggccaaggccgcccggcccccctgggagccccccaagaccaagctggatgaggacctggagagcagcagcgagagtgaatgtgagagtgatgaggacagcacctgcagcagcagcagtgacagcgaggtgtttgatgtgattgctgagatcaagaggaagaaggcccacccagaccggctgcatgatgagctgtggtacaatgaccccggccagatgaatgatggccccctgtgcaagtgcagcgccaaggccaggagaacaggcatccgccacagcatctacccaggagaggaggccatcaagccctgccggcccatgaccaacaatgccggccgcctcttccactaccgcatcaccgtgagcccccccaccaacttcctgacagaccggcccaccgtcatcgagtatgatgaccacgagtacatctttgagggcttctccatgtttgcccacgcccccctgaccaacatccccctgtgcaaggtgatccgcttcaacatcgactacaccatccacttcatcgaggagatgatgcctgagaacttctgtgtgaagggcctggagctgttcagcctcttcctgttccgggacatcctggagctgtatgactggaacctgaagggccccctgtttgaggacagccccccctgctgcccccgcttccacttcatgcccaggtttgtgcgcttcctgcctgatggcggcaaggaggtgctgtccatgcaccagatcctgctgtacctgctgcgctgcagcaaggccctggtgcctgaggaggagatcgccaacatgctgcagtgggaggagctggagtggcagaagtatgcagaggagtgcaagggcatgattgtgaccaaccctggcaccaagcccagctctgtgagaattgaccagctggaccgggagcagttcaacccagatgtgatcaccttccccatcatcgtgcacttcggcatccggcctgcccagctgtcctatgctggggacccccagtaccagaagctgtggaagagctatgtgaagctgcggcacctgctggccaacagccccaaggtgaagcagacagacaagcagaagctggcccagcgggaggaggccctgcagaagatccggcagaagaacaccatgagaagagaggtgacagtggagctgagcagccagggcttctggaagacaggcatccgcagtgatgtgtgccagcacgccatgatgctgcctgtgctgacccaccacatccgctaccaccagtgcctgatgcacctggacaagctgattggctacaccttccaggaccgctgcctgctgcagctggccatgacccaccccagccaccacctgaactttggcatgaacccagaccacgccaggaacagcctgagcaactgtggcatccggcagcccaagtatggagacaggaaggtgcaccacatgcacatgaggaagaagggcatcaacaccctcatcaacatcatgagccggctgggccaggatgaccccacccccagccgcatcaaccacaatgaaaggctggagttcctgggagatgctgtggtggagttcctgacctctgtgcacctgtactacctgttccccagcctggaggagggcggcctggccacctacagaacagccatcgtgcagaaccagcacctggccatgctggccaagaagctggagctggaccgcttcatgctgtatgcccacggccctgacctgtgccgggagagtgacctgcggcatgccatggccaactgctttgaggccctgattggagctgtgtacctggagggcagcctggaggaggccaagcagctgtttggccgcctgctcttcaatgaccctgacctgcgggaggtgtggctgaactaccccctgcaccccctgcagctgcaggagcccaacacagaccggcagctgattgagaccagccctgtgctgcagaagctgacagaatttgaggaggccatcggggtcatcttcacccacgtgcggctgctggcccgggccttcaccctgaggacagtgggcttcaaccacctgaccctgggccacaaccagaggatggagttcctgggggacagcatcatgcagctggtggccacagagtacctgttcatccacttcccagaccaccacgagggccacctgaccctgctgcggagcagcctggtgaacaacagaacccaggccaaggtggccgaggagctgggcatgcaggagtatgccatcaccaatgacaagaccaagaggcctgtggccctgcggaccaagaccctggccgacctgctggagagcttcatcgccgccctgtacatcgacaaggacctggagtatgtgcacaccttcatgaatgtgtgcttcttcccccggctgaaggagttcatcctgaaccaggactggaatgaccccaagagccagctgcagcagtgctgcctgaccctgaggacagagggcaaggagccagacatccccctgtacaagaccctgcagacagtgggccccagccacgcccggacctacacagtggccgtgtacttcaagggggagagaattggctgtgggaagggccccagcatccagcaggccgagatgggcgccgccatggatgccctggagaagtacaacttcccccagatggcccaccagaagcgcttcatcgagaggaagtaccggcaggagctgaaggagatgcgctgggagcgggagcaccaggagcgggagccagatgaaacagaggacatcaagaagtag

SEQ ID NO: 175064 - DNA, 4125 bp, Artificial Sequence
  derived and/or modified sequence
atgatgcagggcaacacctgccaccggatgagcttccaccccggcaggggctgcccacgcggtcgtggcgggcacggggcacgtcccagtgccccttcattccgccctcagaacctccgactcctgcacccccagcagccccccgttcagtaccagtacgagccgccaagcgccccgtctacgaccttcagtaattctccggctcctaacttcttgccccccaggcccgactttgttccatttcctcctccaatgccacctagtgctcagggcccactcccaccctgcccaatacgaccacctttcccaaatcatcagatgcgccacccattccccgtccccccctgctttccccctatgcctccccctatgccgtgcccgaacaacccacccgtgcccggggcacctccaggccagggaacgttcccttttatgatgccaccaccctcaatgccgcacccaccgcccccccccgtaatgccccagcaggtgaattaccagtatcctccgggctatagtcatcacaactttcctcctccctcttttaacagcttccagaataacccatcgtcttttctgccgtctgcgaacaactcttcatcaccgcacttccgtcatctgcccccttatccacttccaaaggcaccttctgagcggagaagcccggagaggctaaagcactacgacgaccaccgccaccgggaccactctcatgggagaggcgaacgacatagaagtcttgataggcgagagcgagggagatcccctgacagacggcgccaagattccagatataggtcagattacgacagagggcgcactccctcccgtcacagaagctatgaacggtctagagaaagagaacgggagcgccacaggcaccgagataataggcggtccccctcactggaacgcagttataagaaagagtataagagaagcggaagaagttacggattatccgtcgtccctgagccagcaggttgcactcccgaattgcccggagagatcattaagaatactgactcttgggcaccccccctcgaaatagtaaatcaccgaagtccgtcccgagaaaaaaaacgggcacgatgggaggaagagaaagatcggtggagcgataaccaatctagcgggaaagataagaactatacgtcaataaaagagaaggaacctgaagagaccatgccagataaaaatgaggaggaggaagaggagctgctgaaaccagtgtggattcggtgcacacactctgaaaattactatagctcagacccaatggatcaggtgggggactctaccgtggttggaacaagccggctacgagacctatatgataagttcgaggaggaactcgggtccagacaggagaaagccaaggcggccagaccgccttgggagccacctaaaacaaaactcgatgaggacctggagtcctcatcagagtcagagtgtgagagtgacgaagatagcacatgcagctcctcttccgatagcgaggtcttcgacgtaatcgctgaaattaaaagaaaaaaagcccatcccgataggctccatgacgaactgtggtacaatgatcctggccagatgaacgacgggccactctgcaagtgcagtgccaaagctcgccggactggtatccggcactccatttaccccggggaagaggccattaagccttgtcgaccgatgacgaataatgcgggacgtctctttcactatcggataaccgttagtccgcccactaacttcctgactgatagaccaaccgttatcgaatacgacgatcacgagtatatattcgagggatttagcatgttcgctcacgcaccattgacaaacattccactctgcaaggttattaggtttaatatcgattacacgatccacttcatcgaagaaatgatgcccgaaaacttttgtgtcaagggcctggaactcttcagcctgttcctgttcagggacattctggagttgtacgactggaacctgaagggccctctgtttgaggattccccaccatgttgtccccgctttcatttcatgccccggttcgtaaggttcctaccggatggaggcaaagaagtgctctccatgcaccagattctcttgtacctccttcgttgttccaaggccctggtgccggaggaagagatcgctaacatgcttcagtgggaagagctggaatggcagaaatatgcagaggagtgcaaaggcatgatcgtgactaatccaggtacaaagccctccagtgtgcggatcgatcagctcgatcgggagcaatttaatcctgacgtgattacgttccctataatcgtccatttcggcatacgtccagcccaactgagctacgccggagatcctcagtaccagaaactgtggaaaagttacgtcaagctgcgacaccttctcgccaattccccgaaagtaaaacagaccgataagcaaaagctcgcccaacgtgaggaagctcttcaaaagatcagacagaagaacactatgcgcagggaagtgaccgttgaattgagctcacagggcttctggaaaacaggcattaggtctgacgtgtgccaacatgcaatgatgctgcccgtcttgacacatcatatccggtaccaccagtgcttaatgcatctggacaagctgattggctacacattccaagatcgctgcttacttcaactcgctatgactcacccctctcatcatctgaactttggcatgaaccctgaccatgcccgtaactcattgtcaaattgcggcatccgtcagccaaaatatggcgatcgcaaggttcaccatatgcacatgcgtaagaaggggattaataccttaataaatataatgagtcgtctcggtcaggacgaccctaccccttcacgaatcaatcacaacgagagattagaatttctgggggacgctgttgtggaattcttgactagcgtccatctatattatctattcccttctctggaggaaggtggcttggcgacatatcgcaccgccatcgtgcagaatcagcatctggcgatgctggcaaaaaagttggagctggacaggtttatgctttacgcccatggccccgacttgtgccgcgaatcagacttgagacacgctatggccaattgttttgaagctttgattggggccgtatatctggaaggcagcctggaggaggccaagcagctgtttggcaggctgctattcaatgacccggacctcagggaagtttggctgaattatcccttgcaccctctccaacttcaggaaccaaatacagataggcagctcattgaaacctctccggtcctccagaagctgactgagtttgaggaagcaatcggcgtgatttttacgcacgttagactgctggccagagcctttacccttagaaccgtgggttttaatcaccttactcttggacacaaccaacgcatggaattcctcggggattccataatgcagctagtcgccacagagtatctgttcatccattttcccgatcaccacgagggtcacctgacgctgcttcggtccagcctggtgaacaacagaacacaggccaaagtggcggaagagctgggaatgcaggaatatgctattacaaatgacaaaaccaagaggccagtggccctccggacaaagacccttgctgacctccttgagtctttcattgccgccctctacattgacaaagacttggaatatgtacatactttcatgaacgtatgcttcttcccccgcttgaaagagttcatacttaatcaagactggaacgacccaaagtcgcaacttcagcaatgctgcttgactctgcgaaccgaaggcaaggaaccagatatcccattatataaaacactgcagacggtcggacccagccacgcacgaacctatactgtggcagtctatttcaagggcgaaagaattggctgcggaaaagggcctagtatccagcaagccgaaatgggggccgctatggatgccctcgagaagtacaattttccacagatggcccaccagaagagattcatcgagcgaaagtaccgccaggagctcaaggagatgaggtgggaaagagagcaccaagagcgagagcctgacgagaccgaagatattaaaaaatag

SEQ ID NO: 175065 - DNA, 4125 bp, Artificial Sequence
  derived and/or modified sequence
atgatgcagggcaacacctgccaccggatgagcttccaccccggcagaggttgtcctcgtgggaggggagggcatggggcacggccatctgctccttcttttcggcctcaaaacctgagactgttgcatcctcagcagcctccggtgcagtaccagtacgaaccgcccagtgccccaagtacaacctttagcaactcccccgcgcctaacttcttgccaccaagacccgatttcgtgccatttccgccacctatgcctccttcggcgcaggggcctttgcccccgtgcccaattagaccacctttcccaaatcatcagatgcgccaccccttccccgtgccaccatgttttcctcccatgccaccacctatgccttgtccgaataatcccccagttcctggcgctccccccggccaaggcacctttcccttcatgatgcctcccccttcaatgcctcacccaccaccccccccggtgatgccacagcaagtgaattatcagtacccgcctggatacagccatcataatttccccccacccagcttcaactcgttccaaaataatccctcttcttttctgcctagtgctaataacagctcgtctccacatttccggcacctccctccttaccctctccctaaggcccctagtgagcggcgctccccggagcgattgaagcactatgacgatcatcggcaccgggatcacagccatggacgcggagagcgtcacagatccctggaccgcagagaacgcggaaggtctcctgaccgacgacgccaagactcacgatataggtccgactacgataggggacgcactccaagtcgccaccgctcctacgagagatcccgcgagcgagagcgggagaggcatagacatcgcgataacagacggtctccgtccctggagagaagctacaaaaaggagtataaacgctctggacgctcctacggactaagcgtcgtccccgagcccgccggttgcacccctgaattgcccggagaaatcattaagaacactgactcctgggcccctcccctggaaatcgtgaatcacaggtcaccctcccgcgagaagaaaagggctcgatgggaggaagagaaagatcgttggtcagataatcagtcttcagggaaagacaagaattatacctcgataaaggagaaagagcccgaagaaacaatgccagacaaaaacgaggaggaggaggaagaactgttgaaaccggtgtggatccgatgcactcattctgagaactattacagctctgatccgatggaccaggtaggagattcaacagtggtggggacatctagactccgggatctttacgacaagtttgaggaggaactggggtcccgccaagagaaggctaaagcggcaaggccgccctgggagccccccaagaccaagttggacgaggatttggagagcagctctgagtccgaatgtgagtcagacgaggacagcacatgtagctcctcaagtgattccgaggtcttcgacgtgatcgctgaaatcaaaaggaaaaaagcgcacccagatcgtctccacgatgagctctggtataatgacccaggccagatgaacgacggccccctttgcaagtgttcagctaaggctcgaaggacaggcattcggcattcaatctaccccggtgaggaagctatcaaaccctgtaggcctatgacaaacaatgccgggcgcctgttccattacaggattacagtatctcctcctactaacttcctcaccgatagacctacggtgatcgaatacgacgatcacgagtatatcttcgagggatttagcatgtttgcacacgctcctctgactaatattcctctctgcaaagtgatccgttttaacattgactacaccatacattttatagaagaaatgatgccagagaatttttgcgtaaagggactggaactgttcagtctattcctgttcagggacatactggaactgtacgactggaacctgaagggtccactgttcgaagactcaccaccttgttgccctaggttccatttcatgccacgattcgtgcgctttttgcccgatggcggtaaagaagtgctaagcatgcatcagatactcctgtatcttctccgctgttctaaagccctagtacccgaggaggagattgccaacatgcttcaatgggaggagctggaatggcagaagtacgccgaggaatgcaaaggtatgatcgttaccaaccctggcacgaaaccatcatccgtgcgcattgaccagctggaccgggaacagtttaaccctgacgtgattacgttccccatcatagtgcacttcggtatacgtccagctcaactgagttacgccggagaccctcagtaccagaagctgtggaaatcatacgttaagctccggcacctgctggcaaacagccccaaggttaagcagacggacaagcagaaattggcgcaaagggaggaggctctccagaaaattcggcagaaaaatacaatgcgtagggaagtaaccgtcgaattgtcaagccaaggattttggaagacgggaatcaggtccgatgtgtgccagcacgccatgatgctgcccgttttgactcaccacatcaggtatcatcagtgcttgatgcatctggataagcttattggatacacgttccaggaccgctgtctgctgcagctcgccatgacccacccttcccaccacttgaattttggtatgaatccagaccacgctaggaattcattaagcaattgtggaatcaggcaacccaagtatggcgaccggaaagtgcaccacatgcacatgagaaagaaggggatcaacaccttaatcaatattatgagcagactggggcaggatgatccaaccccttcccggattaaccacaacgaacgattggaattcctgggcgatgcagtggtggagttcctgacttccgtgcacctctattacctgtttccatcacttgaggaagggggcctggccacttaccgaaccgcgatcgttcagaaccagcatctagcaatgctagcaaagaaacttgagctggatagatttatgctgtacgcacacgggccagatctgtgtagggagagcgatctgaggcacgcgatggcaaactgtttcgaagctctgattggcgccgtttaccttgagggatcactggaggaggctaagcaactttttggtcgcttgctttttaatgacccagacctgcgggaggtctggctgaattacccacttcaccctctgcagctgcaggaacctaatactgataggcaacttatcgaaacatctccggtcctgcagaagctaaccgaattcgaggaggctatcggtgtcatttttacccacgttcgcctacttgcgcgcgcttttacgctacgaacagtcgggtttaaccacctgacattggggcataaccaacggatggaatttttaggagacagtattatgcagcttgtggccacagaatatctgtttattcactttccagatcaccacgagggccatctgactctgcttcggtcttctctggtcaataacagaacacaggccaaggtggcagaagagttgggcatgcaggagtatgctatcaccaacgataaaacaaagagaccagtggcactccggaccaagacactggccgatctgctggaatccttcatcgcggcgctgtatatcgataaagacctggagtatgtgcacaccttcatgaatgtctgctttttccccaggctgaaagagttcattctgaaccaagattggaacgaccccaaatctcagcttcagcagtgctgcctgaccttaaggactgagggaaaagaaccagacatccctctgtacaagactctgcagaccgtggggccatcccacgccagaacttataccgttgctgtgtattttaaaggggaacgaatcgggtgtggaaaaggcccgtcaattcagcaggccgaaatgggtgctgccatggatgcattagaaaagtacaactttccacagatggcacatcaaaaacgcttcatcgagaggaaataccggcaagaattgaaggaaatgagatgggagagggaacaccaggaacgggagcccgatgagacagaggatatcaaaaagtag

SEQ ID NO: 175066 - DNA, 4125 bp, Artificial Sequence
  derived and/or modified sequence
atgatgcaagggaatacctgccaccgcatgtctttccatccaggacgaggctgccctagaggccgaggaggacatggagcgaggccatctgctcccagctttcgtcctcagaacttacgcctcttgcatccccagcaacctcccgtgcagtatcagtatgaacctccatcagccccttctactacattctccaacagccctgctccaaatttcttgccaccccgtccagactttgtgcccttccctccccctatgccacccagcgctcagggacccttgcccccttgccccattaggccaccattcccaaaccatcaaatgcgccacccctttcccgtccctccatgtttccctcccatgccccctcccatgccttgcccaaacaacccccctgttcctggggcacccccagggcaaggcacctttcctttcatgatgcctcctccctccatgccacacccgccaccccctcccgtgatgccacagcaagtaaactaccaatatccccctggatactcacaccataactttccacccccaagcttcaactcctttcaaaacaacccaagttcgtttctgccgagtgccaataattcctcctctccgcattttcggcacctacctccgtacccactgcctaaagcaccttctgagcgcagatcgcccgagcgcctgaaacattacgatgatcaccgtcatcgggaccacagccacggtcgaggagagaggcatcggtcattggatcgcagagaacgcggtagatcgcccgatcgaagaaggcaagacagccggtaccgctctgactatgatcgaggcagaacccctagtcgccaccgatcctatgagagatctagagagcgcgagagggagcgccaccgtcatcgcgacaacagacgctccccatcactggagaggagctacaagaaagagtacaaaaggtctggaagaagctacggactgagcgtggtcccagaaccagccggatgtaccccggagctccccggagagattattaaaaatacagactcttgggcacccccacttgaaatcgtaaaccatcgctctccctcgcgcgagaaaaagcgggctaggtgggaggaggagaaagacaggtggtccgataatcagagctctgggaaagacaagaactatactagcataaaagaaaaggaaccagaagagaccatgccagacaaaaacgaggaagaagaagaagaattgctcaaacctgtctggatccgatgcacccactccgaaaactattacagtagcgatccaatggatcaagtaggcgacagcactgttgtggggacatcacgacttagagacctctacgacaagtttgaggaagagctgggatcacgccaagaaaaggccaaagccgctaggccaccatgggagccccctaagaccaagttggacgaggatctggaaagcagtagtgaaagcgagtgtgaaagtgacgaagactcaacgtgttcaagcagctcagacagcgaggtgtttgacgtgatcgccgaaatcaaacgtaaaaaggcccaccctgaccgcctgcacgatgagctgtggtataatgatccagggcaaatgaacgatggacctctgtgcaagtgctctgccaaggcaagaagaactgggattaggcactccatttaccccggtgaggaggccattaagccttgtcggccaatgaccaataacgccggaagactgttccattaccgcataactgtaagcccacccactaactttcttactgacaggcctacagtgatcgaatacgacgaccacgagtacatcttcgagggattctccatgtttgcacatgctcctctcactaacatacccttatgcaaagtaattcggtttaacatcgactatactatccacttcatcgaagaaatgatgcccgagaatttttgtgtgaagggattggagctgttcagtttatttctgtttcgggacatcctcgagctgtacgactggaacctcaagggccctttgttcgaggactcccccccatgttgtcctagatttcacttcatgccgagattcgtgcgcttcctacccgacgggggaaaggaagtactctctatgcatcagatccttctttatttattaagatgctccaaggcgctggtgccggaggaagaaatcgcaaatatgttgcagtgggaggaattggagtggcaaaagtatgcggaggaatgtaagggtatgattgttacaaatccaggcaccaaaccctcttcagtgcggatagaccagttggaccgcgagcagttcaatcccgatgtgatcacgttccccataattgtccactttgggatccggcctgctcaactctcttacgccggtgaccctcagtaccagaaactgtggaagtcatacgtcaagctcagacacttgctcgccaactctcctaaggttaagcaaacagacaaacagaaactggcccagagggaggaggccctacagaagattcgccagaaaaacacaatgaggcgagaagtaacagttgagcttagctcccagggtttctggaagactggtattcggtcagatgtgtgccaacacgctatgatgctgccagtgctgacacatcatattcggtaccaccagtgtctgatgcatttagataagctgatcggttacacatttcaagatcgatgcctgctacagctggccatgactcaccccagccaccacttgaacttcggcatgaatcctgatcatgcacgtaacagtctaagtaattgcggcataaggcagcctaagtacggagacaggaaggttcaccacatgcacatgaggaaaaagggcatcaataccctgatcaacattatgtctcgacttgggcaagatgaccccactccctcccgaatcaatcacaacgagagattagaattccttggggacgcagtagtagaatttctaaccagtgtgcacctttactacctttttccctctctggaggagggaggcctcgcaacatatcgcacagctattgttcagaaccaacatctagcaatgctcgcaaaaaagttggagttagacagatttatgctttacgcccacgggcctgacctgtgcagagagtctgacttacgccatgccatggcaaattgctttgaggcgctgataggagccgtgtacctggaagggagcctggaggaggcaaagcagcttttcgggaggctgttgtttaatgaccccgacctgagagaggtgtggttaaactatccgcttcaccctcttcagttgcaggagccgaatactgaccgacagctcattgaaacatctcccgtgctgcagaaattgaccgagttcgaggaggccataggggtgatttttacacacgtcaggctgctagcacgtgcctttactttgaggaccgtcggttttaaccatctgacacttggacataaccagcggatggaattcctgggagatagcatcatgcaactggtggccactgagtatctcttcatacatttccctgatcaccatgaaggccacctcacactgctgcgtagcagtctggtgaacaataggacccaagccaaggtggccgaagaattaggaatgcaagagtatgcgatcacgaatgacaaaaccaagcgccctgtcgccctcaggacaaagactttggccgacctgctcgaaagcttcatcgctgccttgtatattgataaggacctggagtatgtacacaccttcatgaacgtgtgttttttccccagactcaaggaatttattcttaatcaggattggaacgatccaaagtcacagctccagcagtgttgcctgaccttgcggaccgaaggcaaggagccagacataccactctacaagaccttgcaaactgttggcccatcccatgcccgaacctacacagttgccgtctattttaagggggaaagaatcggctgtggtaaaggtccaagcatccagcaagctgagatgggggcagctatggacgctctggagaagtacaattttccacagatggctcaccaaaaaagattcatcgagcgcaagtaccgacaggaactgaaagagatgcgctgggagagggaacatcaggagcgcgagccggatgagacagaggacatcaaaaagtag

SEQ ID NO: 175067 - DNA, 4125 bp, Artificial Sequence
  derived and/or modified sequence
atgatgcagggcaatacttgtcatcgtatgagcttccacccaggacgcggatgccctcgcggacgtggcggtcacggcgcacggccttccgctccaagcttccgcccacagaacctgaggctacttcacccacagcagccaccagtccaatatcagtatgagcccccatctgctccttccacaactttcagcaactcacccgcacccaactttctgcctcctcggcctgatttcgtgccgttcccaccccctatgccacccagcgcccagggccctcttccaccgtgtcccattcgtcccccttttcctaaccaccagatgaggcatcccttccctgtgcctccgtgtttccctcccatgcctccgccaatgccctgtcctaacaatccgccagtcccaggcgcacccccaggccagggcaccttcccgttcatgatgcctcctccttcaatgccccacccaccgccacctcctgtgatgccacagcaggtgaattatcagtatccaccaggctactcacaccacaatttcccccctccttcgttcaacagtttccagaataatcctagcagcttcctccctagtgccaacaattccagctctccccacttccgccacctgccgccatacccactgcctaaggccccatccgagaggagatcacctgagaggctcaagcattacgacgaccatcgccaccgcgatcattcccacggccgaggggaacgtcatagaagtcttgatagacgagaaaggggtagaagccctgataggcgcagacaggatagcagatacagaagcgactacgaccgtggcaggacaccaagcaggcatcgaagttacgaaaggtcgcgcgaacgtgagcgtgaacgacaccgccatagagacaacagacggagcccctctttagagcggagctacaaaaaggaatacaagcggtccggtcgttcttacgggctgagtgtggtgcctgaacctgccggatgtactccggagctgccaggagagatcatcaagaacactgacagctgggctccaccattggagatcgtgaatcacagatctcccagcagggagaaaaaaagggctcggtgggaagaagaaaaggacaggtggtctgataatcaaagctcagggaaagacaaaaattacacaagcatcaaagaaaaggagcccgaagagaccatgcctgacaaaaacgaggaggaggaagaagagctcctcaagcccgtgtggataaggtgcacccacagcgaaaactactatagtagtgatccaatggaccaagtcggagacagtactgtcgtcggaacaagtcgcctcagggatttatacgacaagttcgaggaagaattaggctcaaggcaggaaaaggctaaggcagccaggcctccatgggagcccccaaagaccaaattggacgaggacctggagtcaagcagtgagtctgagtgtgaaagtgatgaagacagtacttgcagttcctcatcagattcggaggtgtttgacgtcatcgcggaaatcaagcggaaaaaggctcatcccgaccgtctgcatgatgaattgtggtataatgaccccggacagatgaacgatggcccactttgtaagtgctcagccaaagcccgacgcaccggaatccgccattccatttatcccggtgaggaggcaattaaaccatgtaggccaatgactaacaacgcgggaagattattccactatcggataacagtatcccccccaacaaatttcctaaccgacaggcccaccgtgattgagtacgatgatcacgaatacatcttcgaggggttttcaatgtttgcccacgcccctttgacaaacattcccctgtgcaaggtcatccggttcaatattgactacaccatacattttatcgaggagatgatgcccgagaatttttgtgtcaaaggtctcgaactcttcagccttttcctgtttcgcgatatcctggaactgtacgattggaatctcaagggacccctcttcgaagacagtcctccttgctgcccacgtttccattttatgccgcgatttgtgagattcctccccgacggcggtaaagaggtcctgagcatgcatcaaatactgctctacctgctgcggtgtagcaaggctctggtgcccgaggaagagatcgctaacatgctacaatgggaagaactcgagtggcaaaagtacgcagaagagtgtaaaggaatgatcgtaacaaaccccggaactaagccttcctccgtgcgcatcgatcagctggaccgggagcagtttaaccccgatgtcatcacgtttcccataatagttcatttcggaatcaggccggcacagttgagctacgcaggcgatccacagtaccaaaagctttggaaaagttatgtaaaactgcggcatctgctggccaattcaccgaaagtcaagcagaccgataaacaaaagctggctcagcgggaggaggccttgcagaaaatccggcagaaaaatacaatgcgcagagaggtgacggttgagctgtctagccagggcttttggaagactggtatccgaagtgacgtttgtcaacatgccatgatgctgcccgttctgacgcatcacatacgctatcatcagtgtcttatgcatctggataagcttattggctacacctttcaagaccgctgtctcctccagctggccatgactcatccatcccaccaccttaacttcggaatgaatcccgaccatgccagaaattcactgagcaactgcgggattcgtcaaccaaagtacggcgatcgcaaagtgcaccacatgcacatgcgcaaaaagggtatcaacaccctgataaacatcatgagcaggttggggcaggacgaccctacaccttctcgcattaatcacaacgaaagacttgaatttttaggggatgctgtcgtcgagtttcttacttccgtccatttgtattacctgttcccaagcctagaagaggggggactggccacataccggacagccatagtacagaatcagcacctggccatgcttgccaagaaactggaactagatcgatttatgctctacgcccatggcccagacctctgccgcgagtccgatctccggcacgccatggccaactgtttcgaagcccttattggcgcagtctacctcgagggctccctggaggaagccaagcagctcttcggtaggttactgtttaatgaccccgatcttagagaggtgtggctgaactaccccctccacccactgcagctgcaggaacctaatacagaccgtcagctgatcgaaacaagtcccgtcctccagaagctaaccgagttcgaggaggcaatcggggtcatattcactcacgttaggctgctggctagggcctttaccttgcggactgtgggttttaatcacttaacactgggccataatcaacgcatggagtttctcggcgactcaattatgcagctggtggctaccgagtacctgttcattcattttcccgatcaccacgaaggtcacttgactcttctgaggtccagcctcgtcaataatagaacacaggcaaaggtcgccgaggagctgggaatgcaggaatacgcaataacaaacgataaaactaaaagacccgtggcactgcggaccaagaccctagccgatctgctcgagtccttcatagccgcactgtacatagataaggacctcgagtacgtgcacactttcatgaatgtctgttttttcccacggcttaaagagtttatactgaaccaggattggaatgatcctaagtcacagctgcagcaatgctgcttaactctaaggacagaaggcaaggagcccgatattccactctacaagactcttcagaccgtaggtcctagtcacgctagaacttataccgtagccgtctatttcaagggtgagaggatcggttgcggaaaaggacccagcattcagcaagccgagatgggcgcagcgatggacgctttggagaagtacaatttccctcaaatggcccaccagaagcgatttatagaaagaaagtaccggcaggagttgaaagagatgcggtgggaacgagaacaccaggaaagagaacccgatgagacagaggacattaagaaatag

SEQ ID NO: 175068 - DNA, 4125 bp, Artificial Sequence
  derived and/or modified sequence
atgatgcagggcaacacctgccacagaatgagcttccaccccggcagaggctgccccagaggcagaggcggccacggcgccagacccagcgcccccagcttcagaccccagaacctgagactgctgcacccccagcagccccccgtgcagtaccagtacgagccccccagcgcccccagcaccaccttcagcaacagccccgcccccaacttcctgccccccagacccgacttcgtgcccttccccccccccatgccccccagcgcccagggccccctgcccccctgccccatcagaccccccttccccaaccaccagatgagacaccccttccccgtgcccccctgcttcccccccatgcccccccccatgccctgccccaacaacccccccgtgcccggcgccccccccggccagggcaccttccccttcatgatgcccccccccagcatgccccaccccccccccccccccgtgatgccccagcaggtgaactaccagtacccccccggctacagccaccacaacttccccccccccagcttcaacagcttccagaacaaccccagcagcttcctgcccagcgccaacaacagcagcagcccccacttcagacacctgcccccctaccccctgcccaaggcccccagcgagagaagaagccccgagagactgaagcactacgacgaccacagacacagagaccacagccacggcagaggcgagagacacagaagcctggacagaagagagagaggcagaagccccgacagaagaagacaggacagcagatacagaagcgactacgacagaggcagaacccccagcagacacagaagctacgagagaagcagagagagagagagagagagacacagacacagagacaacagaagaagccccagcctggagagaagctacaagaaggagtacaagagaagcggcagaagctacggcctgagcgtggtgcccgagcccgccggctgcacccccgagctgcccggcgagatcatcaagaacaccgacagctgggccccccccctggagatcgtgaaccacagaagccccagcagagagaagaagagagccagatgggaggaggagaaggacagatggagcgacaaccagagcagcggcaaggacaagaactacaccagcatcaaggagaaggagcccgaggagaccatgcccgacaagaacgaggaggaggaggaggagctgctgaagcccgtgtggatcagatgcacccacagcgagaactactacagcagcgaccccatggaccaggtgggcgacagcaccgtggtgggcaccagcagactgagagacctgtacgacaagttcgaggaggagctgggcagcagacaggagaaggccaaggccgccagacccccctgggagccccccaagaccaagctggacgaggacctggagagcagcagcgagagcgagtgcgagagcgacgaggacagcacctgcagcagcagcagcgacagcgaggtgttcgacgtgatcgccgagatcaagagaaagaaggcccaccccgacagactgcacgacgagctgtggtacaacgaccccggccagatgaacgacggccccctgtgcaagtgcagcgccaaggccagaagaaccggcatcagacacagcatctaccccggcgaggaggccatcaagccctgcagacccatgaccaacaacgccggcagactgttccactacagaatcaccgtgagcccccccaccaacttcctgaccgacagacccaccgtgatcgagtacgacgaccacgagtacatcttcgagggcttcagcatgttcgcccacgcccccctgaccaacatccccctgtgcaaggtgatcagattcaacatcgactacaccatccacttcatcgaggagatgatgcccgagaacttctgcgtgaagggcctggagctgttcagcctgttcctgttcagagacatcctggagctgtacgactggaacctgaagggccccctgttcgaggacagccccccctgctgccccagattccacttcatgcccagattcgtgagattcctgcccgacggcggcaaggaggtgctgagcatgcaccagatcctgctgtacctgctgagatgcagcaaggccctggtgcccgaggaggagatcgccaacatgctgcagtgggaggagctggagtggcagaagtacgccgaggagtgcaagggcatgatcgtgaccaaccccggcaccaagcccagcagcgtgagaatcgaccagctggacagagagcagttcaaccccgacgtgatcaccttccccatcatcgtgcacttcggcatcagacccgcccagctgagctacgccggcgacccccagtaccagaagctgtggaagagctacgtgaagctgagacacctgctggccaacagccccaaggtgaagcagaccgacaagcagaagctggcccagagagaggaggccctgcagaagatcagacagaagaacaccatgagaagagaggtgaccgtggagctgagcagccagggcttctggaagaccggcatcagaagcgacgtgtgccagcacgccatgatgctgcccgtgctgacccaccacatcagataccaccagtgcctgatgcacctggacaagctgatcggctacaccttccaggacagatgcctgctgcagctggccatgacccaccccagccaccacctgaacttcggcatgaaccccgaccacgccagaaacagcctgagcaactgcggcatcagacagcccaagtacggcgacagaaaggtgcaccacatgcacatgagaaagaagggcatcaacaccctgatcaacatcatgagcagactgggccaggacgaccccacccccagcagaatcaaccacaacgagagactggagttcctgggcgacgccgtggtggagttcctgaccagcgtgcacctgtactacctgttccccagcctggaggagggcggcctggccacctacagaaccgccatcgtgcagaaccagcacctggccatgctggccaagaagctggagctggacagattcatgctgtacgcccacggccccgacctgtgcagagagagcgacctgagacacgccatggccaactgcttcgaggccctgatcggcgccgtgtacctggagggcagcctggaggaggccaagcagctgttcggcagactgctgttcaacgaccccgacctgagagaggtgtggctgaactaccccctgcaccccctgcagctgcaggagcccaacaccgacagacagctgatcgagaccagccccgtgctgcagaagctgaccgagttcgaggaggccatcggcgtgatcttcacccacgtgagactgctggccagagccttcaccctgagaaccgtgggcttcaaccacctgaccctgggccacaaccagagaatggagttcctgggcgacagcatcatgcagctggtggccaccgagtacctgttcatccacttccccgaccaccacgagggccacctgaccctgctgagaagcagcctggtgaacaacagaacccaggccaaggtggccgaggagctgggcatgcaggagtacgccatcaccaacgacaagaccaagagacccgtggccctgagaaccaagaccctggccgacctgctggagagcttcatcgccgccctgtacatcgacaaggacctggagtacgtgcacaccttcatgaacgtgtgcttcttccccagactgaaggagttcatcctgaaccaggactggaacgaccccaagagccagctgcagcagtgctgcctgaccctgagaaccgagggcaaggagcccgacatccccctgtacaagaccctgcagaccgtgggccccagccacgccagaacctacaccgtggccgtgtacttcaagggcgagagaatcggctgcggcaagggccccagcatccagcaggccgagatgggcgccgccatggacgccctggagaagtacaacttcccccagatggcccaccagaagagattcatcgagagaaagtacagacaggagctgaaggagatgagatgggagagagagcaccaggagagagagcccgacgagaccgaggacatcaagaagtag

SEQ ID NO: 175069 - DNA, 5102 bp, Artificial Sequence
  derived and/or modified sequence
gagcttatattctctgtggaagatgtgacatatccaggcggaacatcatgatgcagggaaacacatgtcacagaatgtcgttccacccgggacgagggtgtccccgaggacgaggaggacatggagccagaccctcagcaccatcctttaggccccaaaatctgaggctgcttcaccctcagcagcctcctgtgcaatatcaatatgaacctccaagtgccccttccaccactttctcaaactctccagcccccaattttctccctccacgaccagactttgtacccttccccccacccatgcctccgtcagcgcaaggccctcttcccccctgcccaatcaggccgcctttccccaaccaccagatgaggcaccccttcccagttcctccttgttttcctcccatgccaccaccaatgccttgtcctaataaccccccagtccctggggcacctcctggacaaggcactttccccttcatgatgccccctccctccatgcctcatcccccgccccctccagtcatgccgcagcaggttaattatcagtaccctccgggctattctcaccacaacttcccacctcccagttttaatagtttccagaacaaccctagttctttcctgcccagtgctaataacagcagtagtcctcatttcagacatctccctccatacccactcccaaaggctcccagtgagagaaggtccccagaaaggctgaaacactatgatgaccacaggcaccgagatcacagtcatgggcgaggtgagaggcatcggtccctggatcggcgggagcgaggccgcagtcccgacaggagaagacaagacagccggtacagatctgattatgaccgagggagaacaccatctcgccaccgcagctacgaacggagcagagagcgagaacgggagagacacaggcatcgagacaaccgaagatcaccatctctggaaaggtcctacaaaaaagagtataagagatctggaaggagttacggtttatcggttgttcctgaacctgctggatgcacaccagaattacctggggagattattaaaaatacagattcttgggccccacccctggagattgtgaatcatcgctccccaagtagggagaagaagagagctcgttgggaggaagaaaaagaccgttggagtgacaaccagagttctggcaaagacaagaactatacctcaatcaaggaaaaagagcccgaggagaccatgcctgacaagaatgaggaggaagaagaagaacttcttaagcctgtgtggattcgatgcactcattcagaaaactactactccagtgaccccatggatcaggtgggagattctacagtggttggaacgagtaggcttcgtgacttatatgacaaatttgaggaggagttggggagcaggcaagaaaaggccaaagctgctcggcctccgtgggaacctccaaagacgaagctcgatgaagatttagagagttccagtgaatccgagtgtgagtctgatgaggacagcacctgttctagcagctcagactctgaagtttttgacgttattgcagaaatcaaacgcaaaaaggcccaccctgaccgacttcatgatgaactttggtacaacgatccaggccagatgaatgatggaccactctgcaaatgcagcgcaaaggcaagacgcacaggaattaggcacagcatttatcctggagaagaggccatcaagccctgtcgtcctatgaccaacaatgctggcagacttttccactaccggatcacagtctccccgcctacgaactttttaactgacaggccaactgttatagaatacgatgatcacgagtatatctttgaaggattttctatgtttgcacatgcccccctgaccaatattccactgtgtaaagtaattagattcaacatagactacacgattcatttcattgaagagatgatgccggagaatttttgtgtgaaagggcttgaactcttttcactgttcctattcagagatattttggaattatatgactggaatcttaaaggtcctttgtttgaagacagccctccctgctgcccaagatttcatttcatgccacgttttgtaagatttcttccagatggaggaaaggaagtgctgtccatgcaccagattctcctgtacttgttaaggtgcagcaaagccctggtgcctgaggaggagattgccaatatgcttcagtgggaggagctggagtggcagaaatatgcagaagaatgcaaaggcatgattgttaccaaccctgggacgaaaccaagctctgtccgtatcgatcaactggatcgtgaacagttcaaccccgatgtgattacttttccgattatcgtccactttgggatacgccctgcacagttgagttatgcaggagacccacagtaccaaaaactgtggaagagttatgtgaaacttcgccacctcctagcaaatagtcccaaagtcaaacaaactgacaaacagaagctggcacagagggaggaagccctccaaaaaatacggcagaagaatacaatgagacgagaagtaacggtggagctaagtagccaaggattctggaaaactggcatccgttctgatgtctgtcagcatgcaatgatgctacctgttctgacccatcatatccgctaccaccaatgcctaatgcatttggacaagttgataggatatactttccaagatcgttgtctgttgcagctggccatgactcatccaagtcatcatttaaattttggaatgaatcctgatcatgccaggaattcattatctaactgtggaattcggcagcccaaatacggagacagaaaagttcatcacatgcacatgcggaagaaagggattaacaccttgataaatatcatgtcacgccttggccaagatgacccaactccctcgaggattaaccacaatgaacggttggaattcctgggtgatgctgttgttgaatttctgaccagcgtccatttgtactatttgtttcctagtctggaagaaggaggattagcaacctatcggactgccattgttcagaatcagcaccttgccatgctagcaaagaaacttgaactggatcgatttatgctgtatgctcacgggcctgacctttgtagagaatcggaccttcgacatgcaatggccaattgttttgaagcgttaataggagctgtttacttggagggaagcctggaggaagccaagcagttatttggacgcttgctctttaatgatccggacctgcgcgaagtctggctcaattatcctctccacccactccaactacaagagccaaatactgatcgacaacttattgaaacttctccagttctacaaaaacttactgagtttgaagaagcaattggagtaatttttactcatgttcgacttctggcaagggcattcacattgagaactgtgggatttaaccatctgaccctaggccacaatcagagaatggaattcctaggtgactccataatgcaactggtagccacagagtacttattcattcatttcccagatcatcatgaaggacacttaactttgttgcgaagctctttggtgaataatagaactcaggccaaggtagcggaggagctgggcatgcaggagtacgccataaccaacgacaagaccaagaggcctgtggcgcttcgcaccaagaccttggcggaccttttggaatcatttattgcagcgctgtacattgataaggatttggaatatgttcatactttcatgaatgtctgcttctttccacgattgaaagagttcattttgaatcaggattggaatgaccccaaatcccagcttcagcagtgttgcttgacacttaggacagaaggaaaagagccagacattcctctgtacaagactctgcagacagtgggcccatcccatgcccgaacctacactgtggctgtttatttcaagggagaaagaataggctgtgggaaaggaccaagtattcagcaagcggaaatgggagcagcaatggatgcgcttgaaaaatataattttccccagatggcccatcagaagcggttcatcgaacggaagtacagacaagagttaaaagaaatgaggtgggaaagagagcatcaagagagagagccagatgagactgaagacatcaagaaataaaggagggcatgcaagtgtggagtatttacttgctcagtaactgtgactgttgtctattgagacctagcctagttttcctgcagacaatgaatgaagtgtgctcattgaaataaaatacagagtcaaatcgctattgttgttttaatgatctgtttttagctggatggtctttattacaaagtattagatttttcttctatttaacggaaaacttgactttggtgaatgtgcattacttccttttattttgctctttaaataataaaattcaagaagcatattctatgtggaatagatcctgtttttccatctgtgtcccagattgtgaccctagactttcaattgacaagtaaaaaattgactttactagacattttgactgtgctctagtaacatctatcctttttcaaatctctggatttttaagtagattgttcagctttcatccggtggctgttcatcaagttatcagctgcaaatattgaacttacctctctctaagcagtgagtgttttgtagaaggaatccgtttaacaattaattggctaatgggagaaggggaaagactgatattcaagtcatacagattctttgaatcattagaataggagagaaatcatgattctaagccaggccacactttaaaccaagtgctctcaccctggggttagtggaacctttaagaagttaatgaacagacttcaaggaagtcaaaaacctcccaatactatattcaattttctgtgtgtgtttgagatttgagagggcatggggagcaggaaggaggagggtttatagcttttatcagcctctctaagtgggccctgcagtaaaaggctaacatgacattcaaagacataacattttaaaaaaagttattccaaactaaacatcactggtttcttattaataaaggcaaaacttctttgt

SEQ ID NO: 175070 - DNA, 5305 bp, Artificial Sequence
  derived and/or modified sequence
ctgtcttggtacctgcggtagtagcctggctttgctctgacggcgatctcgcggcccgagagccttttataggttgcttttcccggggatgtgaaggatacagaaatgactgtgaatcaacccatatcatcaaggagctgataatctagtggaagagttagacgtgtgcatacttcactatgatatgaggcagtctctgagcttatattctctgtggaagatgtgacatatccaggcggaacatcatgatgcagggaaacacatgtcacagaatgtcgttccacccgggacgagggtgtccccgaggacgaggaggacatggagccagaccctcagcaccatcctttaggccccaaaatctgaggctgcttcaccctcagcagcctcctgtgcaatatcaatatgaacctccaagtgccccttccaccactttctcaaactctccagcccccaattttctccctccacgaccagactttgtacccttccccccacccatgcctccgtcagcgcaaggccctcttcccccctgcccaatcaggccgcctttccccaaccaccagatgaggcaccccttcccagttcctccttgttttcctcccatgccaccaccaatgccttgtcctaataaccccccagtccctggggcacctcctggacaaggcactttccccttcatgatgccccctccctccatgcctcatcccccgccccctccagtcatgccgcagcaggttaattatcagtaccctccgggctattctcaccacaacttcccacctcccagttttaatagtttccagaacaaccctagttctttcctgcccagtgctaataacagcagtagtcctcatttcagacatctccctccatacccactcccaaaggctcccagtgagagaaggtccccagaaaggctgaaacactatgatgaccacaggcaccgagatcacagtcatgggcgaggtgagaggcatcggtccctggatcggcgggagcgaggccgcagtcccgacaggagaagacaagacagccggtacagatctgattatgaccgagggagaacaccatctcgccaccgcagctacgaacggagcagagagcgagaacgggagagacacaggcatcgagacaaccgaagatcaccatctctggaaaggtcctacaaaaaagagtataagagatctggaaggagttacggtttatcggttgttcctgaacctgctggatgcacaccagaattacctggggagattattaaaaatacagattcttgggccccacccctggagattgtgaatcatcgctccccaagtagggagaagaagagagctcgttgggaggaagaaaaagaccgttggagtgacaaccagagttctggcaaagacaagaactatacctcaatcaaggaaaaagagcccgaggagaccatgcctgacaagaatgaggaggaagaagaagaacttcttaagcctgtgtggattcgatgcactcattcagaaaactactactccagtgaccccatggatcaggtgggagattctacagtggttggaacgagtaggcttcgtgacttatatgacaaatttgaggaggagttggggagcaggcaagaaaaggccaaagctgctcggcctccgtgggaacctccaaagacgaagctcgatgaagatttagagagttccagtgaatccgagtgtgagtctgatgaggacagcacctgttctagcagctcagactctgaagtttttgacgttattgcagaaatcaaacgcaaaaaggcccaccctgaccgacttcatgatgaactttggtacaacgatccaggccagatgaatgatggaccactctgcaaatgcagcgcaaaggcaagacgcacaggaattaggcacagcatttatcctggagaagaggccatcaagccctgtcgtcctatgaccaacaatgctggcagacttttccactaccggatcacagtctccccgcctacgaactttttaactgacaggccaactgttatagaatacgatgatcacgagtatatctttgaaggattttctatgtttgcacatgcccccctgaccaatattccactgtgtaaagtaattagattcaacatagactacacgattcatttcattgaagagatgatgccggagaatttttgtgtgaaagggcttgaactcttttcactgttcctattcagagatattttggaattatatgactggaatcttaaaggtcctttgtttgaagacagccctccctgctgcccaagatttcatttcatgccacgttttgtaagatttcttccagatggaggaaaggaagtgctgtccatgcaccagattctcctgtacttgttaaggtgcagcaaagccctggtgcctgaggaggagattgccaatatgcttcagtgggaggagctggagtggcagaaatatgcagaagaatgcaaaggcatgattgttaccaaccctgggacgaaaccaagctctgtccgtatcgatcaactggatcgtgaacagttcaaccccgatgtgattacttttccgattatcgtccactttgggatacgccctgcacagttgagttatgcaggagacccacagtaccaaaaactgtggaagagttatgtgaaacttcgccacctcctagcaaatagtcccaaagtcaaacaaactgacaaacagaagctggcacagagggaggaagccctccaaaaaatacggcagaagaatacaatgagacgagaagtaacggtggagctaagtagccaaggattctggaaaactggcatccgttctgatgtctgtcagcatgcaatgatgctacctgttctgacccatcatatccgctaccaccaatgcctaatgcatttggacaagttgataggatatactttccaagatcgttgtctgttgcagctggccatgactcatccaagtcatcatttaaattttggaatgaatcctgatcatgccaggaattcattatctaactgtggaattcggcagcccaaatacggagacagaaaagttcatcacatgcacatgcggaagaaagggattaacaccttgataaatatcatgtcacgccttggccaagatgacccaactccctcgaggattaaccacaatgaacggttggaattcctgggtgatgctgttgttgaatttctgaccagcgtccatttgtactatttgtttcctagtctggaagaaggaggattagcaacctatcggactgccattgttcagaatcagcaccttgccatgctagcaaagaaacttgaactggatcgatttatgctgtatgctcacgggcctgacctttgtagagaatcggaccttcgacatgcaatggccaattgttttgaagcgttaataggagctgtttacttggagggaagcctggaggaagccaagcagttatttggacgcttgctctttaatgatccggacctgcgcgaagtctggctcaattatcctctccacccactccaactacaagagccaaatactgatcgacaacttattgaaacttctccagttctacaaaaacttactgagtttgaagaagcaattggagtaatttttactcatgttcgacttctggcaagggcattcacattgagaactgtgggatttaaccatctgaccctaggccacaatcagagaatggaattcctaggtgactccataatgcaactggtagccacagagtacttattcattcatttcccagatcatcatgaaggacacttaactttgttgcgaagctctttggtgaataatagaactcaggccaaggtagcggaggagctgggcatgcaggagtacgccataaccaacgacaagaccaagaggcctgtggcgcttcgcaccaagaccttggcggaccttttggaatcatttattgcagcgctgtacattgataaggatttggaatatgttcatactttcatgaatgtctgcttctttccacgattgaaagagttcattttgaatcaggattggaatgaccccaaatcccagcttcagcagtgttgcttgacacttaggacagaaggaaaagagccagacattcctctgtacaagactctgcagacagtgggcccatcccatgcccgaacctacactgtggctgtttatttcaagggagaaagaataggctgtgggaaaggaccaagtattcagcaagcggaaatgggagcagcaatggatgcgcttgaaaaatataattttccccagatggcccatcagaagcggttcatcgaacggaagtacagacaagagttaaaagaaatgaggtgggaaagagagcatcaagagagagagccagatgagactgaagacatcaagaaataaaggagggcatgcaagtgtggagtatttacttgctcagtaactgtgactgttgtctattgagacctagcctagttttcctgcagacaatgaatgaagtgtgctcattgaaataaaatacagagtcaaatcgctattgttgttttaatgatctgtttttagctggatggtctttattacaaagtattagatttttcttctatttaacggaaaacttgactttggtgaatgtgcattacttccttttattttgctctttaaataataaaattcaagaagcatattctatgtggaatagatcctgtttttccatctgtgtcccagattgtgaccctagactttcaattgacaagtaaaaaattgactttactagacattttgactgtgctctagtaacatctatcctttttcaaatctctggatttttaagtagattgttcagctttcatccggtggctgttcatcaagttatcagctgcaaatattgaacttacctctctctaagcagtgagtgttttgtagaaggaatccgtttaacaattaattggctaatgggagaaggggaaagactgatattcaagtcatacagattctttgaatcattagaataggagagaaatcatgattctaagccaggccacactttaaaccaagtgctctcaccctggggttagtggaacctttaagaagttaatgaacagacttcaaggaagtcaaaaacctcccaatactatattcaattttctgtgtgtgtttgagatttgagagggcatggggagcaggaaggaggagggtttatagcttttatcagcctctctaagtgggccctgcagtaaaaggctaacatgacattcaaagacataacattttaaaaaaagttattccaaactaaacatcactggtttcttattaataaaggcaaaacttctttgtaaaac

SEQ ID NO: 175071 - protein, 475 aa, Artificial Sequence
  derived and/or modified sequence
MAAPRPPPARLSGVMVPAPIQDLEALRALTALFKEQRNRETAPRTIFQRVLDILKKSSHAVELACRDPSQVENLASSLQLITECFRCLRNACIECSVNQNSIRNLDTIGVAVDLILLFRELRVEQESLLTAFRCGLQFLGNIASRNEDSQSIVWVHAFPELFLSCLNHPDKKIVAYSSMILFTSLNHERMKELEENLNIAIDVIDAYQKHPESEWPFLIITDLFLKSPELVQAMFPKLNNQERVTLLDLMIAKITSDEPLTKDDIPVFLRHAELIASTFVDQCKTVLKLASEEPPDDEEALATIRLLDVLCEMTVNTELLGYLQVFPGLLERVIDLLRVIHVAGKETTNIFSNCGCVRAEGDISNVANGFKSHLIRLIGNLCYKNKDNQDKVNELDGIPLILDNCNISDSNPFLTQWVIYAIRNLTEDNSQNQDLIAKMEEQGLADASLLKKVGFEVEKKGEKLILKSTRDTPKP

SEQ ID NO: 175072 - protein, 453 aa, Artificial Sequence
  derived and/or modified sequence
MAAPRPPPARLSGVMVPAPIQDLEALRALTALFKEQRNRETAPRTIFQRVLDILKKSSHAVELACRDPSQVENLASSLQLITECFRCLRNACIECSVNQNSIRNLDTIGVAVDLILLFRELRVEQESLLTAFRCGLQFLGNIASRNEDSQSIVWVHAFPELFLSCLNHPDKKIVAYSSMILFTSLNHERMKELEENLNIAIDVIDAYQKHPESEWPFLIITDLFLKSPELVQAMFPKLNNQERVTLLDLMIAKITSDEPLTKDDIPVFLRHAELIASTFVDQCKTVLKLASEEPPVMYPYMRIVGKFRLLDVLCEMTVNTELLGYLQVFPGLLERVIDLLRVIHVAGKETTNIFSNCGCVRAEGDISNVANGFKSHLIRLIGNLCYKNKDNQDKVNELDGIPLILDNCNISDSNPCSDPVGDICHPKPYRRQQPKPRFDCKDGGTGAGRCIPT

SEQ ID NO: 175073 - DNA, 1428 bp, Artificial Sequence
  derived and/or modified sequence
atggcagccccgagacctccaccagccaggctctctggggtaatggtcccagcaccaatccaagatctggaagctctgagagcccttacagcccttttcaaggaacaacggaatcgggagacagcccctcgcaccatcttccaaagagtgttggatattttgaaaaagtcatctcatgccgttgagctggcctgccgcgatccctctcaggtggaaaacctcgcctcaagtctgcagttaatcactgaatgttttagatgtctacgcaatgcctgcatcgaatgtagcgtaaatcagaactctattcgaaacttagatactatcggagtggcagtggaccttatcctactgttcagagagctgcgggttgagcaagagtccctcttgacagcctttaggtgtggattgcagttcctgggtaatattgcatctcggaacgaggatagccagtctattgtgtgggtccacgccttccctgaattgttcctctcttgtctgaatcatccggacaagaaaattgtggcatattctagcatgatcctgtttactagcttgaaccacgagaggatgaaggagctggaagaaaatcttaatatagccatcgacgttatagacgcgtaccagaagcatccagagagcgagtggcccttcctgatcatcaccgacttatttctcaagagccccgagctcgtccaggccatgttcccgaaactaaacaatcaagagagagttaccctcctagatctgatgatcgcgaagatcaccagcgatgaacctttaacaaaagacgatataccagtctttctccggcatgctgagctgatcgctagcacttttgtggatcagtgcaaaaccgtactgaaactcgcatcagaagaaccacctgacgatgaggaggccctggccaccatacgcctgctcgacgttctctgcgaaatgactgttaacaccgaactactgggctatctgcaggtcttccccggcctgctggagagggttatcgatctcctgcgcgtcatccacgttgccggaaaagaaaccacaaatattttcagcaactgcggttgcgtgagggctgagggcgacatcagcaacgtcgctaacggctttaaatctcatctcattcggttaatcgggaacctgtgttacaagaacaaagacaatcaagacaaagtcaatgaactcgacggtataccactaattctggacaattgcaacatctctgactccaatccctttttaacccaatgggtgatatatgccatcagaaacctaaccgaggataacagccagaatcaggacctgatcgcaaagatggaggagcagggcctcgcagatgcgtccctactcaagaaagtaggattcgaggtggaaaagaagggggagaaattaatccttaaatcaactcgggatacgccaaagccctag

SEQ ID NO: 175074 - DNA, 1362 bp, Artificial Sequence
  derived and/or modified sequence
atggccgcccctagacctcccccagctcggttgtcaggagtgatggtccccgcgcccatccaagatttggaggcactgcgggccctgaccgctctgtttaaggaacagcgaaacagagagaccgccccccgtactattttccagcgcgtgctcgacatccttaaaaaatctagccacgccgtcgaattggcctgtcgagacccgtcccaagtggagaacttggcttccagtctgcagctcatcacggaatgctttcgatgtctgcgtaacgcctgtatcgagtgttccgtaaatcagaatagtattcgcaacctcgacactattggtgtggctgtggatttgatcctgctcttccgtgaactgagagtcgagcaggaatctctgcttacagctttccggtgcgggctgcagttcctcgggaatatcgcatctcgtaacgaagattcccagagcatcgtatgggtgcacgccttcccggagctgtttctatcttgtcttaaccacccagacaaaaagatcgtcgcctatagcagcatgattttgttcacttccctcaaccatgagaggatgaaagaactggaggaaaatctaaatatcgcaatagatgtgatcgacgcataccagaagcatccggaatccgaatggcctttcctgatcatcactgatttgttccttaaatctccggagttagtgcaagcgatgttccctaagcttaacaaccaggagagagttacactccttgacctgatgattgccaaaattacatctgacgagccactaacgaaagacgacatccctgtctttcttcggcacgcagagctgatcgctagtacatttgtcgaccagtgcaagaccgtcctcaagctcgctagcgaagagccacccgtgatgtacccttacatgcgtatcgtgggaaagtttagattgctcgatgtcctgtgcgagatgactgttaacacggaactgctgggctacctgcaagtgttccctgggcttcttgaaagggttattgaccttctgcgagtaatccacgtcgccggaaaggagaccaccaacatcttttcaaattgcggttgcgtccgtgccgaaggcgacatttctaacgtggccaatggttttaagtcccacctgataaggctgattgggaatctttgctacaagaataaagacaatcaggacaaggtgaatgagctcgatggcatcccacttattctggataactgtaatatcagcgattcgaacccctgctccgacccagtgggcgacatctgtcacccaaagccctaccgccggcagcagcccaagccacgatttgattgcaaagacggcggaaccggtgccgggaggtgtattccaacttag

SEQ ID NO: 175075 - DNA, 1428 bp, Artificial Sequence
  derived and/or modified sequence
atggccgccccccggcccccaccagcccggctgagcggcgtgatggtgcctgcccccatccaggacctggaggccctgcgggccctgacagccctcttcaaggagcagaggaaccgggagacagcccccaggaccatcttccagagggtgctggacatcctgaagaagagcagccatgctgtggagctggcctgccgggaccccagccaggtggagaacctggccagcagcctgcagctgatcacagagtgcttccgctgcctgagaaatgcctgcatcgagtgcagcgtgaaccagaacagcatccggaacctggacaccatcggcgtggccgtggacctgatcctgctcttccgggagctgcgggtggagcaggagagcctgctgacagccttccgctgtggcctgcagttcctgggcaacatcgccagcagaaatgaagacagccagagcatcgtgtgggtgcacgccttccctgagctgttcctgagctgcctgaaccacccagacaagaagatcgtggcctacagctccatgatcctcttcaccagcctgaaccacgagaggatgaaggagctggaggagaacctgaacatcgccattgatgtgattgatgcctaccagaagcaccctgagagcgagtggcccttcctgatcatcacagacctcttcctgaagagccctgagctggtgcaggccatgttccccaagctgaacaaccaggagcgggtgaccctgctggacctgatgattgccaagatcaccagtgatgagcccctgaccaaggatgacatccctgtgttcctgcggcatgctgagctgattgccagcacctttgtggaccagtgcaagacagtgctgaagctggccagcgaggagcccccagatgatgaggaggccctggccaccatccggctgctggatgtgctgtgtgagatgacagtgaacacagagctgctgggctacctgcaggtgtttcctggcctgctggagagggtcatcgacctgctgcgggtcatccacgtggccggcaaggagaccaccaacatcttcagcaactgtggctgtgtgcgggcagagggggacatcagcaatgtggccaacggcttcaagagccacctgatccgcctcatcggcaacctgtgctacaagaacaaggacaaccaggacaaggtgaatgagctggatggcatccccctcatcctggacaactgcaacatcagtgacagcaaccccttcctgacccagtgggtgatctatgccatccggaacctgacagaggacaacagccagaaccaggacctgattgccaagatggaggagcagggcctggctgatgccagcctgctgaagaaggtgggctttgaggtggagaagaagggggagaagctgatcctgaagagcacccgggacacccccaagccctag

SEQ ID NO: 175076 - DNA, 1362 bp, Artificial Sequence
  derived and/or modified sequence
atggccgccccccggcccccaccagcccggctgagcggcgtgatggtgcctgcccccatccaggacctggaggccctgcgggccctgacagccctcttcaaggagcagaggaaccgggagacagcccccaggaccatcttccagagggtgctggacatcctgaagaagagcagccatgctgtggagctggcctgccgggaccccagccaggtggagaacctggccagcagcctgcagctgatcacagagtgcttccgctgcctgagaaatgcctgcatcgagtgcagcgtgaaccagaacagcatccggaacctggacaccatcggcgtggccgtggacctgatcctgctcttccgggagctgcgggtggagcaggagagcctgctgacagccttccgctgtggcctgcagttcctgggcaacatcgccagcagaaatgaagacagccagagcatcgtgtgggtgcacgccttccctgagctgttcctgagctgcctgaaccacccagacaagaagatcgtggcctacagctccatgatcctcttcaccagcctgaaccacgagaggatgaaggagctggaggagaacctgaacatcgccattgatgtgattgatgcctaccagaagcaccctgagagcgagtggcccttcctgatcatcacagacctcttcctgaagagccctgagctggtgcaggccatgttccccaagctgaacaaccaggagcgggtgaccctgctggacctgatgattgccaagatcaccagtgatgagcccctgaccaaggatgacatccctgtgttcctgcggcatgctgagctgattgccagcacctttgtggaccagtgcaagacagtgctgaagctggccagcgaggagccccctgtgatgtacccctacatgagaattgtgggcaagttccggctgctggatgtgctgtgtgagatgacagtgaacacagagctgctgggctacctgcaggtgtttcctggcctgctggagcgggtgattgacctgctgcgggtcatccacgtggccggcaaggagaccaccaacatcttcagcaactgtggctgtgtgcgggcagagggggacatcagcaatgtggccaacggcttcaagagccacctgatccggctgattggcaacctgtgctacaagaacaaggacaaccaggacaaggtgaatgagctggatggcatccccctcatcctggacaactgcaacatcagtgacagcaacccctgcagcgaccctgtgggggacatctgccaccccaagccctaccgccggcagcagcccaagcccaggtttgactgcaaggatggcggcactggagctggccgctgcatccccacctag

SEQ ID NO: 175077 - DNA, 1428 bp, Artificial Sequence
  derived and/or modified sequence
atggccgccccccggcccccccccgcccggctgagcggcgtgatggtgccagctccaatccaggacctcgaggcactaagagctcttacggcacttttcaaagaacagagaaacagggagaccgcaccgaggaccatcttccaaagggtcctcgatatactgaaaaagagtagccacgccgtggagcttgcgtgtagggacccatcacaggtcgagaaccttgctagcagtctgcagttaataaccgagtgctttcgatgtctccgcaacgcctgtattgaatgcagcgtgaaccagaattccatccggaatctggatactattggagtagccgtggaccttatactcctgttccgagaactcagggtggagcaggagtcactgctcaccgcctttcgctgtggcctgcagtttctcggaaacattgcttctcggaatgaggattcacagtctattgtgtgggtccatgcctttcccgaactgttcctgtcctgtctgaatcaccccgacaaaaaaatcgtggcatatagcagcatgattctcttcacctccctcaaccacgagaggatgaaggagctcgaggagaacctcaatatcgccatcgatgtcattgatgcctatcaaaaacatcctgagtctgagtggcctttcctgatcattactgacctgttcctcaaatccccagagctggtccaagctatgttcccaaagcttaacaaccaagagagggtgactcttctggatttgatgatcgccaaaatcacgagcgatgagcccctgactaaggacgatattcctgtgtttcttagacacgcggaattaatagcctctacattcgtagaccagtgtaaaacggttctgaagctcgcctccgaggaacctcctgacgacgaggaagctctggctaccattagactcttggatgtgctgtgtgagatgacagtgaatactgaactgctcggttatctgcaggtgtttccgggcctgttagaaagagtgatcgatctgctgcgcgtaatccacgttgcggggaaagagacaaccaatattttttccaattgtggttgcgttcgtgccgagggcgacatcagcaatgtggctaacggctttaaatcacatcttattcgactgatcgggaacctctgttacaagaacaaagataatcaagataaagtcaatgaattggacggcatccctctgatactggataactgcaacattagcgactccaacccatttctcacacagtgggtcatctacgctatccggaacctcactgaagacaattcccagaaccaggatctgatcgctaaaatggaagagcagggcctggctgatgcttcgctccttaaaaaagtgggttttgaggtcgagaaaaagggtgaaaaactgattctcaagagcacacgagatactcctaaaccctag

SEQ ID NO: 175078 - DNA, 1362 bp, Artificial Sequence
  derived and/or modified sequence
atggccgccccccggcccccccccgcccggctgagcggcgtgatggtgcccgcgcctatccaagacctagaagctctccgggccctgacggctctgttcaaggaacaaaggaatcgcgaaactgccccccgaacaatattccagcgggtgttggatattcttaagaagtctagtcacgccgttgaactggcatgccgggacccctcccaagtcgagaacctggcgagtagtcttcagctgattactgaatgttttcgctgtcttcgcaatgcctgtatcgaatgttcagttaatcagaactctatccggaatctggatactataggggtggccgtggatctcatactgcttttcagagagttgcgtgtggagcaggaatcattgctgaccgcttttcgctgcggtttgcagttccttggcaacattgcaagtagaaacgaagactcacagagtattgtgtgggtccacgctttcccggagctgttcttatcttgcctgaatcacccggataagaaaatcgttgcgtactcaagtatgatccttttcaccagcctaaatcatgaacgcatgaaagagcttgaggaaaatctgaacatcgccatcgatgtgattgacgcatatcagaaacatccagagagtgaatggccattcctgatcatcacagatctgttcttgaaaagcccagagctagtgcaggctatgtttcctaagttaaacaatcaggagcgcgtgaccctcctggatctgatgattgcaaagatcacatctgacgaaccgctaactaaggacgatatccccgtcttcctgcgtcacgccgagcttattgctagcacctttgtggatcaatgtaagacagtcctcaaattggcgtctgaagagccgcctgtgatgtacccctatatgcgtatcgttggaaaatttcggctgcttgacgtcttatgcgagatgaccgtgaatacagaactgctcgggtatctgcaggtgttcccaggtctgctggagcgggtcatagatctgctgagagtaatacatgtggctgggaaggaaaccacaaacattttttcaaattgcggatgcgtgcgagctgaaggtgatatctctaatgtggcaaacggcttcaagagtcatctgattagactgattggcaatttgtgctacaaaaacaaagacaatcaggacaaagtgaatgagctggatggaatcccacttatcctggataactgtaacatctccgattccaacccgtgcagcgaccctgtcggagatatctgccaccctaaaccttacagacgccagcagcccaagcccaggttcgactgcaaggacggaggcaccggagctgggaggtgcattccaacctag

SEQ ID NO: 175079 - DNA, 1428 bp, Artificial Sequence
  derived and/or modified sequence
atggccgcaccgagacctcctcctgctaggctctccggagttatggtgcctgcaccaattcaggacctcgaggccttacgtgcccttacagctttgtttaaagaacaaagaaatcgggagaccgcccctagaaccatctttcagcgagttctggacatcctgaaaaagtccagccacgccgtcgagctggcttgtcgcgatccgtcccaggtggaaaacttggcatctagtctccagctgataacagagtgcttccgatgcctgagaaacgcttgcattgaatgcagtgttaatcaaaactccattcgcaacttagacaccattggcgtggctgtggatctgatactcctatttcgggagcttagagtggaacaggagagtcttctgacagcctttagatgtgggctgcaattcctcggcaacatcgcatcgagaaatgaagacagccagtctatcgtgtgggtccacgcatttcccgaactgttcttatcctgcctgaaccacccagataaaaaaatcgttgcctatagctctatgattctgtttacaagcctcaaccatgaacgcatgaaagagctggaggaaaatctcaacattgcaatcgacgtaatcgacgcctaccaaaaacaccccgaatcagagtggccgtttctgatcatcactgatttatttctgaagtcacctgagctcgtgcaagctatgttccctaaactgaataatcaggagcgggttacactgttggacctaatgatcgccaagatcacctcagacgaacctcttactaaagatgacatcccggtattcctccgacatgcggaactcattgcgtcaacgttcgtggaccagtgtaagaccgtattgaaattggcatccgaagaacctcccgatgacgaggaggctctcgctacgatacggttgctagacgttctgtgtgaaatgacagtgaatactgagctgttgggctacctccaggtgttccctggcctcctggagcgcgtcattgacctccttcgcgtgatacacgtggccggtaaagaaacaacaaacattttttcaaactgtggctgcgtgcgtgccgagggggatatttctaacgtggctaacggcttcaagtcccacctcataaggctgataggcaatctgtgctacaaaaacaaagacaatcaggacaaggtgaatgaactggatgggattccattaatactggacaattgcaatataagcgactctaacccttttctcacccagtgggtgatctatgcaatccgaaacctcaccgaggacaattcgcaaaatcaagatcttattgccaaaatggaggagcagggcctagctgatgcctcgctgctaaaaaaggtcgggtttgaagtggaaaagaagggcgaaaagctgattctgaagtccacacgggacacaccaaaaccttag

SEQ ID NO: 175080 - DNA, 1362 bp, Artificial Sequence
  derived and/or modified sequence
atggcggctccgaggccccctcccgctcgtctgagtggggtgatggtgccagcaccaatccaagatttagaagccctacgggctctgaccgcactgtttaaggagcagcgcaatcgcgagacagcccctaggaccatcttccagcgggtattagacatccttaagaagagttcgcatgctgttgagcttgcctgtagagatccatcgcaggtggagaaccttgcgtcatcgctgcagctcatcactgagtgctttcgttgtttgagaaatgcttgcatcgagtgcagcgtaaatcaaaattctattagaaacctggacaccatcggggtggccgtggatctgatcctcctcttccgggagttgagagtagagcaggaaagtctgctcactgcttttagatgtggcttgcaatttctgggcaacattgcgagtaggaatgaggattcccaatcaatagtgtgggtgcatgcatttcccgagctgttcctaagttgccttaaccatcccgataagaagatcgtggcatacagctctatgatcctgttcacctcactgaatcacgaacgtatgaaagaactggaagaaaacctgaatatcgccattgacgtgattgacgcttaccagaaacatccagagagcgaatggccattccttattataacagacctcttccttaagtcaccagagttggttcaggcgatgtttccaaagttgaataatcaggagcgggtgaccctgttggacctcatgatcgccaagattacgtcagatgagcctttaacaaaggacgacataccagtcttcttgcggcacgcagaattaatcgcttccacgttcgtagatcaatgtaagactgtacttaagctcgcatccgaggagcctccggtgatgtatccctatatgcgaatcgtgggaaaattccgactgcttgatgtcctttgcgagatgaccgtgaacactgagctcttgggctatctacaggttttcccgggtctcctggagcgggtgatcgatctcttgagggtcatacatgtcgctggcaaggaaacgaccaatattttcagtaattgcggatgtgtgcgggctgaaggagatatttccaacgtggcaaatgggttcaagtcccacctgattagactcattgggaacttatgctacaagaataaggataatcaggacaaggttaacgagctcgatggaataccacttattctggataactgtaacattagtgattccaatccgtgtagcgatccagtgggcgatatctgtcaccctaaaccttatagacggcaacaaccaaaacctcggttcgactgtaaggatgggggaactggggcaggacgatgcattcccacctag

SEQ ID NO: 175081 - DNA, 3329 bp, Artificial Sequence
  derived and/or modified sequence
ggcgggacttccgccggcgccccctcccccgcggcgccgtctcctcctcccgcctgaggcgagtctgggctcagcctagagctctccggcggcggcgcagcttcagggcagcgcgggctgcagcggcggcggcggttagggctgtgtagggcgaggcctcccccttcctcctcgccatcctactcctccctcctcgtcatcctcccccttcgtcctcctcgccttcctcctcctcgtcaggctcgacccagctgtgagcggcaagatggcggcgcccaggccgccgcctgccaggctgtcgggcgtcatggtgccggcgcccatccaagacctggaggccctgcgcgcgctcacggcgctcttcaaagagcagcggaaccgagaaacagcacccaggactatcttccaaagagttctggatatcctaaagaaatcttctcatgctgttgagcttgcctgcagagatccatcccaagtggaaaacctggcttccagtctgcagttaataacagaatgcttcaggtgtcttcgcaatgcttgcatagagtgttctgtgaaccagaattcaatcaggaacttggatacgattggtgttgctgttgatttgattcttctgtttcgtgaactgcgagtggaacaggaatctctgttgacagcttttcgctgtggcctgcagtttttaggcaacattgcctcacggaatgaagattcccagtctattgtttgggtgcatgctttcccagaactgtttttgtcttgcttaaatcatccggacaaaaaaattgttgcctactcttcaatgattttgtttacatcccttaatcatgaaagaatgaaagaactggaggagaacctcaatattgcaattgatgtcatagatgcttaccaaaaacatcctgaatcagaatggccgttcttgattattacagacctctttctgaaaagcccggaattggtacaagccatgtttcccaaactgaacaatcaagaaagagttacactgttagaccttatgatagccaagataacgagtgatgagccactcaccaaggatgacatccctgtgtttttgcggcatgctgagttgattgcaagcacctttgtggatcagtgcaagactgtgctcaagctggcctctgaggagcctcctgatgatgaggaggcactggctacaattaggcttctcgacgtcctgtgcgaaatgactgtgaatactgagctgctcggctatctgcaggttttccctggcttgctggaaagagtgattgatcttttgcgggtgattcatgtagctggaaaagaaaccacaaacatcttcagtaattgtggttgcgtgagagcagaaggtgacatctccaatgtggccaatgggtttaagtctcatctcattcgtctgattggaaatctgtgttacaagaataaagataaccaagacaaggtaaatgagctggatggtatcccgttgatcctggacaactgcaacatcagtgacagtaacccctttctgacccagtgggtgatatatgccatccgaaaccttaccgaagacaacagccaaaaccaagatttgattgcaaagatggaggaacaggggctggcagatgcatccctacttaaaaaagtgggttttgaagttgaaaagaaaggcgaaaagctgatcctgaaatctactagagacacccctaagccatgaatgaactacatccaaatacctgaatttttggaatctgtttcatggatttttcatcttctaccgtatgtgaaattgcaagtgtttgaagatttataagtacaaatttgggaacatacaaatcttttaggtagtagagtttaacgtgtataagctaaaagtgaaagtaactgagtgttctcttgtttctttgcattaatgtaactgtgtggtttgcctttgtccccctggatagaacgtgcatttaaagaatatattgtacttactgtgacagcagataataaaccagtctcttggagggcacaacccttatttgacaaaacttggatgttggcttgactgtgtttgtcccttcagatggcaagtcagcatcattctttatattcctcttctcattgggttttctgaactctggcaggcggttgaagtagtttctcactgtgattaattctagcaatctcttttcacccctctgcctttccaaaacattgacaagactcatttccagttaattaattcgagaaccctccctcttcattttgggtactgggctgtcttgtcactgagccctatccctttggaatgtggcagggagtgaggttggtgagagaacatgtgggcacttaactcttcatgttccagttcatcccagaagtagacatcccaggacccattctgtgtcaaggtgaatgcctgtgtcctccccagcttcatgcctctgtcatgggggaaggaatagcttatgttctgctctggtgcagtgccgtagattaaaggtacatttctatcttctttgatttaaaaagcaccagtctcataaaggtgccactcagttttagccatgtcttcactgaaattgcaaaagtacttttagggagcaggagtttatttgacatctagttatctgtctgtctgttcatctatctatctgtctgctgtatgagaggtaggactggattaaatgaccactgaactcactgaatccagatcattcatatcatcaacaaaagctctagggggaggtcacgttgtgaatgcttaaaacatattattttcttcaacaaccatatcgctaaactaatatatccagagattttgcacaattcgtgttgaaccttccaaaacaaaaataaagacctgtccaaaagttttgacaaaaatactgattgctcccaaataaagtgcttctaagctttgtgtagacatagtttaactgatttgtaaaaatagcttaagcatgttgagaatgaagtaaaagttttcccatgtgctgtctaatgtactctgtgtaactctgaagacacatcagcttctaggattgcagcaatctatgaataacattttttctctcatttatgactttccatcagtaaagaagccattgcagaatttaaaattacacaaaggagtcattctctcctgggacataaagagttaaagctctgtcctctaaatagaagcctggccaaagggagaaaacagtgggagtcccttttcccttttaacaagtttgcaatagacacttctttttttcctgtctcaatggatgtgtgcacaccagtggaatcgcacaaacttgtcggtatgagctatataataacaaacacaaataaataaaagggagccttgtgagaataca

SEQ ID NO: 175082 - DNA, 1939 bp, Artificial Sequence
  derived and/or modified sequence
agagctctccggcggcggcgcagcttcagggcagcgcgggctgcagcggcggcggcggttagggctgtgtagggcgaggcctcccccttcctcctcgccatcctactcctccctcctcgtcatcctcccccttcgtcctcctcgccttcctcctcctcgtcaggctcgacccagctgtgagcggcaagatggcggcgcccaggccgccgcctgccaggctgtcgggcgtcatggtgccggcgcccatccaagacctggaggccctgcgcgcgctcacggcgctcttcaaagagcagcggaaccgagaaacagcacccaggactatcttccaaagagttctggatatcctaaagaaatcttctcatgctgttgagcttgcctgcagagatccatcccaagtggaaaacctggcttccagtctgcagttaataacagaatgcttcaggtgtcttcgcaatgcttgcatagagtgttctgtgaaccagaattcaatcaggaacttggatacgattggtgttgctgttgatttgattcttctgtttcgtgaactgcgagtggaacaggaatctctgttgacagcttttcgctgtggcctgcagtttttaggcaacattgcctcacggaatgaagattcccagtctattgtttgggtgcatgctttcccagaactgtttttgtcttgcttaaatcatccggacaaaaaaattgttgcctactcttcaatgattttgtttacatcccttaatcatgaaagaatgaaagaactggaggagaacctcaatattgcaattgatgtcatagatgcttaccaaaaacatcctgaatcagaatggccgttcttgattattacagacctctttctgaaaagcccggaattggtacaagccatgtttcccaaactgaacaatcaagaaagagttacactgttagaccttatgatagccaagataacgagtgatgagccactcaccaaggatgacatccctgtgtttttgcggcatgctgagttgattgcaagcacctttgtggatcagtgcaagactgtgctcaagctggcctctgaggagcctcctgtaatgtatccatatatgagaatagttggaaaatttaggcttctcgacgtcctgtgcgaaatgactgtgaatactgagctgctcggctatctgcaggttttccctggcttgctggaaagagttatagatcttttgcgggtgattcatgtagctggaaaagaaaccacaaacatcttcagtaattgtggttgcgtgagagcagaaggtgacatctccaatgtggccaatgggtttaagtctcatctcattcgtctgattggaaatctgtgttacaagaataaagataaccaagacaaggtaaatgagctggatggtatcccgttgatcctggacaactgcaacatcagtgacagtaacccctgttctgacccagtgggtgatatatgccatccgaaaccttaccgaagacaacagccaaaaccaagatttgattgcaaagatggaggaacaggggctggcagatgcatccctacttaaaaaagtgggttttgaagttgaaaagaaaggcgaaaagctgatcctgaaatctactagagacacccctaagccatgaatgaactacatccaaatacctgaatttttggaatctgtttcatggatttttcatcttctaccgtatgtgaaattgcaagtgtttgaagatttataagtacaaatttgggaacatacaaatcttttaggtagtagagtttaacgtgtataagctaaaagtgaaagtaactgagtgttctcttgtttctttgcattaatgtaactgtgtggtttgcctttgtccccctggatagaacgtgcatttaaagaatatattgtacttactgtgacagcagataataaaccagtctcttggagggcacaacccttatttg

SEQ ID NO: 175083 - DNA, 1428 bp, Artificial Sequence
  derived and/or modified sequence
atggccgcccccagacccccccccgccagactgagcggcgtgatggtgcccgcccccatccaggacctggaggccctgagagccctgaccgccctgttcaaggagcagagaaacagagagaccgcccccagaaccatcttccagagagtgctggacatcctgaagaagagcagccacgccgtggagctggcctgcagagaccccagccaggtggagaacctggccagcagcctgcagctgatcaccgagtgcttcagatgcctgagaaacgcctgcatcgagtgcagcgtgaaccagaacagcatcagaaacctggacaccatcggcgtggccgtggacctgatcctgctgttcagagagctgagagtggagcaggagagcctgctgaccgccttcagatgcggcctgcagttcctgggcaacatcgccagcagaaacgaggacagccagagcatcgtgtgggtgcacgccttccccgagctgttcctgagctgcctgaaccaccccgacaagaagatcgtggcctacagcagcatgatcctgttcaccagcctgaaccacgagagaatgaaggagctggaggagaacctgaacatcgccatcgacgtgatcgacgcctaccagaagcaccccgagagcgagtggcccttcctgatcatcaccgacctgttcctgaagagccccgagctggtgcaggccatgttccccaagctgaacaaccaggagagagtgaccctgctggacctgatgatcgccaagatcaccagcgacgagcccctgaccaaggacgacatccccgtgttcctgagacacgccgagctgatcgccagcaccttcgtggaccagtgcaagaccgtgctgaagctggccagcgaggagccccccgacgacgaggaggccctggccaccatcagactgctggacgtgctgtgcgagatgaccgtgaacaccgagctgctgggctacctgcaggtgttccccggcctgctggagagagtgatcgacctgctgagagtgatccacgtggccggcaaggagaccaccaacatcttcagcaactgcggctgcgtgagagccgagggcgacatcagcaacgtggccaacggcttcaagagccacctgatcagactgatcggcaacctgtgctacaagaacaaggacaaccaggacaaggtgaacgagctggacggcatccccctgatcctggacaactgcaacatcagcgacagcaaccccttcctgacccagtgggtgatctacgccatcagaaacctgaccgaggacaacagccagaaccaggacctgatcgccaagatggaggagcagggcctggccgacgccagcctgctgaagaaggtgggcttcgaggtggagaagaagggcgagaagctgatcctgaagagcaccagagacacccccaagccctag

SEQ ID NO: 175084 - DNA, 1362 bp, Artificial Sequence
  derived and/or modified sequence
atggccgcccccagacccccccccgccagactgagcggcgtgatggtgcccgcccccatccaggacctggaggccctgagagccctgaccgccctgttcaaggagcagagaaacagagagaccgcccccagaaccatcttccagagagtgctggacatcctgaagaagagcagccacgccgtggagctggcctgcagagaccccagccaggtggagaacctggccagcagcctgcagctgatcaccgagtgcttcagatgcctgagaaacgcctgcatcgagtgcagcgtgaaccagaacagcatcagaaacctggacaccatcggcgtggccgtggacctgatcctgctgttcagagagctgagagtggagcaggagagcctgctgaccgccttcagatgcggcctgcagttcctgggcaacatcgccagcagaaacgaggacagccagagcatcgtgtgggtgcacgccttccccgagctgttcctgagctgcctgaaccaccccgacaagaagatcgtggcctacagcagcatgatcctgttcaccagcctgaaccacgagagaatgaaggagctggaggagaacctgaacatcgccatcgacgtgatcgacgcctaccagaagcaccccgagagcgagtggcccttcctgatcatcaccgacctgttcctgaagagccccgagctggtgcaggccatgttccccaagctgaacaaccaggagagagtgaccctgctggacctgatgatcgccaagatcaccagcgacgagcccctgaccaaggacgacatccccgtgttcctgagacacgccgagctgatcgccagcaccttcgtggaccagtgcaagaccgtgctgaagctggccagcgaggagccccccgtgatgtacccctacatgagaatcgtgggcaagttcagactgctggacgtgctgtgcgagatgaccgtgaacaccgagctgctgggctacctgcaggtgttccccggcctgctggagagagtgatcgacctgctgagagtgatccacgtggccggcaaggagaccaccaacatcttcagcaactgcggctgcgtgagagccgagggcgacatcagcaacgtggccaacggcttcaagagccacctgatcagactgatcggcaacctgtgctacaagaacaaggacaaccaggacaaggtgaacgagctggacggcatccccctgatcctggacaactgcaacatcagcgacagcaacccctgcagcgaccccgtgggcgacatctgccaccccaagccctacagaagacagcagcccaagcccagattcgactgcaaggacggcggcaccggcgccggcagatgcatccccacctag

SEQ ID NO: 175085 - protein, 150 aa, Artificial Sequence
  derived and/or modified sequence
MAARGVIAPVGESLRYAEYLQPSAKRPDADVDQQRLVRSLIAVGLGVAALAFAGRYAFRIWKPLEQVITETAKKISTPSFSSYYKGGFEQKMSRREAGLILGVSPSAGKAKIRTAHRRVMILNHPDKGGSPYVAAKINEAKDLLETTTKH

SEQ ID NO: 175086 - DNA, 453 bp, Artificial Sequence
  derived and/or modified sequence
atggccgccagaggcgtgatcgcccccgtgggcgagagcctgagatacgccgagtacctgcagcccagcgccaagagacccgacgccgacgtggaccagcagagactggtgagaagcctgatcgccgtgggcctgggcgtggccgccctggccttcgccggcagatacgccttcagaatctggaagcccctggagcaggtgatcaccgagaccgccaagaagatcagcacccccagcttcagcagctactacaagggcggcttcgagcagaagatgagcagaagagaggccggcctgatcctgggcgtgagccccagcgccggcaaggccaagatcagaaccgcccacagaagagtgatgatcctgaaccaccccgacaagggcggcagcccctacgtggccgccaagatcaacgaggccaaggacctgctggagaccaccaccaagcactag

SEQ ID NO: 175087 - DNA, 2538 bp, Artificial Sequence
  derived and/or modified sequence
ggtcaggaaagctcaggcaagcccaccctcaggcactacagctagactccgagcttactgggcagtcatctgattcgaccaacatcagttcgcagggcttaagcccagtcccttacggcggcctggggagggaccaggcccaagtatataaagctccctgagggtccgcgttggctttgcgcctgtgagtgtgattcaagaacgtcccagtgcccttggctcctttcggagtgtgaccccgtgcttgcacgggacacgttacccagctcgggtgagaagggtatcttccgggaacctcgcctttaatagcacaacgagcgcagagtccactggatctgcgagaagaaaccgcgctaactagtttgtccctacggccgcctcgtagtcactgccgcggcgccttgagtctccgggccgccttgccatggctgcccgtggtgtcatcgctccagttggcgagagtttgcgctacgctgagtacttgcagccctcggccaaacggccagacgccgacgtcgaccagcagagactggtaagaagtttgatagctgtaggactgggtgttgcagctcttgcatttgcaggtcgctacgcatttcggatctggaaacctctagaacaagttatcacagaaactgcaaagaagatttcaactcctagcttttcatcctactataaaggaggatttgaacagaaaatgagtaggcgagaagctggtcttattttaggtgtaagcccatctgctggcaaggctaagattagaacagctcataggagagtcatgattttgaatcacccagataaaggtggatctccttacgtagcagccaaaataaatgaagcaaaagacttgctagaaacaaccaccaaacattgatgcttaaggaccacactgaaggaaaaaaaaagaggggacttcgaaaaaaaaaaaagccctgcaaaatattctaaaacatggtcttcttaattttctatatggattgaccacagtcttatcttccaccattaagctgtataacaataaaatgttaatagtcttgctttttattatcttttaaagatctccttaaattctataactgatcttttttcttattttgtttgtgacattcatacatttttaagatttttgttatgttctgaattcccccctacacacacacacacacacacacacacacacacgtgcaaaaaatatgatcaagaatgcaattgggatttgtgagcaatgagtagacctcttattgtttatatttgtaccctcattgtcaatttttttttagggaatttgggactctgcctatataaggtgttttaaatgtcttgagaacaagcactggctgatacctcttggagatatgatctgaaatgtaatggaatttattaaatggtgtttagtaaagtaggggttaaggacttgttaaagaaccccactatctctgagaccctatagccaaagcatgaggacttggagagctactaaaatgattcaggtttacaaaatgagccctgtgaggaaaggttgagagaagtctgaggagtttgtatttaattatagtcttccagtactgtatattcattcattactcattctacaaatatttattgaccccttttgatgtgcaaggcactatcgtgcgtcccctgagagttgcaagtatgaagcagtcatggatcatgaaccaaaggaacttatatgtagaggaaggataaatcacaaatagtgaatactgttagatacagatgatatattttaaaagttcaaaggaagaaaagaatgtgttaaacactgcatgagaggaggaataagtggcatagagctaggctttagaaaagaaaaatattccgataccatatgattggtgaggtaagtgttattctgagatgagaattagcagaaatagatatatcaatcggagtgattagagtgcagggtttctggaaagcaaggtttggacagagtggtcatcaaaggccagccctgtgacttacactgcattaaattaatttcttagaacatagtccctgatcattatcactttactattccaaaggtgagagaacagattcagatagagtgccagcattgtttcccagtattcctttacaaatcttgggttcattccaggtaaactgaactactgcattgtttctatcttaaaatactttttagatatcctagatgcatctttcaacttctaacattctgtagtttaggagttctcaaccttggcattattgacatgttaggccaaataattttttttgtgggaggtctcttgtgcgttttagatgattagcaataatccctgacctgttatctactaaagactagtcgtttctcatcagttgtgacaacaaaaatggttccagatattgccaaatgccctttagaggacagtaatcgcccccagttgagaaccatttcagtaaaactttaattactattttttcttttggtttataaaataatgatcctgaattaaattgatggaaccttgaagtcgataaaatatatttcttgctttaaagtcccca

SEQ ID NO: 175088 - DNA, 453 bp, Artificial Sequence
  derived and/or modified sequence
atggcagcccgcggggtcatagctcccgtgggtgagagtctgagatacgccgagtatttgcagccctctgccaagcggcctgacgccgacgtggaccagcagcggcttgtgagatctctgatcgccgttggcctcggagttgcggccctggcattcgctggacggtacgcttttcggatctggaagcctctggagcaggtaatcaccgagacggctaagaagatctccacaccgagcttctcctcatactataaaggtggattcgaacaaaagatgtcacggagagaggccgggctcattctgggcgtttcccctagcgccggaaaagccaagatccgcactgcccatagaagggtgatgatcctgaaccatcctgacaaaggcggaagcccttatgtggccgcaaaaattaacgaggcgaaggatctgttagaaactacaactaaacactag

SEQ ID NO: 175089 - DNA, 453 bp, Artificial Sequence
  derived and/or modified sequence
atggccgcccggggcgtgattgcccctgtgggggagagcctgcgctatgcagagtacctgcagcccagcgccaagaggccagatgctgatgtggaccagcagaggctggtgcgcagcctgattgctgtgggcctgggcgtggccgccctggcctttgctggccgctatgccttccgcatctggaagcccctggagcaggtgatcacagaaacagccaagaagatcagcacccccagcttcagcagctactacaagggcggctttgagcagaagatgagccggcgggaggccggcctcatcctgggcgtgagccccagcgctgggaaggccaagatcagaacagcccacagaagagtgatgatcctgaaccacccagacaagggcggcagcccctacgtggccgccaagatcaatgaggccaaggacctgctggagaccaccaccaagcactag

SEQ ID NO: 175090 - DNA, 453 bp, Artificial Sequence
  derived and/or modified sequence
atggccgcccggggcgtgatcgcccccgtgggcgagagcctgcggtacgcagagtaccttcagccaagtgcaaaacggccagacgccgacgttgaccaacaacgactggtaaggagcctgatcgctgtggggcttggtgtggcggctctggccttcgcaggaaggtatgcttttcgcatctggaagcctctggaacaggtgattacagagaccgccaaaaagatctctaccccttcgttttcctcttactacaaaggcggcttcgagcagaaaatgtctaggagagaagccggcctcatcctgggggtctctcccagtgctgggaaggccaaaatcagaaccgcacacaggagagtaatgatcctgaaccaccctgacaaaggaggaagtccttatgtggcagccaagatcaatgaggcaaaagaccttctcgaaactactactaagcattag

SEQ ID NO: 175091 - DNA, 453 bp, Artificial Sequence
  derived and/or modified sequence
atggcggcaaggggcgtaatcgccccagtgggggaaagtctgcgatacgctgagtatcttcaaccttccgctaagcgcccagacgcagacgtcgaccagcagaggctggttcgctcgctcattgcagttggtctgggcgtggcagccttagcctttgccggacggtacgcctttcggatttggaagcctctggagcaagttatcacggaaactgccaaaaagattagtacgccaagctttagcagttactacaaaggcggatttgaacaaaaaatgtcgcgacgcgaagctggactgatcctgggtgtctctccatctgcagggaaggcaaaaattagaactgctcacagacgggtgatgatccttaaccaccctgataaagggggatctccttatgtcgccgctaagatcaacgaagccaaagacctgcttgagactacgacaaagcattag

SEQ ID NO: 175092 - DNA, 1728 bp, Artificial Sequence
  derived and/or modified sequence
atgccacctgggaaggtgctacagcccgtgctcaagatgaaagtagacgagctgttcctttactggctgtcagaggcgagcactcagcgtatgctgcaggactgtctgagacgaataaaggctcccggaagggaccaacctactcctggtgacggggagcagcctggtgcctggccaacagctccgctggcggcaccccggccctccggactagagcctccaggcacacctggcccgggtcccgccttacccctcggggcggccagcagccctcggaatgccccccatgtgagaggcacccggaggagcgcaggcaccagagtggtgcagaccagaaaggaggaaccactacctccagcaaccagccaaagcattcctacattctattttccacgaggccgaccacaggattcagtgaacgtcgatgctgtgatatctaagattgagtctacttttgcgagatttccacacgaaagagctactatggacgacatgggactggtggccaaggcctgtggatgcccactgtactggaagggcccactcttctacggagccgggggagaaaggacaggctcagtttccgttcataagttcgtggcgatgtggcggaagatcctacaaaattgccacgatgatgccgccaaatttgtgcacctgttgatgagcccaggctgtaactatctggtgcaggaggatttcgttccattcctgcaagacgtcgtcaacactcaccctgggctgtcatttctaaaagaagcaagtgaatttcattctcggtacattaccaccgtgatccagaggatattttacgcggtgaacaggagttggagtggaaggatcacctgtgccgaactgcggagatccagtttcctgcagaacgtcgcccttctagaggaggaagcggacatcaaccagttgacagagttctttagttacgagcatttttacgtcatctattgcaagttttgggaattagacacagaccatgatctgttgatcgatgcagatgacctggccagacataatgatcacgccctgtctaccaagatgatcgatagaatcttctccggcgccgtaaccagggggcgcaaggtacaaaaagaagggaaaatcagctacgccgactttgtgtggttcctcatctcagaggaggataagaaaaccccgactagtatcgagtattggttccgctgtatggacttggacggagatggcgcgttgtcgatgttcgagctcgagtatttctacgaagagcagtgccgcaggctggacagcatggctatcgaggctctgccgttccaagactgcctgtgtcaaatgctggatctcgtgaaaccacggaccgaagggaaaatcacccttcaggatcttaaaaggtgtaagctcgcaaacgtgttcttcgatacgttcttcaatatcgaaaagtatctcgatcacgaacagaaagagcaaatctcgctactgcgggacggagactccggcgggcccgaactgtcagactgggagaagtatgccgctgaggagtatgatatacttgtcgccgaggaaactgctggtgagccgtgggaggatgggttcgaggccgaactgtcaccggtagaacagaagttgtctgccttgaggtcccccttggcccaacgccccttttttgaagcccctagtcccctcggggccgtagacctctacgagtacgcctgtggcgacgaagatttagaaccactctag

SEQ ID NO: 175093 - DNA, 1728 bp, Artificial Sequence
  derived and/or modified sequence
atgcctcctgggaaggtgctgcagcctgtgctgaagatgaaggtggatgagctgttcctgtactggctgtctgaggccagcacccagaggatgctgcaggactgcctgcggcgcatcaaggcccctggccgggaccagcccaccccaggagatggagagcagcccggggcctggcccacagcccccctggccgccccccggcccagcggcctggagcccccaggcaccccaggccctggccctgccctgcccctgggcgccgccagcagccccagaaatgccccccacgtgcggggcaccaggagatctgctggcaccagggtggtgcagaccaggaaggaggagcccctgcccccagccaccagccagagcatccccaccttctacttcccccggggccggccccaggacagcgtgaatgtggatgctgtgatcagcaagattgagagcacctttgcccgcttcccccatgagcgggccaccatggatgacatgggcctggtggccaaggcctgtggctgccccctgtactggaagggccccctcttctacggggccggcggggagaggactggatctgtgtctgtgcacaagtttgtggccatgtggaggaagatcctgcagaactgccatgatgatgctgccaagtttgtgcacctgctgatgagccctggctgcaactacctggtgcaggaggactttgtgcccttcctgcaggatgtggtgaacacccaccctggcctgtccttcctgaaggaggccagcgagttccacagccgctacatcaccaccgtcatccagaggatcttctatgctgtgaacagatcctggagcggccgcatcacctgtgccgagctgcggcgcagcagcttcctgcagaatgtggccctgctggaggaggaggccgacatcaaccagctgacagagttcttctcctatgagcacttctacgtgatctactgcaagttctgggagctggacacagaccatgacctgctgattgatgctgatgacctggcccggcacaatgaccacgccctgagcaccaagatgattgaccgcatcttctctggagctgtgacccggggcaggaaggtgcagaaggagggcaagatctcctatgctgactttgtgtggttcctgatcagcgaggaggacaagaagacccccaccagcattgagtactggttccgctgcatggacctggatggagatggagccctgtccatgtttgagctggagtacttctatgaggagcagtgccggcggctggacagcatggccatcgaggccctgcccttccaggactgcctgtgccagatgctggacctggtgaagcccaggacagagggcaagatcaccctgcaggacctgaagcgctgcaagctggccaacgtgttctttgacaccttcttcaacatcgagaagtacctggaccacgagcagaaggagcagatcagcctgctgagagatggagacagcggcggccctgagctgagtgactgggagaagtatgctgctgaggagtatgacatcctggtggccgaggagacagctggggagccctgggaggatggctttgaagctgagctgagccctgtggagcagaagctgagcgccctgcggagccccctggcccagaggcccttctttgaggcccccagccccctgggcgctgtggacctgtatgaatatgcctgtggagatgaggacctggagcccctgtag

SEQ ID NO: 175094 - DNA, 1728 bp, Artificial Sequence
  derived and/or modified sequence
atgccccccggcaaggtgctgcagcccgtgctgaagatgaaggtggacgaacttttcctgtactggctctctgaggccagcactcaacggatgctgcaggattgtctgcgacggataaaagcgcctggcagggaccagcctacaccgggagacggagaacagcccggtgcctggccaaccgcgcccctagcggccccccgaccatcaggtttggagcctccgggaacccctgggcccggccccgcgctgccgctgggcgcagcaagtagtcccaggaatgccccccatgtaagggggacccggaggtcagccggcacgagagtcgtgcagacaaggaaggaggaaccacttccacccgctaccagtcagtctattccaaccttctacttccctcgcggcaggcctcaggattcagtgaacgtggatgcagtaatctcgaagatcgagtccacttttgcccggttcccccacgagagagccacaatggacgatatgggacttgtcgcaaaagcctgcggttgtcccctgtactggaaaggacctctcttttacggggcagggggagaaagaaccggcagtgtatcagtgcacaagttcgtggccatgtggcgcaagattttgcagaactgccatgacgacgccgcaaagttcgttcacctgctcatgtcgcccggatgtaattacttagtgcaggaggacttcgttcctttccttcaggacgtcgtgaacactcacccagggctatcattcctgaaggaagcatctgaatttcactccaggtatatcactacggttatccagaggatcttttatgcagtgaatcggtcttggtcagggcggataacctgcgcagagctaaggaggagcagctttctgcaaaacgtggcactgttggaagaggaagcagatattaaccaactcactgagttcttctcgtatgaacatttctatgtgatttactgcaagttttgggaattggacactgaccacgacttgctaattgacgccgacgacctcgccagacataacgaccacgctttaagcactaaaatgatcgacagaatcttctctggtgcggtgactcggggccggaaagttcagaaggaaggcaaaataagctacgctgactttgtctggtttctgatttctgaggaggacaagaaaacccccaccagcatcgagtactggttcaggtgcatggatctggacggcgacggagctctgtcaatgttcgaactagagtatttttatgaggaacaatgtcgtcgtctcgattctatggcgattgaagccctgcccttccaagactgtctctgtcaaatgctcgatctggtgaaacctagaactgaaggcaagattacgctccaagacctgaagaggtgtaaactcgccaatgtgttttttgacacttttttcaacattgaaaaatatctagatcacgaacaaaaagagcaaatctccctgctgagggacggcgactccggggggccggaactgtctgattgggaaaagtacgccgccgaggagtatgacattctagtcgccgaagagaccgccggggagccttgggaggatggattcgaagctgaattaagcccagtggaacaaaaactgtccgccctgaggtctcctcttgcccaacgccccttttttgaagcgccgtcgccgctgggtgcagtggacttgtatgagtatgcgtgtggagacgaagacctggaaccgctgtag

SEQ ID NO: 175095 - DNA, 1728 bp, Artificial Sequence
  derived and/or modified sequence
atgccccctggaaaggtactccagccagtgctgaagatgaaggtcgacgaactgtttttgtactggctctccgaagcctccactcagaggatgctccaggattgtctgcgacgaatcaaagctcccggtagagaccagcccaccccaggcgacggcgagcagccaggagcctggcccacggccccactggctgctcccagacccagcgggttggagccacctggaaccccaggaccaggtccggcactgcctctgggggcagcatcatctcccagaaatgccccacacgtcaggggcacgcgcagatcagccggaactcgcgtggtccagactagaaaggaagaaccgttgcctcctgccacaagccagagcatcccgactttttatttccctcgagggaggcctcaggattctgttaacgtggacgctgtgattagcaaaatcgaatccacttttgcaaggttcccacacgagagagccacaatggatgatatgggcttagttgccaaggcatgcgggtgtcccctgtactggaaaggacctcttttctacggcgcagggggagagaggacagggagcgtctcagtgcataagttcgtcgcaatgtggcgcaaaattctgcagaattgtcatgacgatgctgcaaagtttgttcaccttctcatgagcccaggctgtaactacctggttcaggaggacttcgtccctttcttgcaagacgtcgtcaatacgcaccctggcctgagctttctcaaagaagcctccgaatttcactcccgttatatcactacggtcattcagcgaatcttctatgctgtcaaccgttcttggagtgggcgtatcacatgtgctgagctccggaggagctctttccttcaaaatgtggctctcttggaagaggaggcggacataaaccaactgaccgaatttttctcctacgaacatttttatgtcatctattgcaaattttgggagctagataccgaccacgatctgctgatcgacgctgacgatctggcaaggcacaatgatcacgccctctcgactaagatgatcgaccgcatttttagtggggctgtgacaaggggtagaaaagtccagaaggagggcaagatttcctacgcggatttcgtgtggttcctgatttccgaggaagataagaagacaccgacctccatcgagtattggttcagatgtatggacctggatggtgacggtgctttgagcatgttcgagctagaatatttctatgaagagcagtgtcggcgactggactctatggcgattgaagctctgccattccaggattgtctttgtcagatgctcgacctggtaaagccacgaacggagggaaaaatcaccctgcaggacctgaaacgctgcaaactggccaacgttttttttgacaccttcttcaacatcgagaagtacctggatcacgaacagaaagagcaaatcagcttactacgagatggagatagcggcggtccagagttgtccgattgggagaaatacgctgctgaagaatacgacatcttggtggcagaggagaccgctggagagccctgggaagatggcttcgaggccgaattatccccagtggaacagaagctctccgccctacggtcccccttagctcagaggccgtttttcgaagccccttctccactgggagccgtcgacttatacgagtacgcttgcggcgatgaggacctggaacccctgtag

SEQ ID NO: 175096 - DNA, 1728 bp, Artificial Sequence
  derived and/or modified sequence
atgccccccggcaaggtgctgcagcccgtgctgaagatgaaggtggacgagctgttcctgtactggctgagcgaggccagcacccagagaatgctgcaggactgcctgagaagaatcaaggcccccggcagagaccagcccacccccggcgacggcgagcagcccggcgcctggcccaccgcccccctggccgcccccagacccagcggcctggagccccccggcacccccggccccggccccgccctgcccctgggcgccgccagcagccccagaaacgccccccacgtgagaggcaccagaagaagcgccggcaccagagtggtgcagaccagaaaggaggagcccctgccccccgccaccagccagagcatccccaccttctacttccccagaggcagaccccaggacagcgtgaacgtggacgccgtgatcagcaagatcgagagcaccttcgccagattcccccacgagagagccaccatggacgacatgggcctggtggccaaggcctgcggctgccccctgtactggaagggccccctgttctacggcgccggcggcgagagaaccggcagcgtgagcgtgcacaagttcgtggccatgtggagaaagatcctgcagaactgccacgacgacgccgccaagttcgtgcacctgctgatgagccccggctgcaactacctggtgcaggaggacttcgtgcccttcctgcaggacgtggtgaacacccaccccggcctgagcttcctgaaggaggccagcgagttccacagcagatacatcaccaccgtgatccagagaatcttctacgccgtgaacagaagctggagcggcagaatcacctgcgccgagctgagaagaagcagcttcctgcagaacgtggccctgctggaggaggaggccgacatcaaccagctgaccgagttcttcagctacgagcacttctacgtgatctactgcaagttctgggagctggacaccgaccacgacctgctgatcgacgccgacgacctggccagacacaacgaccacgccctgagcaccaagatgatcgacagaatcttcagcggcgccgtgaccagaggcagaaaggtgcagaaggagggcaagatcagctacgccgacttcgtgtggttcctgatcagcgaggaggacaagaagacccccaccagcatcgagtactggttcagatgcatggacctggacggcgacggcgccctgagcatgttcgagctggagtacttctacgaggagcagtgcagaagactggacagcatggccatcgaggccctgcccttccaggactgcctgtgccagatgctggacctggtgaagcccagaaccgagggcaagatcaccctgcaggacctgaagagatgcaagctggccaacgtgttcttcgacaccttcttcaacatcgagaagtacctggaccacgagcagaaggagcagatcagcctgctgagagacggcgacagcggcggccccgagctgagcgactgggagaagtacgccgccgaggagtacgacatcctggtggccgaggagaccgccggcgagccctgggaggacggcttcgaggccgagctgagccccgtggagcagaagctgagcgccctgagaagccccctggcccagagacccttcttcgaggcccccagccccctgggcgccgtggacctgtacgagtacgcctgcggcgacgaggacctggagcccctgtag

SEQ ID NO: 175097 - protein, 1164 aa, Artificial Sequence
  derived and/or modified sequence
MAGGEDRGDGEPVSVVTVRVQYLEDTDPFACANFPEPRRAPTCSLDGALPLGAQIPAVHRLLGAPLKLEDCALQVSPSGYYLDTELSLEEQREMLEGFYEEISKGRKPTLILRTQLSVRVNAILEKLYSSSGPELRRSLFSLKQIFQEDKDLVPEFVHSEGLSCLIRVGAAADHNYQSYILRALGQLMLFVDGMLGVVAHSDTIQWLYTLCASLSRLVVKTALKLLLVFVEYSENNAPLFIRAVNSVASTTGAPPWANLVSILEEKNGADPELLVYTVTLINKTLAALPDQDSFYDVTDALEQQGMEALVQRHLGTAGTDVDLRTQLVLYENALKLEDGDIEEAPGAGGRRERRKPSSEEGKRSRRSLEGGGCPARAPEPGPTGPASPVGPTSSTGPALLTGPASSPVGPPSGLQASVNLFPTISVAPSADTSSERSIYKARFLENVAAAETEKQVALAQGRAETLAGAMPNEAGGHPDARQLWDSPETAPAARTPQSPAPCVLLRAQRSLAPEPKEPLIPASPKAEPIWELPTRAPRLSIGDLDFSDLGEDEDQDMLNVESVEAGKDIPAPSPPLPLLSGVPPPPPLPPPPPIKGPFPPPPPLPLAAPLPHSVPDSSALPTKRKTVKLFWRELKLAGGHGVSASRFGPCATLWASLDPVSVDTARLEHLFESRAKEVLPSKKAGEGRRTMTTVLDPKRSNAINIGLTTLPPVHVIKAALLNFDEFAVSKDGIEKLLTMMPTEEERQKIEEAQLANPDIPLGPAENFLMTLASIGGLAARLQLWAFKLDYDSMEREIAEPLFDLKVGMEQLVQNATFRCILATLLAVGNFLNGSQSSGFELSYLEKVSEVKDTVRRQSLLHHLCSLVLQTRPESSDLYSEIPALTRCAKVDFEQLTENLGQLERRSRAAEESLRSLAKHELAPALRARLTHFLDQCARRVAMLRIVHRRVCNRFHAFLLYLGYTPQAAREVRIMQFCHTLREFALEYRTCRERVLQQQQKQATYRERNKTRGRMITETEKFSGVAGEAPSNPSVPVAVSSGPGRGDADSHASMKSLLTSRPEDTTHNRRSRGMVQSSSPIMPTVGPSTASPEEPPGSSLPSDTSDEIMDLLVQSVTKSSPRALAARERKRSRGNRKSLRRTLKSGLGDDLVQALGLSKGPGLEV

SEQ ID NO: 175098 - DNA, 3990 bp, Artificial Sequence
  derived and/or modified sequence
cgggattcccattgggccctgtgagtggctagcggcggccccgcctccggcagtggttacctcctggcgcgcactcggggactaatcttggctccacccccttcctcggccccgcctccgtctggccccgcccctccagccgcgtccggtccggccgggcccgaaccgcggagctacagtgtgctttgagtagaagctgcactggggccgggactcggaggcgcgctgcgtgagccggccgcagagccatggcgggcggggaagaccgcggggacggagagccggtatcagtggtgaccgtgagggtgcagtacctggaagacaccgaccccttcgcatgtgccaactttccggagccgcgccgggcccccacctgcagcctggacggggcgctgcccttgggcgcgcagatacccgcggtgcaccgcctgctgggagcgccgctcaagttggaggattgtgctctgcaagtgtctccctccggatactacctggacaccgagctgtccctggaagagcagcgggagatgctggagggcttctatgaagagatcagcaaagggcggaagcccacgctgatccttcggacccagctctctgtgagggtcaacgctatcttggaaaagctgtatagctccagtggtcctgagctccgccgctccctcttctcactgaagcagatcttccaggaggacaaagacctggtgcctgaatttgtgcattcagaggggctgagctgcctgatccgtgtgggtgctgctgccgaccacaactaccagagctacatccttagagcgctcggccagctgatgctctttgtggatggaatgctgggggtggtggcccacagtgacactattcagtggctgtacacattgtgtgccagcctgtcccgcttggtggtgaagacagccctgaagctgctgttggtgtttgtagaatactccgaaaacaacgcaccgctgttcatccgtgcagtgaactctgtggccagcaccaccggtgctcctccctgggccaatctggtgtccatcctggaggagaagaatggcgctgaccctgagttgttggtgtacacggtcaccctcatcaacaagacgctggcggcgctcccggaccaggactccttctacgatgtgacggatgcactggagcagcagggcatggaagcgctggtccagcgccacctgggcactgcgggcactgacgtcgacctgcgcacgcagcttgtgctctacgagaacgccctgaaattggaggatggagacatcgaagaagccccaggcgctggtgggcggcgggaacgacgaaagccttcttctgaggagggcaagaggagccgccgttctctggaaggcgggggctgccccgcgcgtgccccggaacctggccccacaggccccgcctcaccggtaggccccacctcttccaccggccccgccctgctgacaggccccgcctccagccctgtgggccctccctccggtctccaagcttcagtgaacctttttcctaccatctctgtggcaccctcagctgacacctccagcgagaggagcatctacaaagcccggttcctggagaatgtggcggcagcagaaacagagaagcaggttgcgctggcccagggccgggcagagacacttgccggggccatgcccaatgaggcgggtggacacccagatgcccggcaactctgggactccccagagacagcccctgcagccagaacaccccagagccctgccccctgtgtcctgctccgggcccagcgaagccttgcaccagagcccaaggagccactgataccagcaagccccaaggctgagcccatctgggagctccctacccgtgcacccaggctctctattggggacctggacttttcagatctaggggaggatgaagaccaggacatgctgaatgtagagtctgtggaggctgggaaagacatcccagctccctcacccccactgcccctgctctcgggagtacccccccctcccccacttccacctcccccacccatcaaaggccccttcccaccacctccacctctacctctggctgcccctcttccccattcagtgcctgacagctcagccctccccactaagaggaagacagtaaaacttttctggcgtgagctgaagctggctgggggccatggagtctctgcaagccgctttgggccctgcgccaccctctgggcttcactggaccctgtctcagtggacacggcccgactggaacacctctttgagtctcgtgccaaagaggtgctgccctccaagaaagctggagagggccgccggacaatgaccacagtgctggaccccaagcgcagcaacgccatcaacatcggcctaaccacactgccacctgtgcatgtcattaaggctgctctgctcaactttgatgagtttgctgtcagcaaggatggcattgagaagctactgaccatgatgcccacggaggaagagcggcagaagattgaggaagcccagctggccaaccctgacatacccctgggcccagccgagaacttcctgatgactcttgcctccattggcggcctcgctgctcgtctacaactctgggccttcaagctggactatgacagcatggagcgggaaattgctgagccactgtttgacctgaaagtgggtatggaacagctggtacagaatgccaccttccgctgcatcctggctaccctcctagcggtgggcaacttcctcaatggctcccagagcagcggctttgagctgagctacctggagaaggtgtcagaggtgaaggacacggtgcgtcgacagtcactgctacaccatctctgctccctagtgctccagacccggcctgagtcctctgacctctattcagaaatccctgccctgacccgctgtgccaaggtggactttgaacagctgactgagaacctggggcagctggagcgccggagccgggcagccgaggagagcctgcggagcttggccaagcatgagctggccccagccctgcgtgcccgcctcacccacttcctggaccagtgtgcccgccgtgttgccatgctaaggatagtgcaccgccgtgtctgcaataggttccatgccttcctgctctacctgggctacaccccgcaggcggcccgtgaagtgcgcatcatgcagttctgccacacgctgcgggaatttgcgcttgagtatcggacttgccgggaacgagtgctacagcagcagcagaagcaggccacataccgtgagcgcaacaagacccggggacgcatgatcaccgagacagagaagttctcaggtgtggctggggaagcccccagcaacccctctgtcccagtagcagtgagcagcgggccaggccggggagatgctgacagtcatgctagtatgaagagtctgctgaccagcaggcctgaggacaccacacacaatcgccgcagcagaggcatggtccagagcagctccccaatcatgcccacagtggggccctccactgcatccccagaagaacccccaggctccagtttacccagtgatacatcagatgagatcatggaccttctggtgcagtcagtgaccaagagcagtcctcgtgccttagctgctagggaacgcaagcgttcccgcggcaaccgcaagtctttgagaaggacgttgaagagtgggctcggagatgacctggtgcaggcactgggactaagcaagggtcctggcctggaggtgtgaaggtgctgtatcccggaaatctatctggaccctggactgcagtgcaggagatgacagagtgaggagggcccagagcagaattctggccccagaactctgtgcccaggagccatgccttgagcagtattagccgtgtgtgtatgcatgtgagtgtgtgtgtatgtgtgtgtgtgcatgcatatgcatgtgcatgtgtgtgagctccttgaacgcacggagcaaaataaaattttcttagctaatccaa

SEQ ID NO: 175099 - DNA, 3495 bp, Artificial Sequence
  derived and/or modified sequence
atggcgggcggtgaagatagaggggatggcgaaccagttagcgtggtaaccgtcagagtacagtaccttgaagacactgacccatttgcctgcgccaatttccctgagcctcggcgagcaccaacttgttctttagacggggccctcccacttggcgcacaaatcccagccgttcacagattgctcggggcccccctgaagttagaggattgcgctctgcaggtttcaccctccggatactatctagacaccgaactctcacttgaggagcagcgcgaaatgctggaaggcttctacgaggaaatctctaaaggccggaaacctacccttatcctgagaacacagttgagtgttagagtgaacgcgatcctggagaagctgtattctagcagtggtcccgaactgaggcgctccctgttttcactgaagcagatctttcaggaggataaggaccttgttccagaattcgtgcattctgaggggttgagttgcctcattcgtgttggggctgccgccgaccataactaccagagctacatattgagagcactagggcaactgatgctgtttgtggatggaatgctaggagtcgtggcacattctgataccatccagtggctctatacactttgtgccagcctttctagactggtagtgaagacggctctcaagctgctactagtgtttgtggagtattctgaaaataatgcaccgctgttcataagagcagtcaattcagtggcgagcaccacaggcgccccaccttgggccaaccttgtcagtattctagaggaaaaaaacggggctgatcctgagctgctcgtatacacagttactctcatcaacaagacgttagcggccctccctgaccaggatagcttttatgatgtcaccgatgcactggagcaacagggaatggaggctctcgttcaacgacatctgggcacggcagggaccgatgtggaccttaggacccagcttgttctgtacgaaaacgctctgaaactcgaggatggcgacatagaggaggcacctggcgccggaggtaggcgcgaacgccggaagccaagctccgaagaaggaaagcgctctaggcgctctctggagggaggaggttgtccggccagagccccggagcctggacccacgggccctgccagccccgttgggcctactagtagtactggcccagcacttctgacgggaccagcttcttccccggtgggaccccctagcggcctgcaagcatctgtcaacctgtttccaactatctcggtggccccttcagcggacacctcttcagaacgatcaatctataaagcccggtttctcgagaacgtcgctgcagcggagacagagaaacaggtagcactcgctcaagggcgggcagaaacactggcgggtgccatgccaaatgaggccggcgggcaccccgacgcccgccagctgtgggactctccagagaccgcgccagccgcaagaaccccccaatcacctgccccatgtgtgctgctgcgagcccagcgaagcctggccccggagccgaaggagcccttaatcccagcgagtcctaaagctgagcccatctgggaactccccaccagagcccctagactctccataggggacctggacttctccgaccttggcgaggatgaggatcaggatatgttgaatgtcgaaagcgtcgaggccggaaaagacatcccagctccctcacctcccctgccattgctgagcggcgtgcctcccccacctcctctgcctccaccacccccaatcaaagggccgtttccgcctccacctcctctacccttggcagccccactccctcattcagttcccgactcaagcgccctgcctaccaaacggaagactgttaagcttttctggcgcgaactgaagctggcaggcgggcacggggtgtccgcttcccgcttcgggccgtgcgccactttgtgggcctctctcgaccccgtgagtgtcgataccgctcgcctcgaacatctgtttgaatcccgggctaaggaagtactgccgagcaaaaaggcaggcgaggggagaaggaccatgactactgtgttagaccctaaacgatctaacgccatcaatatcggtctgaccactcttccacctgtgcacgtcatcaaagccgccctgctgaatttcgacgaatttgccgtgtctaaggacggtatcgagaagttgctgaccatgatgccaacagaagaggagcggcagaagatcgaggaggcccaattagctaatccggatatccccctgggaccggcagaaaacttcctgatgacccttgccagtattggagggctggccgctaggctccagctgtgggcgttcaagctcgattatgactccatggagcgggagatagctgagccattgttcgacctcaaggtgggcatggagcagctggtgcagaacgcgaccttccgttgcatcctcgctactttgctcgctgtgggcaacttcctgaacgggagtcagtcatcaggattcgaacttagctatctagagaaagtgtctgaggtcaaagataccgtacggaggcagagcctgctgcatcacctctgctccctcgtcctccagactaggccggaaagcagcgacctgtattcggagatccccgccctgacaaggtgtgccaaggtggattttgaacaactcacagagaatctgggacagctggagcgccgcagtcgcgctgccgaagagagtctcagatcactggcaaagcacgagctggcacccgctctgagggccaggctgacccactttctggaccagtgcgccagaagagtggcaatgctccgcatcgtccaccgaagggtctgtaaccgctttcatgcttttcttctgtatctgggatacacccctcaggctgcgagagaggtaaggattatgcagttctgtcataccctgagggagtttgcattggagtataggacctgcagggagcgtgtgttgcagcagcaacagaagcaggccacttatcgggagcgaaataagacaaggggaaggatgatcacagagacggaaaaatttagtggggtggctggagaggcaccctcaaatcctagcgtccccgtggctgtttcatcgggccctggacgcggcgatgcagactctcacgccagtatgaagtctttgctcaccagtcgaccagaagacacaactcataacagacgaagccgggggatggtgcagtcctcaagcccaattatgccaaccgtgggacctagcaccgcaagcccagaggaacctcctgggagctccctgccctctgacacgtctgatgagattatggatttgttagtgcagtccgtgaccaagtcttccccacgggcgctcgcggcacgagaaaggaaacgttcacggggaaaccgcaagtccttgcgccgtaccctgaagtcaggacttggagacgatctcgtgcaggcactcggcctatccaaaggacccggcctggaagtttag

SEQ ID NO: 175100 - DNA, 3495 bp, Artificial Sequence
  derived and/or modified sequence
atggctggaggagaagatagaggagatggagagcctgtgtctgtggtgacagtgcgggtgcagtacctggaggacacagacccctttgcctgtgccaacttccctgagccccggcgggcccccacctgcagcctggatggagccctgcccctgggcgcccagatcccagctgtgcaccggctgctgggcgcccccctgaagctggaggactgtgccctgcaggtgagccccagcggctactacctggacacagagctgagcctggaggagcagcgggagatgctggagggcttctatgaggagatcagcaagggcaggaagcccaccctcatcctgcggacccagctgtctgtgcgggtgaatgccatcctggagaagctgtacagcagcagcggccctgagctgcggcgcagcctcttcagcctgaagcagatcttccaggaggacaaggacctggtgcctgagtttgtgcacagcgagggcctgagctgcctgatccgggtgggcgctgctgctgaccacaactaccagagctacatcctgcgggccctgggccagctgatgctgtttgtggatggcatgctgggcgtggtggcccacagcgacaccatccagtggctgtacaccctgtgtgccagcctgagccggctggtggtgaagacagccctgaagctgctgctggtgtttgtggagtacagcgagaacaatgcccccctcttcatccgggctgtgaacagcgtggccagcaccactggagccccaccctgggccaacctggtgtccatcctggaggagaagaatggagctgaccctgagctgctggtgtacacagtgaccctcatcaacaagaccctggccgccctgcctgaccaggacagcttctatgatgtgacagatgccctggagcagcagggcatggaggccctggtgcagaggcacctgggcacagctggaacagatgtggacctgcggacccagctggtgctgtatgaaaatgccctgaagctggaggatggagacatcgaggaggcccctggagctgggggccggcgggagaggaggaagcccagcagcgaggagggcaagaggagcagaagaagcctggagggcggcggctgcccagcccgggcccctgagcccggccccactggacctgccagccctgtgggccccaccagcagcactggacctgccctgctgactggacctgccagcagccctgtgggcccccccagcggcctgcaggcctctgtgaacctcttccccaccatctctgtggcccccagcgctgacaccagcagcgagaggagcatctacaaggcccgcttcctggagaatgtggccgctgctgagacagagaagcaggtggccctggcccagggccgggcagagaccctggccggggccatgcccaatgaggccggcggccacccagatgcccggcagctgtgggacagccctgagacagccccagctgcccggaccccccagagccctgccccctgtgtgctgctgcgggcccagaggagcctggcccctgagcccaaggagcccctcatcccagccagccccaaggccgagcccatctgggagctgcccacccgggccccccggctgagcattggagacctggacttcagtgacctgggagaagatgaggaccaggacatgctgaatgtggagagcgtggaggccggcaaggacatcccagcccccagcccccccctgcccctgctgagcggcgtgcccccacctccacccctgcccccacctccacccatcaagggccccttccccccacctccacccctgcccctggccgcccccctgccccacagcgtgcctgacagcagcgccctgcccaccaagaggaagacagtgaagctgttctggagggagctgaagctggccggcggccacggcgtgtctgccagcagatttggcccctgtgccaccctgtgggccagcctggaccctgtgtctgtggacacagcccggctggagcacctgtttgagagccgggccaaggaggtgctgcccagcaagaaggccggggagggccgccgcaccatgaccaccgtgctggaccccaagaggagcaatgccatcaacatcggcctgaccaccctgccccctgtgcacgtgatcaaggccgccctgctgaactttgatgaatttgctgtgtccaaggatggcatcgagaagctgctgaccatgatgcccacagaggaggagcggcagaagattgaggaggcccagctggccaacccagacatccccctgggccctgctgagaacttcctgatgaccctggccagcatcggcggcctggccgcccggctgcagctgtgggccttcaagctggactatgacagcatggagcgggagattgctgagcccctgtttgacctgaaggtgggcatggagcagctggtgcagaatgccaccttccgctgcatcctggccaccctgctggccgtgggcaacttcctgaatggcagccagagcagcggctttgagctgagctacctggagaaggtgtctgaggtgaaggacacagtgcggcggcagagcctgctgcaccacctgtgcagcctggtgctgcagaccaggcctgagagcagtgacctgtacagcgagatcccagccctgacccgctgtgccaaggtggactttgagcagctgacagagaacctgggccagctggagcggcgcagcagagctgctgaggagagcctgcggagcctggccaagcatgagctggccccagccctgcgggcccggctgacccacttcctggaccagtgtgcccggcgggtggccatgctgagaattgtgcaccggcgggtgtgcaaccgcttccacgccttcctgctgtacctgggctacaccccccaggccgcccgggaggtgcgcatcatgcagttctgccacaccctgcgggagtttgccctggagtaccgcacctgccgggagcgggtgctgcagcagcagcagaagcaggccacctaccgggagaggaacaagacccggggccgcatgatcacagaaacagagaagttcagcggcgtggccggggaggcccccagcaaccccagcgtgcctgtggccgtgagcagcggccctggaagaggagatgctgacagccacgcctccatgaagagcctgctgaccagcaggcctgaggacaccacccacaacagaagaagccggggcatggtgcagagcagcagccccatcatgcccaccgtgggccccagcacagccagccctgaggagcccccaggcagcagcctgcccagcgacaccagtgatgagatcatggacctgctggtgcagagcgtgaccaagagcagcccccgggccctggccgcccgggagaggaagaggagccggggcaacaggaagagcctgcggaggaccctgaagagcggcctgggagatgacctggtgcaggccctgggcctgagcaagggccctggcctggaggtgtag

SEQ ID NO: 175101 - DNA, 3495 bp, Artificial Sequence
  derived and/or modified sequence
atggccggcggcgaggaccggggcgacggcgagcccgtgagcgtggttaccgtgcgggtgcagtacctcgaggatactgacccctttgcctgcgcaaatttcccggaacctaggcgggcccccacatgtagcctcgatggagccctccctcttggcgcgcagattcccgcagtgcaccgcctcttgggcgccccactaaagttggaagattgtgcactgcaagtgtctccatccggctattacctggatactgagctgtcacttgaagagcaacgagagatgctggaggggttctatgaggagatatccaagggtcggaaacctacgctgatcctacgcacccaactgagtgttagggtgaatgctattttagaaaagctgtatagctcttccggcccggaattgcgcaggagcttattttcactgaaacagattttccaggaggataaagatctggtgcccgagtttgttcattcagagggtttgagctgtctcattagagtcggtgccgccgccgaccacaattaccagtcttacatactgcgtgctctgggtcagctcatgctctttgtggacggaatgctgggggtggtcgcgcactcggacacaatccaatggttatacaccttatgcgcatctctatcgcgcctggtggtgaagaccgccttaaaactgttgctcgtgttcgttgagtacagcgaaaataatgcccctctgtttatcagagctgtcaactcagtcgcatctactaccggagcgcctccctgggctaacctggtctccattctcgaggagaaaaacggtgccgaccccgagctgctggtctacacagttaccctcataaacaagaccctagccgccctacccgaccaggacagcttttacgatgtaacagacgccctggaacagcagggcatggaagctttagtccagaggcacctcggcacggccggtacagacgtggatctcaggacgcaacttgtgctgtacgagaacgccctgaaacttgaagacggtgacatagaagaggctcccggcgcgggcggaaggcgggaacgacgcaaaccgagttccgaagagggcaaaaggagcagacgctcactggaaggcggcgggtgcccagcgcgagcacctgagccagggcctacgggccctgcaagtccagtgggaccaacgagcagcactggccccgcattactgaccggccccgcatcttcgccagtgggacctccaagcgggctccaggcatcagtaaacctgttccctaccatttccgtcgctccatctgccgacacttccagcgagcggtctatctataaagctaggttcttagaaaacgtcgcagctgccgaaacagagaagcaggtggcactggctcaaggccgcgccgagactctggctggtgcaatgccaaacgaggccggcggacatcctgatgcaagacaactgtgggatagcccagaaaccgccccggccgctcgaaccccgcaatcccccgccccttgcgtcctattgcgcgctcagagaagtctggcaccagagccaaaagagccactgatccctgccagtcccaaggctgaacctatttgggagctgccaacaagagctcctaggctctcaatcggagatttagacttttccgacttgggcgaggacgaagaccaggacatgctgaatgtagagtctgttgaggctggcaaggatattccagccccctcccctcctctccctctcctctccggtgtcccaccacctccaccccttcctccaccacctcccatcaagggcccatttcctcccccaccaccgcttcctctggccgccccactgccgcactccgtaccagactccagcgccctccccacaaagcggaaaacagtaaaactgttttggagggaacttaagcttgcaggtggtcatggggtgtccgcatctcggttcggtccttgcgctactctctgggcctctttagaccctgtttccgtcgataccgccaggctcgaacacctgtttgaaagccgcgccaaagaggtcctccctagcaaaaaggcaggggagggtcggagaacgatgaccacagtgctcgatccaaaacgttcaaatgctattaatattggcctaaccactctgccaccggtccatgtgattaaggccgctcttctgaacttcgatgagttcgcagtgtccaaagacggaatcgaaaaactccttacaatgatgccaactgaggaggagcgtcagaagatagaggaggctcagctcgctaacccagatattccccttggaccagcagagaatttcctgatgacgctggcttcaatcgggggcctggcggctcgccttcagctgtgggcctttaagcttgattacgactcaatggagcgtgaaatcgctgagccgctttttgacctgaaggtaggtatggagcagcttgtgcaaaacgccacatttcgttgtatactagctacactcctcgcagtgggaaacttcttgaacggatcacagtcaagcgggtttgagctcagctacctagaaaaggtttctgaggtgaaggacacggtgcggagacagagtcttctgcaccacctttgctccttggtccttcagacacgacccgagtccagcgatctgtatagcgaaattccggctctgacaagatgtgccaaagtcgacttcgagcagctcacggagaatctcggacaattagagcgtagatctcgagctgcagaggagtccttgcggagcttggctaaacatgagttggcgcccgctctgcgcgccaggttaacgcactttttggaccaatgcgccaggcgcgttgccatgctccgcatcgttcaccgtcgcgtgtgtaataggttccacgcttttctgctgtacctagggtacacaccccaagccgcgagggaggtacggatcatgcagttctgtcacactctccgcgaatttgctttggagtatcggacatgtcgagagcgcgtccttcaacaacagcaaaagcaggccacctaccgcgagcgcaacaaaacccggggaagaatgattacagaaaccgagaagttctccggagttgcgggagaggcaccctcaaatccgtccgtgcctgtcgcagtatcctcaggccctggcaggggcgatgcagactcccacgcttctatgaaatcactcctgactagtaggccagaggataccacgcacaaccgcagaagccgaggaatggtgcagtcttcctccccgattatgcctacagtcggaccctcgaccgcttcgccagaggagccacctggatcttccttgccgtctgacaccagcgatgaaataatggatttgctagtccagtccgtaaccaagagttctcccagagccctggcagcaagagaacggaaacggagcaggggcaaccgcaagtcgctccgacgcacgctgaagtctgggctcggagacgacctggtgcaagcccttgggctgagcaaggggcccggattagaggtctag

SEQ ID NO: 175102 - DNA, 3495 bp, Artificial Sequence
  derived and/or modified sequence
atggccggtggggaggatcggggtgacggggagcccgtgtccgtcgtcaccgttcgggttcaatatctcgaggacacagaccccttcgcctgtgctaattttcccgaaccgagacgggctccgacctgttccttggatggggctctcccactgggggcacaaattccagctgttcataggttgcttggagcccctctcaaactcgaggattgcgccctgcaggtgtctccgtcaggatactatcttgacaccgaattgtccctagaagaacagcgagaaatgctggaggggttttatgaagagatttccaaggggcgaaagcctaccctgatcctgagaacacagttaagcgtgcgcgtgaatgccatccttgagaagctgtactcatctagcggaccggagctccggcgatctttgttcagtttgaagcagatctttcaagaggataaagatcttgtgccagagtttgtccactcagaggggctgtcctgcctgatccgggtcggggcagctgccgaccataactaccagtcttatatcttgcgggctctcgggcagctcatgctgtttgtcgacgggatgctcggagtagtcgctcacagcgacacaatccagtggttatatacactctgcgcatcactctccaggctggtggttaaaaccgcgctgaaacttctgttggtgtttgtggagtactctgagaacaacgcacccctgttcattagggctgtgaatagtgtggcttcaactacaggggcacccccttgggcaaacctggtcagcattttggaggagaaaaatggggctgacccagaactcctcgtctacactgtgacattgatcaacaagacattggccgctctgccggaccaagacagtttctatgatgttaccgacgctctggaacaacaaggcatggaggcccttgtgcaacggcaccttggcactgcaggtacagatgtggacctccggacccagctggttctctacgaaaatgcacttaagcttgaggacggggacatcgaagaggctccaggagcaggaggacgcagggagcggaggaaacctagtagcgaagagggcaaacgcagccgacgtagcctcgagggaggagggtgccctgcgagggcccctgagcctggccctaccggtcctgcttcccctgtgggccctacatcctctaccggccctgctcttctcacaggtcccgcatcctcccccgtgggccctccttcaggcctgcaggcttccgtaaacttgttccccacaatttccgttgccccttcggcggataccagcagcgagagaagtatttacaaagcacggttcctggagaatgtcgcggctgcagagactgagaaacaagtagcactggcccaaggaagagccgagacacttgcaggcgcaatgcccaacgaggcaggcggacatcccgacgcccgtcagttgtgggacagccctgaaaccgccccagctgccaggacacctcaaagtcccgcaccatgcgtcctcctccgggcacagcggagcctggcaccggaacctaaggagcctcttatcccagcaagcccgaaggccgagcctatatgggagttgccgactagagcacctcgtcttagtattggggatcttgacttttctgaccttggcgaggatgaggaccaggacatgctgaacgtcgaatccgtggaggctggaaaagatatacctgcgccatccccaccgttgccgttattgtccggtgtcccaccgcctcccccactgccaccgccaccccctataaagggtccttttcccccaccccctccactcccattagcggcaccactacctcattccgtaccagatagctcggcccttccaacaaaacgcaagactgtgaagctattctggagagagttgaagctggccggtggccatggagtgtccgcctcacggttcgggccatgcgcaactctgtgggcatcactggacccagtctcggtcgacacggctagactagaacatctgtttgagtctagggcaaaggaagtcttgccttctaagaaggccggagagggaagaagaacaatgactactgttcttgatcccaagaggtctaatgccatcaacataggcctgacaacattgccacctgttcacgtaatcaaggcagcactattgaatttcgatgagttcgccgtatcaaaagacggcatcgagaagctccttaccatgatgcctacagaagaggagagacagaaaatagaggaagcacaacttgctaatccagacattccgctgggcccagccgagaactttctgatgacgctcgcctccatagggggtctggccgcacgtttgcagctgtgggccttcaagttggactacgattcaatggagcgcgaaattgccgagcctctcttcgacttgaaagttggcatggaacagctggtgcagaatgccacctttcggtgcatcctggctaccttgctggcagtgggcaattttctgaatggttcccaatcatctgggtttgagctctcctacctggagaaagtatctgaagtgaaggatacagtccgcaggcagtcactgctacaccacctgtgctctttagtgctgcagacgcggccagagagctccgatctctatagcgaaatcccggctctgactcgatgtgctaaggtcgacttcgagcaacttaccgagaatctggggcagctggaaagacgctcaagagccgctgaggagtccctgcgctcgcttgccaagcacgaacttgcgccagccttgcgggctagactcacgcactttctggaccagtgcgctagacgggtcgccatgctccgtatcgtccaccgtagggtgtgtaaccgatttcatgcttttcttctctatctggggtataccccccaagccgcaagggaagtgagaatcatgcagttttgtcacaccctgcgggagtttgccctcgagtatcggacctgtcgagaacgggttcttcagcagcagcaaaagcaggcgacgtaccgggagcggaacaagactcgcggtagaatgattacggagaccgagaagtttagcggcgttgctggcgaggctcctagtaatccttctgtgcccgtggccgtttctagtggacccggaagaggtgacgcggactctcatgcaagcatgaagtctttgctgaccagccgcccagaagacaccacccacaaccgacgcagcagggggatggtgcaatcctcgtccccaattatgcccacggtcggccctagcaccgcctcaccggaagagccccctgggtccagcttgccctcagataccagtgatgaaataatggacctattagttcagtcagtcactaaatcctccccgagggcactggctgcaagagaacggaagcgatcccggggaaaccgcaagtcgctccgaagaaccttaaaatctggattaggcgacgatctggttcaggccctcggcctaagcaaaggcccaggactggaggtttag

SEQ ID NO: 175103 - DNA, 3495 bp, Artificial Sequence
  derived and/or modified sequence
atggccggcggcgaggacagaggcgacggcgagcccgtgagcgtggtgaccgtgagagtgcagtacctggaggacaccgaccccttcgcctgcgccaacttccccgagcccagaagagcccccacctgcagcctggacggcgccctgcccctgggcgcccagatccccgccgtgcacagactgctgggcgcccccctgaagctggaggactgcgccctgcaggtgagccccagcggctactacctggacaccgagctgagcctggaggagcagagagagatgctggagggcttctacgaggagatcagcaagggcagaaagcccaccctgatcctgagaacccagctgagcgtgagagtgaacgccatcctggagaagctgtacagcagcagcggccccgagctgagaagaagcctgttcagcctgaagcagatcttccaggaggacaaggacctggtgcccgagttcgtgcacagcgagggcctgagctgcctgatcagagtgggcgccgccgccgaccacaactaccagagctacatcctgagagccctgggccagctgatgctgttcgtggacggcatgctgggcgtggtggcccacagcgacaccatccagtggctgtacaccctgtgcgccagcctgagcagactggtggtgaagaccgccctgaagctgctgctggtgttcgtggagtacagcgagaacaacgcccccctgttcatcagagccgtgaacagcgtggccagcaccaccggcgcccccccctgggccaacctggtgagcatcctggaggagaagaacggcgccgaccccgagctgctggtgtacaccgtgaccctgatcaacaagaccctggccgccctgcccgaccaggacagcttctacgacgtgaccgacgccctggagcagcagggcatggaggccctggtgcagagacacctgggcaccgccggcaccgacgtggacctgagaacccagctggtgctgtacgagaacgccctgaagctggaggacggcgacatcgaggaggcccccggcgccggcggcagaagagagagaagaaagcccagcagcgaggagggcaagagaagcagaagaagcctggagggcggcggctgccccgccagagcccccgagcccggccccaccggccccgccagccccgtgggccccaccagcagcaccggccccgccctgctgaccggccccgccagcagccccgtgggcccccccagcggcctgcaggccagcgtgaacctgttccccaccatcagcgtggcccccagcgccgacaccagcagcgagagaagcatctacaaggccagattcctggagaacgtggccgccgccgagaccgagaagcaggtggccctggcccagggcagagccgagaccctggccggcgccatgcccaacgaggccggcggccaccccgacgccagacagctgtgggacagccccgagaccgcccccgccgccagaaccccccagagccccgccccctgcgtgctgctgagagcccagagaagcctggcccccgagcccaaggagcccctgatccccgccagccccaaggccgagcccatctgggagctgcccaccagagcccccagactgagcatcggcgacctggacttcagcgacctgggcgaggacgaggaccaggacatgctgaacgtggagagcgtggaggccggcaaggacatccccgcccccagcccccccctgcccctgctgagcggcgtgcccccccccccccccctgcccccccccccccccatcaagggccccttccccccccccccccccctgcccctggccgcccccctgccccacagcgtgcccgacagcagcgccctgcccaccaagagaaagaccgtgaagctgttctggagagagctgaagctggccggcggccacggcgtgagcgccagcagattcggcccctgcgccaccctgtgggccagcctggaccccgtgagcgtggacaccgccagactggagcacctgttcgagagcagagccaaggaggtgctgcccagcaagaaggccggcgagggcagaagaaccatgaccaccgtgctggaccccaagagaagcaacgccatcaacatcggcctgaccaccctgccccccgtgcacgtgatcaaggccgccctgctgaacttcgacgagttcgccgtgagcaaggacggcatcgagaagctgctgaccatgatgcccaccgaggaggagagacagaagatcgaggaggcccagctggccaaccccgacatccccctgggccccgccgagaacttcctgatgaccctggccagcatcggcggcctggccgccagactgcagctgtgggccttcaagctggactacgacagcatggagagagagatcgccgagcccctgttcgacctgaaggtgggcatggagcagctggtgcagaacgccaccttcagatgcatcctggccaccctgctggccgtgggcaacttcctgaacggcagccagagcagcggcttcgagctgagctacctggagaaggtgagcgaggtgaaggacaccgtgagaagacagagcctgctgcaccacctgtgcagcctggtgctgcagaccagacccgagagcagcgacctgtacagcgagatccccgccctgaccagatgcgccaaggtggacttcgagcagctgaccgagaacctgggccagctggagagaagaagcagagccgccgaggagagcctgagaagcctggccaagcacgagctggcccccgccctgagagccagactgacccacttcctggaccagtgcgccagaagagtggccatgctgagaatcgtgcacagaagagtgtgcaacagattccacgccttcctgctgtacctgggctacaccccccaggccgccagagaggtgagaatcatgcagttctgccacaccctgagagagttcgccctggagtacagaacctgcagagagagagtgctgcagcagcagcagaagcaggccacctacagagagagaaacaagaccagaggcagaatgatcaccgagaccgagaagttcagcggcgtggccggcgaggcccccagcaaccccagcgtgcccgtggccgtgagcagcggccccggcagaggcgacgccgacagccacgccagcatgaagagcctgctgaccagcagacccgaggacaccacccacaacagaagaagcagaggcatggtgcagagcagcagccccatcatgcccaccgtgggccccagcaccgccagccccgaggagccccccggcagcagcctgcccagcgacaccagcgacgagatcatggacctgctggtgcagagcgtgaccaagagcagccccagagccctggccgccagagagagaaagagaagcagaggcaacagaaagagcctgagaagaaccctgaagagcggcctgggcgacgacctggtgcaggccctgggcctgagcaagggccccggcctggaggtgtag

SEQ ID NO: 175104 - protein, 468 aa, Artificial Sequence
  derived and/or modified sequence
MGFLGTGTWILVLVLPIQAFPKPGGSQDKSLHNRELSAERPLNEQIAEAEEDKIKKTYPPENKPGQSNYSFVDNLNLLKAITEKEKIEKERQSIRSSPLDNKLNVEDVDSTKNRKLIDDYDSTKSGLDHKFQDDPDGLHQLDGTPLTAEDIVHKIAARIYEENDRAVFDKIVSKLLNLGLITESQAHTLEDEVAEVLQKLISKEANNYEEDPNKPTSWTENQAGKIPEKVTPMAAIQDGLAKGENDETVSNTLTLTNGLERRTKTYSEDNFEELQYFPNFYALLKSIDSEKEAKEKETLITIMKTLIDFVKMMVKYGTISPEEGVSYLENLDEMIALQTKNKLEKNATDNISKLFPAPSEKSHEETDSTKEEAAKMEKEYGSLKDSTKDDNSNPGGKTDEPKGKTEAYLEAIRKNIEWLKKHDKKGNKEDYDLSKMRDFINKQADAYVEKGILDKEEAEAIKRIYSSL

SEQ ID NO: 175105 - DNA, 1407 bp, Artificial Sequence
  derived and/or modified sequence
atgggcttcctgggcaccggcacctggatcctggtgctggtgctgcccatccaggccttccccaagcccggcggcagccaggacaagagcctgcacaacagagagctgagcgccgagagacccctgaacgagcagatcgccgaggccgaggaggacaagatcaagaagacctacccccccgagaacaagcccggccagagcaactacagcttcgtggacaacctgaacctgctgaaggccatcaccgagaaggagaagatcgagaaggagagacagagcatcagaagcagccccctggacaacaagctgaacgtggaggacgtggacagcaccaagaacagaaagctgatcgacgactacgacagcaccaagagcggcctggaccacaagttccaggacgaccccgacggcctgcaccagctggacggcacccccctgaccgccgaggacatcgtgcacaagatcgccgccagaatctacgaggagaacgacagagccgtgttcgacaagatcgtgagcaagctgctgaacctgggcctgatcaccgagagccaggcccacaccctggaggacgaggtggccgaggtgctgcagaagctgatcagcaaggaggccaacaactacgaggaggaccccaacaagcccaccagctggaccgagaaccaggccggcaagatccccgagaaggtgacccccatggccgccatccaggacggcctggccaagggcgagaacgacgagaccgtgagcaacaccctgaccctgaccaacggcctggagagaagaaccaagacctacagcgaggacaacttcgaggagctgcagtacttccccaacttctacgccctgctgaagagcatcgacagcgagaaggaggccaaggagaaggagaccctgatcaccatcatgaagaccctgatcgacttcgtgaagatgatggtgaagtacggcaccatcagccccgaggagggcgtgagctacctggagaacctggacgagatgatcgccctgcagaccaagaacaagctggagaagaacgccaccgacaacatcagcaagctgttccccgcccccagcgagaagagccacgaggagaccgacagcaccaaggaggaggccgccaagatggagaaggagtacggcagcctgaaggacagcaccaaggacgacaacagcaaccccggcggcaagaccgacgagcccaagggcaagaccgaggcctacctggaggccatcagaaagaacatcgagtggctgaagaagcacgacaagaagggcaacaaggaggactacgacctgagcaagatgagagacttcatcaacaagcaggccgacgcctacgtggagaagggcatcctggacaaggaggaggccgaggccatcaagagaatctacagcagcctgtag

SEQ ID NO: 175106 - DNA, 1407 bp, Artificial Sequence
  derived and/or modified sequence
atgggattcctcggtactgggacgtggatacttgttctcgtgctccccatccaggctttcccaaagcccggtgggtcccaggataagagccttcacaatagggaattgagcgccgagcggcccctgaacgaacaaatcgccgaggcggaggaggataagataaagaaaacgtacccccccgagaacaaacctggacagagtaattattcatttgtggacaatttgaatctgctgaaggccattaccgaaaaagagaaaatcgagaaagaaaggcagtccattcgaagtagcccactggacaataagcttaatgttgaggatgtagatagcacaaaaaatcgaaagctcatcgatgactatgacagcacaaagtcggggcttgaccataaattccaggatgacccagacgggttgcatcagctggacggtaccccactaacagccgaagacattgtacataaaatcgctgctagaatatacgaggagaatgatcgcgccgtgtttgataagattgttagcaaattattaaacctaggccttattacagagagccaggcacacaccctcgaagacgaggtggcagaggttctccagaagctgatctccaaggaggctaacaattatgaagaggaccctaacaagccaacctcgtggacggagaatcaagcgggtaagattccggaaaaagtgacccccatggccgccattcaggacggcctcgcaaaaggagaaaacgatgagaccgtctccaacactctgacactgacaaatggtctcgagagaaggaccaagacttactccgaagataatttcgaggaactgcagtatttccctaatttctacgcattactgaaaagtatcgatagcgagaaggaggctaaggaaaaggagaccctgattactattatgaaaacccttattgactttgttaagatgatggtcaagtatggcactatttccccagaggagggagtaagctatctggaaaacctggatgagatgattgccctgcaaactaaaaataagctcgagaaaaatgctacggacaacatttccaagctgtttcccgcaccttctgaaaagagccacgaagagacggatagcaccaaggaggaagcagcaaagatggaaaaagaatatggatcacttaaggacagtactaaggatgacaacagtaacccggggggcaaaacagacgaacctaaaggaaaaaccgaagcctacctagaggcaatccgcaagaatatcgaatggcttaaaaagcacgataaaaaaggaaataaggaggattatgatctgtccaagatgagagatttcataaataagcaggctgatgcttacgttgagaagggtatcttggacaaagaagaggcagaagcaataaagcgcatatacagtagcctgtag

SEQ ID NO: 175107 - DNA, 1407 bp, Artificial Sequence
  derived and/or modified sequence
atgggcttcctgggcaccggcacctggatcctggtgctggtgctgcccatccaggccttccccaagccaggcggcagccaggacaagagcctgcacaaccgggagctgtctgctgagcggcccctgaatgagcagattgctgaggccgaggaggacaagatcaagaagacctaccccccagagaacaagccaggccagagcaactacagctttgtggacaacctgaacctgctgaaggccatcacagagaaggagaagattgagaaggagcggcagagcatccgcagcagccccctggacaacaagctgaatgtggaggatgtggacagcaccaagaacaggaagctgattgatgattatgacagcaccaagagcggcctggaccacaagttccaggatgatcctgatggcctgcaccagctggatggcacccccctgacagcagaagatattgtgcacaagattgctgcccgcatctatgaggagaatgacagagctgtgtttgacaagatcgtgtccaagctgctgaacctgggcctcatcacagagagccaggcccacaccctggaggatgaggtggccgaggtgctgcagaagctgatcagcaaggaggccaacaactatgaggaggaccccaacaagcccacctcctggacagagaaccaggccggcaagatccctgagaaggtgacccccatggccgccatccaggacggcctggccaagggggagaatgatgagaccgtgagcaacaccctgaccctgaccaacggcctggagaggaggaccaagacctacagcgaggacaactttgaggagctgcagtacttccccaacttctacgccctgctgaagagcattgattctgagaaggaggccaaggagaaggagaccctcatcaccatcatgaagaccctgattgactttgtgaagatgatggtgaagtatggcaccatcagccctgaggagggcgtgtcctacctggagaacctggatgagatgattgccctgcagaccaagaacaagctggagaagaatgccacagacaacatcagcaagctgtttcctgcccccagcgagaagagccatgaggagacagacagcaccaaggaggaggccgccaagatggagaaggagtatggcagcctgaaggacagcaccaaggatgacaacagcaaccctgggggcaagacagatgagcccaagggcaagacagaggcctacctggaggccatcaggaagaacatcgagtggctgaagaagcatgacaagaagggcaacaaggaggactatgacctgagcaagatgagggacttcatcaacaagcaggctgatgcctacgtggagaagggcatcctggacaaggaggaggccgaggccatcaagaggatctacagcagcctgtag

SEQ ID NO: 175108 - DNA, 1407 bp, Artificial Sequence
  derived and/or modified sequence
atgggcttcctgggcaccggcacctggatcctggtgctggtgctgccaatacaagcatttcctaaacccggcgggagccaagataaaagtttacacaatagagagctgagcgcagaaaggcccctcaacgaacagatcgcagaagccgaggaagacaagatcaaaaaaacctaccctccagaaaataaacccggccagagtaactattcatttgtggataacctcaatctcctgaaagcaatcacagaaaaagaaaagatagagaaggagcggcagtcaatccggagctcccctttagacaacaagctcaatgtcgaggatgtggacagcaccaaaaacaggaaactgatcgatgattatgacagcactaagtccgggttagatcacaaatttcaggatgaccctgacggactccatcagcttgatggtacccctctcaccgcagaggacatcgtccacaagatcgccgccaggatatatgaagaaaatgatagagcggtgttcgacaagatagtgtccaaactgctcaatttaggcctcataaccgagtcacaagcgcataccctggaggacgaagtggcagaggtgctccagaagctcatctctaaagaagctaacaactatgaggaggatcccaacaaacccacatcctggactgagaaccaggctggaaagatacctgaaaaagtgacaccaatggcggccattcaggatgggctggccaagggcgaaaacgatgagacagtgagcaacaccctgacactgacaaatggactggagagacggacaaagacatattccgaagacaacttcgaagagctccagtatttccccaacttttacgcgctgcttaagagcatcgacagtgagaaggaagccaaggaaaaagaaaccctcataactatcatgaagacccttatagacttcgttaagatgatggtgaagtacggcacgatctctcctgaggagggagtctcctatcttgagaatctagatgagatgatcgccttgcaaaccaagaacaagctagaaaaaaacgccacagacaacatttcaaaactctttccagcgcccagcgagaaatcccatgaggagactgactccactaaagaagaagccgcaaaaatggagaaagagtatgggtcactgaaagactcaaccaaagatgataacagtaatcctggcgggaagaccgatgagccgaagggaaagacggaggcttacctggaggcaatcaggaaaaatatcgagtggctgaaaaaacatgacaagaaaggcaacaaggaggattacgacctgagcaagatgcgggactttattaataaacaggctgacgcttacgtagagaaaggtatccttgacaaggaggaggccgaagctatcaaacggatttactctagtctgtag

SEQ ID NO: 175109 - DNA, 1407 bp, Artificial Sequence
  derived and/or modified sequence
atgggctttttgggaacaggtacctggattctggtgctggtgctgcctattcaggcgttccctaaacctggaggcagccaggataaaagtctccataacagggaactcagcgccgagaggcccctcaatgaacagatagctgaagcggaagaggacaagatcaaaaagacatacccaccagagaataaacccggtcagtcaaactattccttcgtcgataatcttaacctacttaaggctattacagaaaaggagaagatagagaaggaaagacagagcatccgcagctcacccctggacaacaaactaaatgttgaggacgttgatagcacaaaaaaccgcaaactcatagatgattacgattccacaaaaagtggcctcgatcacaaatttcaggatgacccagatggactgcaccaactcgatgggacccccttaaccgcagaggatatcgtgcacaagattgccgcacgaatttacgaggagaatgatagggctgtctttgataagatcgtctctaaattgctgaacctggggctgatcaccgagagtcaggcccataccttggaggatgaagtcgccgaagtgctccagaagctgatctccaaagaggctaataattatgaggaagacccaaataagcccacctcttggaccgaaaatcaggcaggcaaaattccagagaaagtaacacctatggccgctatccaggacggactggcaaagggggagaacgatgagaccgtgtcaaataccctgaccctgactaacggacttgagagaagaaccaaaacttactcagaagacaacttcgaggaattgcagtacttccctaacttttatgctctgcttaaaagtattgactctgaaaaggaggctaaggagaaggagaccctaattacgattatgaagaccttgatcgactttgtaaaaatgatggtcaaatatggcactatcagtccggaggaaggagtgtcttatctggagaatttggatgagatgatcgcgctgcaaaccaaaaataagctggagaagaacgcaacggacaacatcagcaaactttttccggctccaagcgaaaaatcgcatgaagagaccgatagcacaaaggaggaggcagccaagatggagaaagagtacggatctcttaaggatagtacaaaagacgacaattcgaacccgggtggcaaaactgacgagcccaagggcaagaccgaagcgtatctggaggccatccgcaagaatatcgagtggctcaagaaacacgacaaaaaaggaaataaggaggactatgatctcagcaaaatgcgggattttattaataagcaggccgatgcctatgtagaaaaaggcatacttgataaagaggaggcagaggccatcaaacgcatctactcatctctgtag

SEQ ID NO: 175110 - DNA, 3310 bp, Artificial Sequence
  derived and/or modified sequence
gttccattcccgggggattggagtagcgttggagtcaccgacgccatcccctcccgcctctggcgtgcatggagcatgcgcttccttcctcacttcctctgcaggagggagcgagagtaaagctacgccctggcgcgcagtctccgcgtcacaggaacttcagcacccacagggcggacagcgctcccctctacctggagacttgactcccgcgcgccccaaccctgcttatcccttgaccgtcgagtgtcagagatcctgcagccgcccagtcccggcccctctcccgccccacacccaccctcctggctcttcctgtttttactcctccttttcattcataacaaaagctacagctccaggagcccagcgccgggctgtgacccaagccgagcgtggaagaatggggttcctcgggaccggcacttggattctggtgttagtgctcccgattcaagctttccccaaacctggaggaagccaagacaaatctctacataatagagaattaagtgcagaaagacctttgaatgaacagattgctgaagcagaagaagacaagattaaaaaaacatatcctccagaaaacaagccaggtcagagcaactattcttttgttgataacttgaacctgctaaaggcaataacagaaaaggaaaaaattgagaaagaaagacaatctataagaagctccccacttgataataagttgaatgtggaagatgttgattcaaccaagaatcgaaaactgatcgatgattatgactctactaagagtggattggatcataaatttcaagatgatccagatggtcttcatcaactagacgggactcctttaaccgctgaagacattgtccataaaatcgctgccaggatttatgaagaaaatgacagagccgtgtttgacaagattgtttctaaactacttaatctcggccttatcacagaaagccaagcacatacactggaagatgaagtagcagaggttttacaaaaattaatctcaaaggaagccaacaattatgaggaggatcccaataagcccacaagctggactgagaatcaggctggaaaaataccagagaaagtgactccaatggcagcaattcaagatggtcttgctaagggagaaaacgatgaaacagtatctaacacattaaccttgacaaatggcttggaaaggagaactaaaacctacagtgaagacaactttgaggaactccaatatttcccaaatttctatgcgctactgaaaagtattgattcagaaaaagaagcaaaagagaaagaaacactgattactatcatgaaaacactgattgactttgtgaagatgatggtgaaatatggaacaatatctccagaagaaggtgtttcctaccttgaaaacttggatgaaatgattgctcttcagaccaaaaacaagctagaaaaaaatgctactgacaatataagcaagcttttcccagcaccatcagagaagagtcatgaagaaacagacagtaccaaggaagaagcagctaagatggaaaaggaatatggaagcttgaaggattccacaaaagatgataactccaacccaggaggaaagacagatgaacccaaaggaaaaacagaagcctatttggaagccatcagaaaaaatattgaatggttgaagaaacatgacaaaaagggaaataaagaagattatgacctttcaaagatgagagacttcatcaataaacaagctgatgcttatgtggagaaaggcatccttgacaaggaagaagccgaggccatcaagcgcatttatagcagcctgtaaaaatggcaaaagatccaggagtctttcaactgtttcagaaaacataatatagcttaaaacacttctaattctgtgattaaaattttttgacccaagggttattagaaagtgctgaatttacagtagttaaccttttacaagtggttaaaacatagctttcttcccgtaaaaactatctgaaagtaaagttgtatgtaagctgagattttgtatacagaatccttatttcctcatagacttatattttataatcagaatatgttgctttgaaaaagcctctaatggactgaccttaaaactcatccttcttccactgtctcatccacataagcactccccgaagaattaagggggttctgttttcaaggcatgccaagtactaaagcaccttgcagagcgtgtctattacaagatgtcatttccaccagcagttcccttaggggagctgaaataaattcacattttctcaaagtctcatagctttggaggagccatctgcttttttggctgctctttttagctggctttttattaggctcagtgacataaaaaggatccaggtaaatgggtataggatttgctggatttactaacaatttccccctgttcttaacacttcctattagtgacttttcagacattgagtttacttataaagagagatatttatgtactctctaagaagacaaatgaggtcataaacactgcataaagcaaggcaaaaatgtatgccacatctcagttatctaaactagattagatccaagccaagttttctcaacagagagcaaagggccaggcagtaaggtagaaatagagataaaaatcattccttccttgtgatccaaagctggtcgagcagctttcctggaggaaaaggttaatgaacttcaggtccctgcaactcagcccccaccacaaacacagccctggaaacatacagtggcgcaaggtcctcttgaaatgttaatggttaatgttcccaaaccagagaatgctttgaaaatgtatcattcagtgtaaattaattacatacatatttttctatatatttgtttcaaactgtaaaaataacataatatgtaatttgtgtattagtgagaggtgaagccagctggacttcctgggtcgagtggggccttggagaacttttctgtcttacaagaggattgtaaaatgcacccatcagtgctctgtaaaacacaccaatcagcgctctgtagctagcaataggtttgtaaaatgcacccatcagcactctgtaaaacgcaccaatcagcactctgtaaaatgcaccaatcagcaggattctaaaagtagacaatcacagggaggattgaaaaaaagggcactctgatagggcaaaaacggaacatgggaggggacaaataagggaataaaatctggccaccccagccagcagcagcaacctgttcaggtcgcctgccgctgtggaagctttgtccttttgctcttcataataaaccttgctactgttca

SEQ ID NO: 175111 - DNA, 2163 bp, Artificial Sequence
  derived and/or modified sequence
gtctccgcgtcacaggaacttcagcacccacagggcggacagcgctcccctctacctggagacttgactcccgcgcgccccaaccctgcttatcccttgaccgtcgagtgtcagagatcctgcagccgcccagtcccggcccctctcccgccccacacccaccctcctggctcttcctgtttttactcctccttttcattcataacaaaagctacagctccaggagcccagcgccgggctgtgacccaagccgagcgtggaagaatggggttcctcgggaccggcacttggattctggtgttagtgctcccgattcaagctttccccaaacctggaggaagccaagattgctgaagcagaagaagacaagattaaaaaaacatatcctccagaaaacaagccaggtcagagcaactattcttttgttgataacttgaacctgctaaaggcaataacagaaaaggaaaaaattgagaaagaaagacaatctataagaagctccccacttgataataagttgaatgtggaagatgttgattcaaccaagaatcgaaaactgatcgatgattatgactctactaagagtggattggatcataaatttcaagatgatccagatggtcttcatcaactagacgggactcctttaaccgctgaagacattgtccataaaatcgctgccaggatttatgaagaaaatgacagagccgtgtttgacaagattgtttctaaactacttaatctcggccttatcacagaaagccaagcacatacactggaagatgaagtagcagaggttttacaaaaattaatctcaaaggaagccaacaattatgaggaggatcccaataagcccacaagctggactgagaatcaggctggaaaaataccagagaaagtgactccaatggcagcaattcaagatggtcttgctaagggagaaaacgatgaaacagtatctaacacattaaccttgacaaatggcttggaaaggagaactaaaacctacagtgaagacaactttgaggaactccaatatttcccaaatttctatgcgctactgaaaagtattgattcagaaaaagaagcaaaagagaaagaaacactgattactatcatgaaaacactgattgactttgtgaagatgatggtgaaatatggaacaatatctccagaagaaggtgtttcctaccttgaaaacttggatgaaatgattgctcttcagaccaaaaacaagctagaaaaaaatgctactgacaatataagcaagcttttcccagcaccatcagagaagagtcatgaagaaacagacagtaccaaggaagaagcagctaagatggaaaaggaatatggaagcttgaaggattccacaaaagatgataactccaacccaggaggaaagacagatgaacccaaaggaaaaacagaagcctatttggaagccatcagaaaaaatattgaatggttgaagaaacatgacaaaaagggaaataaagaagattatgacctttcaaagatgagagacttcatcaataaacaagctgatgcttatgtggagaaaggcatccttgacaaggaagaagccgaggccatcaagcgcatttatagcagcctgtaaaaatggcaaaagatccaggagtctttcaactgtttcagaaaacataatatagcttaaaacacttctaattctgtgattaaaattttttgacccaagggttattagaaagtgctgaatttacagtagttaaccttttacaagtggttaaaacatagctttcttcccgtaaaaactatctgaaagtaaagttgtatgtaagctgagattttgtatacagaatccttatttcctcatagacttatattttataatcagaatatgttgctttgaaaaagcctctaatggactgaccttaaaactcatccttcttccactgtctcatccacataagcactccccgaagaattaagggggttctgttttcaaggcatgccaagtactaaagcaccttgcagagcgtgtctattacaagatgtcatttccaccagcagttcccttaggggagctgaaataaattcacattttctcaaagtctcatagctttggaggagccatctgcttttttggctgctctttttagctggctttttattaggctcagtgac

SEQ ID NO: 175112 - DNA, 896 bp, Artificial Sequence
  derived and/or modified sequence
agcgctcccctctacctggagacttgactcccgcgcgccccaaccctgcttatcccttgaccgtcgagtgtcagagatcctgcagccgcccagtcccggcccctctcccgccccacacccaccctcctggctcttcctgtttttactcctccttttcattcataacaaaagctacagctccaggagcccagcgccgggctgtgacccaagccgagcgtggaagaatggggttcctcgggaccggcacttggattctggtgttagtgctcccgattcaagctttccccaaacctggaggaagccaagattgctgaagcagaagaagacaagattaaaaaaacatatcctccagaaaacaagccaggtcagagcaactattcttttgttgataacttgaacctgctaaaggcaataacagaaaaggaaaaaattgagaaagaaagacaatctataagaagctccccacttgataataagttgaatgtggaagatgttgattcaaccaagaatcgaaaactgatcgatgattatgactctactaagagtggattggatcataaatttcaagatcacagaaagccaagcacatacactggaagatgaagtagcagaggttttacaaaaattaatctcaaaggaagccaacaattatgaggaggatcccaataagcccacaagctggactgagaatcaggctggaaaaataccagagaaagtgactccaatggcagcaattcaagatggtcttgctaagggagaaaacgatgaaacagtatctaacacattaaccttgacaaatggcttggaaaggagaactaaaacctacagtgaagacaactttgaggaactccaatatttcccaaatttctatgcgctactgaaaagtattgattcag

SEQ ID NO: 175113 - DNA, 1437 bp, Artificial Sequence
  derived and/or modified sequence
atgttcaagttccaccagatgaagcacatcttcgagatcctggacaagatgagatgcctgagaaagagaagcaccgtgagcttcctgggcgtgctggtgatcttcctgctgttcatgaacctgtacatcgaggacagctacgtgctggagggcgacaagcagctgatcagagagaccagcacccaccagctgaacagcgagagatacgtgcacaccttcaaggacctgagcaacttcagcggcgccatcaacgtgacctacagatacctggccgccacccccctgcagagaaagagatacctgaccatcggcctgagcagcgtgaagagaaagaagggcaactacctgctggagaccatcaagagcatcttcgagcagagcagctacgaggagctgaaggagatcagcgtggtggtgcacctggccgacttcaacagcagctggagagacgccatggtgcaggacatcacccagaagttcgcccaccacatcatcgccggcagactgatggtgatccacgcccccgaggagtactaccccatcctggacggcctgaagagaaactacaacgaccccgaggacagagtgaagttcagaagcaagcagaacgtggactacgccttcctgctgaacttctgcgccaacaccagcgactactacgtgatgctggaggacgacgtgagatgcagcaagaacttcctgaccgccatcaagaaggtgatcgccagcctggagggcacctactgggtgaccctggagttcagcaagctgggctacatcggcaagctgtaccacagccacgacctgcccagactggcccacttcctgctgatgttctaccaggagatgccctgcgactggctgctgacccacttcagaggcctgctggcccagaagaacgtgatcagattcaagcccagcctgttccagcacatgggctactacagcagctacaagggcaccgagaacaagctgaaggacgacgacttcgaggaggagagcttcgacatccccgacaacccccccgccagcctgtacaccaacatgaacgtgttcgagaactacgaggccagcaaggcctacagcagcgtggacgagtacttctggggcaagccccccagcaccggcgacgtgttcgtgatcgtgttcgagaaccccatcatcatcaagaagatcaaggtgaacaccggcaccgaggacagacagaacgacatcctgcaccacggcgccctggacgtgggcgagaacgtgatgcccagcaagcagagaagacagtgcagcacctacctgagactgggcgagttcaagaacggcaacttcgagatgagcggcgtgaaccagaagatccccttcgacatccactgcatgagaatctacgtgaccaagacccagaaggagtggctgatcatcagaagcatcagcatctggaccagctag

SEQ ID NO: 175114 - DNA, 1197 bp, Artificial Sequence
  derived and/or modified sequence
atgttcaagttccaccagatgaagcacatcttcgagatcctggacaagatgagatgcctgagaaagagaagcaccgtgagcttcctgggcgtgctggtgatcttcctgctgttcatgaacctgtacatcgaggacagctacgtgctggagggcgacaagcagctgatcagagagaccagcacccaccagctgaacagcgagagatacgtgcacaccttcaaggacctgagcaacttcagcggcgccatcaacgtgacctacagatacctggccgccacccccctgcagagaaagagatacctgaccatcggcctgagcagcgtgaagagaaagaagggcaactacctgctggagaccatcaagagcatcttcgagcagagcagctacgaggagctgaaggagatcagcgtggtggtgcacctggccgacttcaacagcagctggagagacgccatggtgcaggacatcacccagaagttcgcccaccacatcatcgccggcagactgatggtgatccacgcccccgaggagtactaccccatcctggacggcctgaagagaaactacaacgaccccgaggacagagtgaagttcagaagcaagcagaacgtggactacgccttcctgctgaacttctgcgccaacaccagcgactactacgtgatgctggaggacgacgtgagatgcagcaagaacttcctgaccgccatcaagaaggtgatcgccagcctggagggcacctactgggtgaccctggagttcagcaagctgggctacatcggcaagctgtaccacagccacgacctgcccagactggcccacttcctgctgatgttctaccaggagatgccctgcgactggctgctgacccacttcagaggcctgctggcccagaagaacgtgatcagattcaagcccagcctgttccagcacatgggctactacagcagctacaagggcaccgagaacaagctgaaggacgacgacttcgaggaggagagcttcgacatccccgacaacccccccgccagcctgtacaccaacatgaacgtgttcgagaactacgaggccagcaaggcctacagcagcgtggacgagtacttctggggcaagccccccagcaccggcgacgtgttcgtgatcgtgttcgagaaccccatcatcatcaagaagatcaaggtgaacaccggcacctag

SEQ ID NO: 175115 - DNA, 1437 bp, Artificial Sequence
  derived and/or modified sequence
atgtttaagtttcaccagatgaagcacatttttgaaattctagataagatgagatgtttgagaaaacggtcgactgtatcatttttaggagtgctggtgatcttcctcttgtttatgaatttatacattgaggattcctatgttttggaaggggacaaacagctgatccgcgagacctcaacccaccagttaaactcagagaggtacgtccatacatttaaggatctgtcaaattttagtggcgcgattaatgtaacataccggtacctcgctgccacacctctccagcgaaagaggtacttgacaatcggcctgtcttctgtaaagagaaagaagggcaattacttgctggagacaatcaaatcgatttttgagcagagttcttacgaagagctgaaggagattagtgtggtcgttcacttggccgattttaactccagttggcgagacgccatggtccaggatattacccagaagttcgcccatcacatcattgccggtcggctgatggtgattcacgcccctgaagagtattatcccatcttagacggtcttaagcggaattacaatgatcctgaggaccgggttaagttccgatctaaacaaaacgtggattacgctttcctgttgaatttttgcgccaacacatccgactactatgtgatgctcgaggatgatgtgaggtgcagcaagaactttctgacagctataaaaaaagtcatcgccagcctggaagggacttactgggtgaccctagagttcagtaaattgggatacattggcaaattgtaccattcgcacgatctgccccgactcgcccacttcctcctcatgttttatcaggagatgccttgcgactggctgctcactcattttcgggggcttctggcccaaaaaaatgtcatccggtttaagccaagcctttttcaacatatgggctactacagttcttacaaaggcaccgaaaataaactcaaagacgacgattttgaggaggagagcttcgatatacctgacaaccctccagccagcctgtatacaaatatgaatgtgttcgagaattacgaagcctccaaagcttatagctccgtggatgagtatttctggggcaaaccccctagtactggggatgtcttcgtgatagttttcgagaatcctattatcattaagaagattaaagtcaacaccggcaccgaagatcgtcagaacgacattcttcaccatggcgccctcgacgtaggagaaaacgtgatgcccagcaaacagcgtagacagtgcagtacatacttacgtctgggcgagttcaaaaatggcaatttcgagatgagtggagtgaatcaaaagataccttttgacattcactgcatgcggatctacgttaccaagacacagaaggagtggctcattataaggagcatatccatctggaccagttag

SEQ ID NO: 175116 - DNA, 1197 bp, Artificial Sequence
  derived and/or modified sequence
atgttcaagtttcatcaaatgaagcatatattcgagatcctggataaaatgaggtgtctgcgaaaacggagtaccgtgagctttctgggtgtgctggtgatctttcttctgtttatgaacttgtacattgaggactcatatgtcttggaaggagataagcagctgatcagggagacctccacgcatcagctgaatagcgagagatatgttcatacctttaaagacctttctaacttttctggcgcaatcaacgtcacttaccgctaccttgcggcgaccccactgcagagaaagcgttatttaactatcggattgtccagcgtgaagcgaaaaaaggggaactatctgctggaaaccattaaatctatcttcgaacagtcgtcgtatgaggagttaaaagagatcagtgtcgttgtccacctggcagatttcaattcctcttggagagatgctatggtccaggatatcacccagaaatttgcacatcatattatcgccgggcgacttatggttattcatgcccctgaagaatactaccccattctggatggcctgaaaagaaactacaatgaccctgaagacagagtcaagtttagaagcaaacagaacgtcgattatgccttcttgcttaatttctgcgccaatacctctgattactatgtaatgctggaggatgacgttagatgttctaaaaattttctgacggccataaaaaaagtgatcgcaagtctcgaaggaacctactgggtgacattagagttcagcaagctggggtacatcggaaagctgtaccactcacatgacttgccccgcctggcacactttctgttgatgttctatcaggaaatgccttgcgattggctactcactcacttccgcggactgctcgcccaaaagaacgtaatacgttttaagccttctttatttcagcacatgggttactacagcagctacaagggtacggaaaacaagctgaaagacgacgattttgaggaggagtcatttgatattcctgataaccctcccgcatcgctgtatacgaatatgaatgttttcgagaattatgaggcatcaaaggcctattcgagtgtggacgagtatttttggggcaagcctccgagtacaggagacgtattcgtaattgtgtttgaaaacccgattattatcaagaagataaaagtgaacacaggaacttag

SEQ ID NO: 175117 - DNA, 1437 bp, Artificial Sequence
  derived and/or modified sequence
atgttcaagttccaccaaatgaagcatatttttgagatactcgataagatgcgatgtctcagaaaaaggtccacagtctcattcctcggagtgttggtgatctttctgctcttcatgaacctatatattgaagattcttacgtgctggaaggggacaaacagctgatacgagaaacctccacccaccagctaaattcagaaagatatgtacatacctttaaagatctcagcaacttcagcggcgccatcaatgtgacataccggtatctcgctgctacgccgctccaacggaagagatatctcacaatcggtttgagctcagtgaagcggaaaaaggggaactaccttttggaaactattaagtcaatattcgagcaatcaagctatgaagagctcaaagagatttccgtggtggtgcaccttgcggacttcaattcctcttggcgcgatgcaatggtgcaggacatcactcagaagttcgctcaccatattatcgccgggcggctgatggtcattcatgcgcctgaggagtactacccgattcttgatggtctaaaaagaaactacaacgatcctgaagaccgcgttaaatttcgtagcaagcaaaatgtggattacgcctttctcctgaacttctgcgctaacacatctgattactacgttatgctggaagatgacgtgaggtgttccaaaaactttcttactgccattaaaaaagtgatcgcgtcacttgaggggacatattgggtaaccctcgagtttagtaagttgggatacattgggaagctgtaccactctcatgatctcccccggctcgcccactttctgcttatgttctaccaagaaatgccctgcgactggttattgacccatttccgcggccttttggcgcagaagaacgtaattaggtttaagccttccctttttcaacacatgggatactattccagttacaaaggcacggaaaataaactgaaagacgacgactttgaggaggaatcttttgacatccccgataaccccccggccagtctgtacacaaatatgaatgtgttcgagaattatgaagcctcaaaggcttattcaagcgtggacgaatatttctggggtaaacccccttcaacaggcgatgtgttcgtgatagtcttcgagaatccaataattataaaaaagatcaaagtgaataccggcactgaggaccgacagaacgatatcttgcaccatggcgccctcgatgtcggtgagaacgtgatgccgtcaaagcagcggaggcagtgctctacatacctgagattgggggaatttaagaacggcaactttgaaatgagcggagtgaaccagaagataccttttgacatccactgtatgcggatttatgtgacgaagacgcagaaggagtggctcattattcggtccatcagtatttggacttcctag

SEQ ID NO: 175118 - DNA, 1437 bp, Artificial Sequence
  derived and/or modified sequence
atgttcaaatttcatcagatgaaacacatcttcgaaatcctcgacaaaatgcggtgcctgaggaagagatctaccgtaagttttctgggagttctggtgattttcctgttgtttatgaatctctatattgaggatagctatgtcttggaaggtgacaagcagctcatccgcgagactagcactcaccagctgaacagcgagcggtacgtgcacactttcaaggacctctcgaattttagcggcgccatcaacgtgacttatcgctatctggcggccacccctttgcaacgcaagcggtatctcacaattgggctctcaagcgtcaaaaggaagaagggaaattatctcctggagaccattaaatcaatctttgagcagtcatcatatgaggagctgaaagagatctctgtagtggtgcacctggccgacttcaacagctcttggagagacgccatggtccaggacatcacacaaaaattcgcccaccacatcattgctggtagactaatggtgatccatgctccagaggagtattacccaattctagatgggctaaagcgaaattacaatgatccagaagatcgggtgaaattccggtccaaacagaacgtagattatgctttcctgctgaatttctgcgcgaacacgtcagactactacgtgatgctagaagacgatgtacgctgtagcaaaaactttttaaccgccatcaagaaggtcatcgccagcctggaagggacttattgggtcacattagagttcagtaagctcggttacatcggcaagctgtatcatagccacgatctgccgcgcctggcgcatttcctgttgatgttttatcaggaaatgccctgtgattggctgctcacccatttcaggggtctgttggctcagaaaaacgtcatcagattcaaacccagcttgttccagcatatgggctactatagctcatataaaggcaccgaaaacaaattgaaggatgacgacttcgaggaagaatcctttgacatcccggataaccccccggcctccttatacacaaatatgaacgtgttcgagaactacgaggcctcaaaggcatacagctcagtcgatgaatatttctgggggaagcccccatccacaggtgatgtgttcgtgatcgtctttgagaatccgatcatcatcaagaaaataaaggtcaatacggggactgaggatcggcagaatgacatcctgcatcatggtgcactggatgtcggcgagaacgtgatgccatccaaacagaggcgccagtgtagcacttacttgcgattgggggaattcaagaacggaaattttgagatgtccggagtgaatcagaaaatcccttttgacatacactgtatgaggatatacgtaacaaagacgcagaaagaatggttaattattcgcagcatcagcatctggacctcctag

SEQ ID NO: 175119 - DNA, 1437 bp, Artificial Sequence
  derived and/or modified sequence
atgtttaagtttcatcagatgaagcatatcttcgagatcttagataaaatgcgatgtcttcgaaagagatcaaccgtaagctttctcggcgtccttgtgatcttcctgctgttcatgaacctttacatcgaggacagctacgtgctggagggcgataagcagctgatccgcgagaccagtactcatcagctgaacagcgagcggtatgtgcacacattcaaagacctttcaaattttagtggggccatcaacgtgacatacaggtacctggccgccacccctctccagaggaagaggtatctcaccattgggctgagtagcgttaagcggaaaaagggaaactatctgctggaaacaatcaaatcaatttttgagcaaagctcttatgaggaactgaaggaaatctcagtcgttgttcacctggctgatttcaactccagctggagagacgcgatggtgcaggatatcacgcaaaaattcgcccaccacattatcgcagggcggctcatggtgatacacgcacctgaggagtattatcctatcctggacgggcttaagcgcaactacaatgaccctgaagacagggtcaagttcaggtcgaagcagaatgtcgactatgctttcttactgaacttttgcgctaatacgtctgattactatgtcatgttggaggatgatgtgcggtgcagcaagaactttctgactgcaatcaaaaaggtcattgcaagccttgaaggtacgtactgggtgacgttggagtttagtaagctggggtatattggtaagctataccattcccacgacctcccacgcctagcgcacttcctgctgatgttctaccaggaaatgccgtgtgattggttactgactcactttagagggctgctcgcccagaaaaatgtgatccgatttaagccatctctttttcaacatatggggtattacagctcctataagggaacagagaacaagctgaaagacgacgatttcgaggaagaatcttttgacatccctgacaatccaccggctagtctttacaccaacatgaatgtgtttgagaactacgaggccagtaaggcttactcaagtgtagatgaatatttctggggcaaaccgcccagcaccggggatgtcttcgttattgtgttcgaaaaccccatcatcataaagaagattaaggtcaacacagggactgaggaccgccagaatgacattctgcaccacggcgcgctcgatgtcggtgaaaacgtgatgccatccaagcagagacgacagtgttctacctatctccggttgggtgaattcaaaaatggaaatttcgaaatgagcggcgtcaaccagaaaatcccgttcgatatccactgcatgaggatttatgtcacaaagacacaaaaggagtggctaattatccggtccatttctatctggacctcgtag

SEQ ID NO: 175120 - DNA, 1437 bp, Artificial Sequence
  derived and/or modified sequence
atgttcaagttccatcagatgaagcacatctttgaaattctcgataagatgaggtgcttgcgaaagcgaagcacagtgtcattcttgggcgttcttgtgatcttcctccttttcatgaatctttacatcgaagatagctatgtgctcgagggcgacaagcaattaatccgcgaaaccagtacgcaccagctgaactcggagaggtacgtgcatacttttaaagatttatctaatttttccggggccattaatgtgacttacaggtacctggcagcaacaccccttcagcgtaagagatacctgaccattgggctgtcatcagtgaagagaaaaaaggggaactacctgctcgaaacaatcaagagtatctttgagcagtcaagctacgaagagttgaaagagatcagcgtggtagttcacctggcggacttcaattccagctggcgggatgctatggtgcaggacattactcagaaattcgctcaccacattattgcaggccggctaatggtgatccatgcgcccgaagagtactatcccatcctggacggccttaagaggaactataacgatcccgaggaccgtgtcaaattcaggtctaagcagaacgtagactacgcatttctcttgaacttttgcgccaataccagcgattattacgtgatgctggaggatgatgtgagatgctccaaaaatttcctgaccgctattaagaaagtcatagcttcactggagggcacttactgggtcactctggaattctccaagctagggtacatcggcaagttgtaccattcacatgacctgccacggctcgcccattttctgctgatgttctatcaggaaatgccatgcgattggttgttaacccacttccgcggactgctggcccagaagaacgtcattagattcaagcctagcctgttccagcatatgggttactattcttcttacaagggaaccgagaacaagctgaaagacgatgacttcgaagaggagtccttcgatatcccagataatcctccagcctccttatacaccaatatgaatgtgtttgagaattacgaagctagcaaggcctacagttctgtggatgaatacttttgggggaaaccacctagtaccggcgatgtctttgtcattgtctttgaaaaccctatcattatcaaaaagatcaaagtcaatacagggacggaagatcgtcagaacgacattctgcaccacggggctttggatgtcggagaaaacgttatgccgtctaagcagcgcaggcagtgctctacgtatctgagacttggtgagtttaaaaatggcaattttgaaatgagcggtgtcaaccagaaaattcctttcgatatccactgcatgcgcatctacgtcacgaaaacccagaaagagtggctaatcatcaggagtatcagcatttggacctcgtag

SEQ ID NO: 175121 - DNA, 1437 bp, Artificial Sequence
  derived and/or modified sequence
atgttcaagttccaccagatgaagcacatctttgagatcctggacaagatgcgctgcctgaggaagaggagcacagtgtccttcctgggcgtgctggtgatcttcctgctcttcatgaacctgtacatcgaggacagctatgtgctggagggggacaagcagctgatccgggagaccagcacccaccagctgaacagcgagagatatgtgcacaccttcaaggacctgagcaacttcagcggggccatcaacgtgacctaccgctacctggccgccacccccctgcagaggaagcgctacctgaccatcggcctgagctctgtgaagaggaagaagggcaactacctgctggagaccatcaagagcatctttgagcagagcagctatgaggagctgaaggagatctctgtggtggtgcacctggccgacttcaacagctcctggagagatgccatggtgcaggacatcacccagaagtttgcccaccacatcatcgccggccgcctgatggtgattcatgcccctgaggagtactaccccatcctggatggcctgaagaggaactacaatgaccctgaagatagagtgaagttccgcagcaagcagaatgtggactatgccttcctgctgaacttctgtgccaacaccagtgactactacgtgatgctggaggatgatgtgcgctgcagcaagaacttcctgacagccatcaagaaggtgattgccagcctggagggcacctactgggtgaccctggagttcagcaagctgggctacatcggcaagctgtaccacagccatgacctgccccggctggcccacttcctgctgatgttctaccaggagatgccctgtgactggctgctgacccacttccggggcctgctggcccagaagaatgtcatccgcttcaagcccagcctcttccagcacatgggctactacagcagctacaagggcacagagaacaagctgaaggatgatgactttgaggaggagagctttgacatcccagacaaccccccagccagcctgtacaccaacatgaatgtgtttgaaaattatgaggccagcaaggcctacagctctgtggatgagtacttctggggcaagccacccagcactggagatgtgtttgtgattgtgtttgagaaccccatcatcatcaagaagatcaaggtgaacacaggaacagaagatcggcagaatgacatcctgcaccacggggccctggatgtgggagaaaatgtgatgcccagcaagcagaggcggcagtgcagcacctacctgcggctgggggagttcaagaatggaaactttgagatgtctggagtgaaccagaagatcccctttgacatccactgcatgaggatctacgtgaccaagacccagaaggagtggctgatcatccgcagcatcagcatctggaccagctag

SEQ ID NO: 175122 - DNA, 1197 bp, Artificial Sequence
  derived and/or modified sequence
atgttcaagttccaccagatgaagcacatctttgagatcctggacaagatgcgctgcctgaggaagaggagcacagtgtccttcctgggcgtgctggtgatcttcctgctcttcatgaacctgtacatcgaggacagctatgtgctggagggggacaagcagctgatccgggagaccagcacccaccagctgaacagcgagagatatgtgcacaccttcaaggacctgagcaacttcagcggggccatcaacgtgacctaccgctacctggccgccacccccctgcagaggaagcgctacctgaccatcggcctgagctctgtgaagaggaagaagggcaactacctgctggagaccatcaagagcatctttgagcagagcagctatgaggagctgaaggagatctctgtggtggtgcacctggccgacttcaacagctcctggagagatgccatggtgcaggacatcacccagaagtttgcccaccacatcatcgccggccgcctgatggtgattcatgcccctgaggagtactaccccatcctggatggcctgaagaggaactacaatgaccctgaagatagagtgaagttccgcagcaagcagaatgtggactatgccttcctgctgaacttctgtgccaacaccagtgactactacgtgatgctggaggatgatgtgcgctgcagcaagaacttcctgacagccatcaagaaggtgattgccagcctggagggcacctactgggtgaccctggagttcagcaagctgggctacatcggcaagctgtaccacagccatgacctgccccggctggcccacttcctgctgatgttctaccaggagatgccctgtgactggctgctgacccacttccggggcctgctggcccagaagaatgtcatccgcttcaagcccagcctcttccagcacatgggctactacagcagctacaagggcacagagaacaagctgaaggatgatgactttgaggaggagagctttgacatcccagacaaccccccagccagcctgtacaccaacatgaatgtgtttgaaaattatgaggccagcaaggcctacagctctgtggatgagtacttctggggcaagccacccagcactggagatgtgtttgtgattgtgtttgagaaccccatcatcatcaagaagatcaaggtgaacacaggcacctag

SEQ ID NO: 175123 - DNA, 1437 bp, Artificial Sequence
  derived and/or modified sequence
atgttcaagttccaccagatgaagcacatcttcgagatcctggacaaaatgcggtgtctgcgcaagcgaagcacagtatcattcttgggcgttctggtgattttcctcctgttcatgaacctttatattgaggactcatatgtgctcgagggagacaaacaattgatccgcgagacctcaactcatcagctcaactccgaacgctatgtgcacacgtttaaggatctttcgaacttcagcggcgctataaatgtgacctaccgttacctggcagctacgcccctacagagaaaaaggtatctgacaatcggcctcagtagcgtgaagagaaagaagggcaactacctccttgaaacaattaaatcaatttttgagcaaagctcctacgaagagctgaaggaaatttctgtcgtggtgcacctggcagattttaactcaagctggagagatgccatggtgcaggacatcacacagaagttcgcccaccacatcatcgcaggtagactaatggtcatacacgccccagaagaatactacccgatcttagacggactgaagcgcaattacaatgatcccgaggatcgggtgaaattcagatctaaacagaatgttgactacgccttccttctgaatttttgcgccaataccagcgactattacgtgatgctggaggacgatgttagatgttccaaaaacttcctgactgcaattaaaaaagtaatcgcatccttggaagggacatattgggttacattagaatttagtaagctaggttacattggaaagctgtaccactcacacgacctcccccggctggcccacttccttctaatgttctaccaagagatgccgtgtgattggttattaacacacttcaggggactgctcgcccagaaaaacgtgatcaggtttaaaccgagtctgttccagcacatgggatactatagctcctacaagggaacagaaaacaagctgaaagatgacgactttgaagaagagtccttcgacatcccagataatccaccagcatctctatataccaacatgaatgtttttgaaaattatgaggccagcaaggcctatagctcagttgatgaatacttctggggcaagcccccgtcaaccggggacgtgttcgttatcgttttcgagaacccaatcattatcaagaagattaaggtaaatactggaacggaggaccgccagaatgatatcctgcatcacggagcactggacgtgggggaaaatgttatgccgtctaagcaacgacgacagtgctccacgtaccttcggctcggggaattcaagaacgggaactttgaaatgagcggagttaatcaaaagattccctttgatattcactgcatgcgaatttatgttactaagactcagaaggaatggttgatcatccgctctatcagtatctggacaagttag

SEQ ID NO: 175124 - DNA, 1197 bp, Artificial Sequence
  derived and/or modified sequence
atgttcaagttccaccagatgaagcacatcttcgagatcctggacaagatgcgatgtctgagaaagcggtctacagtgtctttccttggggtgctggtcattttcttactttttatgaatctctacatcgaagactcatacgtgctagagggagataagcagctgatacgtgaaaccagcacccaccaacttaactcagagagatacgttcacacctttaaggacctgagcaacttcagcggagctattaatgtgacataccggtatctcgcggcgactccactgcagcgaaagaggtacctgacaatcggcttgtcctctgtgaagcggaaaaagggcaattatctgcttgagaccatcaagtcgatattcgaacagagcagctacgaggagttgaaagagatatccgtggtggtgcatctcgccgattttaactccagctggagagatgcaatggtgcaggatatcacacaaaaattcgcccatcacataattgccgggcggctgatggttattcacgccccagaagagtattacccaatcctcgatggactaaagagaaactacaacgaccctgaggacagagttaagttccgaagcaagcagaacgttgactatgcctttttactgaacttctgcgcaaataccagcgactactatgtcatgctggaggacgacgttcggtgttctaaaaactttctgaccgccattaaaaaagttattgccagtctggagggcacgtattgggtcacccttgaatttagcaagctcggctacatcggaaagctctaccactctcatgatttaccacgactcgcccatttcctgctcatgttctaccaggaaatgccctgtgactggctcctcacacattttcgggggctattggcccaaaagaacgttatccgatttaagccatcactgttccagcacatggggtattattcatcttataaagggactgaaaataagctgaaggatgacgacttcgaggaggaaagtttcgatattcccgataatccccctgcctcactctacaccaacatgaatgtgttcgaaaattacgaagcttcaaaggcctactcatccgtcgacgaatacttctggggcaaacccccttcaacaggtgacgtctttgttatagtgttcgaaaatcccattatcattaaaaagatcaaagtcaacactggaacatag

SEQ ID NO: 175125 - DNA, 1437 bp, Artificial Sequence
  derived and/or modified sequence
atgttcaagttccaccagatgaagcacatcttcgagatcctggacaaaatgaggtgcttgagaaagcgctccacagtgtcatttctgggggtgctggtgatcttcctgctgtttatgaacctctacattgaagacagttacgtgttagaaggagacaaacaacttataagagaaacttcgacccaccaactcaacagtgaaaggtatgtgcataccttcaaggacctttctaatttctcaggagctatcaacgtaacatatcgctacttagccgcgactccgctccaaaggaagcggtacctgactatagggctgtcctctgttaagcgcaagaaggggaactaccttttggagaccatcaagtccattttcgagcaatcgagttatgaagagttgaaagagatctctgtggtggtccatctcgcggatttcaattcctcttggagggacgctatggtccaggatatcactcagaagttcgctcaccacattatcgccggccgcttgatggtcattcatgcccctgaggagtactaccctattctcgacggccttaagcgaaattataacgatcccgaggaccgcgttaaattcagatctaaacagaacgttgactatgccttcctgctgaatttttgcgccaacactagtgactactacgtgatgctagaagacgacgtgcgatgctccaagaatttcctcaccgctataaaaaaggttatcgcctcgctagagggaacctattgggtaacactggaattctcaaaactgggatacataggcaaactttatcacagccatgatctaccaaggttagctcacttcttacttatgttctaccaggaaatgccgtgtgattggcttctcacacactttagaggactactggcccagaaaaatgttattagatttaaacctagtctttttcagcacatgggttactactccagctacaaggggactgaaaacaagctgaaggatgatgacttcgaagaagagtctttcgacataccagacaacccgcctgcatccctttatacaaatatgaatgtgttcgaaaactatgaagcgtccaaggcctatagttccgtggacgaatacttctgggggaagcccccctctacgggggacgtgttcgtcattgtcttcgaaaaccccattataattaagaaaattaaagtgaatacaggcactgaagacagacagaacgacatcctgcatcatggggcactcgacgttggcgagaatgtgatgcctagtaagcaaaggaggcagtgcagtacctacctgcgcctgggcgagttcaaaaatggaaatttcgagatgtctggggtgaaccagaagatcccctttgatattcattgcatgcgtatctacgttacgaagacccagaaggagtggctgatcattcggagcatctccatctggacttcgtag

SEQ ID NO: 175126 - DNA, 1437 bp, Artificial Sequence
  derived and/or modified sequence
atgttcaagttccaccagatgaagcacatcttcgagatcctggacaaaatgcggtgcctgcgcaagcgatccaccgtgtcgttccttggagtactagtgatttttctcctttttatgaacctgtatatcgaggactcctacgtgctagaaggagacaaacaactaattcgcgagacgagcacacatcagctgaatagcgaaaggtacgtccacaccttcaaagatctgtcaaatttctccggggctataaacgtgacctataggtatcttgctgctacccctcttcagcgcaagaggtacctcactattggcctcagttcagtcaaacgtaagaagggcaattatcttttggagaccatcaaatccatcttcgaacaaagttcttacgaagaacttaaggaaatcagtgttgtggtgcacctggcagactttaattcctcttggcgggatgccatggtgcaggacatcacccagaaatttgctcaccacatcattgctggccgcctaatggttattcacgcgcccgaggaatattatccaatcttagacggattgaaacggaactataacgatcctgaggaccgggtgaaattccgatcgaaacagaatgtggactacgctttcttactcaacttttgtgccaacacgagtgattactacgtaatgctcgaagatgacgtgcgctgctccaaaaacttcctgacagcaatcaaaaaagttattgctagcctggaaggtacatactgggttactttggaatttagcaaactgggctatataggcaagctttatcattctcacgatctccctagattagctcactttcttttgatgttctatcaggagatgccttgcgattggctcctgacgcatttccggggcttgctggctcaaaagaacgtcatccggtttaaaccttctctcttccagcatatgggatattattcctcttacaaggggaccgagaataagttgaaggacgatgattttgaggaggagtcgtttgatatcccagacaacccccccgcctctttgtataccaacatgaacgtgttcgagaactatgaggccagtaaggcttatagttccgtggacgaatacttctggggtaaaccccccagcactggggacgtatttgtcatcgtctttgaaaatccgattattatcaagaaaataaaagtcaacacgggcactgaggaccgccagaacgatatcttacatcacggagctttggatgtgggagaaaacgtgatgcccagcaaacaaagaagacagtgtagcacttacctgcgcctaggggagtttaaaaatggaaacttcgaaatgagcggtgttaaccaaaaaattccgtttgatatccactgtatgcggatttatgtaacgaagacacagaaagaatggctcataatcaggtccattagcatctggactagctag

SEQ ID NO: 175127 - DNA, 1437 bp, Artificial Sequence
  derived and/or modified sequence
atgttcaagttccaccagatgaagcacatcttcgagatcctggacaaaatgcgctgccttcgcaaaaggagcacagtgagtttccttggggtactggtgatctttctactctttatgaacctctatattgaagactcttacgtgcttgaaggagataaacagctgattcgggaaacatctactcaccagctgaactctgagcgctatgtccacaccttcaaggacctgagcaacttttcaggcgcaatcaatgtgacctatcggtaccttgctgccacaccactgcaaaggaagcgatatttgacaattggactgtcaagcgtgaaaagaaaaaaagggaactacctgctggagactatcaaatcgatctttgagcagtcgagctacgaagagttgaaggagatctccgtcgttgtacacctcgcggattttaatagtagttggcgagatgccatggtgcaagatattacccagaagttcgcccaccatatcattgccggtcgtctgatggttattcacgcacctgaagaatattatccaattctagacgggctgaagaggaattacaatgacccagaggaccgcgtcaaattccggtccaagcaaaacgtggattacgcattcttgttaaatttctgcgccaatacgagcgactattacgtcatgttggaggatgacgtgagatgtagtaagaacttcctgacagccattaaaaaagtgatcgctagcctcgagggcacttattgggtgacactggaatttagtaagttggggtatattggaaagctgtaccatagccatgacctcccacgcctcgcccattttctgctgatgttctatcaagaaatgccctgcgattggttgctcacacattttagaggcctgcttgcacagaaaaatgtgatcaggttcaagcctagcctgtttcaacatatggggtattactcaagctataaaggcacggaaaataagctaaaggacgatgatttcgaagaggaaagctttgatattcccgacaaccccccagcgagtctgtacacaaacatgaacgtttttgagaactacgaagcctccaaagcatattcttccgtggatgaatatttttggggcaagccacctagtacgggcgatgtgttcgtcatagtgtttgagaaccctattattattaagaagatcaaggttaatacaggcactgaagacaggcagaatgacattcttcaccacggggcactggatgttggagagaacgtcatgcccagcaaacagaggcggcagtgcagtacctatttgcggttgggcgaattcaaaaacggcaattttgagatgtcaggcgtcaatcagaagatccccttcgacattcactgcatgagaatctacgtaaccaaaacgcagaaggagtggctgatcatcagaagcattagcatctggacatcatag

SEQ ID NO: 175128 - DNA, 1437 bp, Artificial Sequence
  derived and/or modified sequence
atgttcaagttccaccagatgaagcacatcttcgagatcctggacaaaatgcgatgtctcagaaagagaagcacagtcagtttcctaggggtgcttgtaatttttttgttgttcatgaacctatacattgaggactcttacgtgttggagggggataagcagttgattagggagacatccactcaccagctgaatagtgagagatacgtgcacaccttcaaagacttgagcaacttcagcggagctattaacgtcacatacaggtacctcgccgccacccctctccagcgcaaacgttatctgactattggcttatcttcagttaaaagaaagaaaggtaactacctactggagacgattaagtctatcttcgagcagagcagctatgaagaactgaaagaaatctctgtggtggtccacctcgccgactttaactccagttggcgtgatgcaatggtacaggacattacccagaaatttgcccatcacatcatagcaggaagacttatggtcatccacgcgccagaggaatactatcccatcttggatggtttgaagaggaattataacgatccagaagaccgcgtgaaatttcgcagcaaacagaacgtcgattacgcatttctgttaaacttctgtgctaacacaagcgactactacgtgatgctagaggacgatgtcaggtgctcaaagaactttctgaccgcgattaagaaagtgatcgcctccctagagggcacctactgggtgacactggagttcagcaaactcggctatattgggaagctgtatcactcccatgacttgcccagacttgcccacttcttgttgatgttttatcaagagatgccatgcgattggctgttaacacatttccgagggcttctggcccagaaaaacgtcattcgtttcaaaccttccctctttcagcacatgggatactactcgagctacaaaggcacagaaaacaaactcaaggatgatgacttcgaggaagaatcgttcgatatacctgataaccctcctgcctcgctgtatactaacatgaatgtattcgaaaactacgaggcaagcaaggcctactctagtgtggacgaatatttttgggggaagccccctagtacaggagatgtctttgtgattgtctttgagaatcccattatcattaaaaaaatcaaggtgaatacaggaacagaggatagacagaacgacattcttcaccatggcgccctagacgtcggagagaacgtcatgccttctaaacaaagacggcagtgctcgacttatcttaggcttggcgagttcaagaatggaaactttgagatgtccggggtgaaccagaaaattcccttcgatattcactgcatgaggatttacgtgaccaagacccagaaagagtggctgatcatccggtcaattagcatctggacatcatag

SEQ ID NO: 175129 - DNA, 1437 bp, Artificial Sequence
  derived and/or modified sequence
atgttcaagttccaccaaatgaaacacatcttcgagatactcgataaaatgcgctgtttgcgcaagagatcaacagtgagcttcttaggggtgttggtgatctttttgttgtttatgaatctgtatatcgaggatagttatgtattggaaggagacaaacaactgatccgcgagacgtctacgcaccagctgaacagtgagaggtacgtgcataccttcaaggatctatccaatttttcaggggcaatcaatgtgacctacagatatttggccgctacacctctgcagaggaagcgttacttgaccatcggtttgtcgtccgtgaagagaaagaaggggaactatctgctggaaaccatcaagtccatctttgagcagtcttcgtacgaagaactgaaagagatctcggtggtggtacacctggccgactttaactcttcttggagggacgcaatggtgcaggacattacacagaagtttgcacaccatatcatcgctggtcggctcatggttatccatgctcccgaagaatattacccgatcctggacgggctgaaaagaaattacaatgaccctgaggatagggttaagttccgctccaagcagaacgtcgactacgcttttcttctcaatttctgtgccaatacatctgactattacgtgatgctcgaggatgacgtgcgttgctcaaagaacttcctcaccgctatcaaaaaggtaatagcttcccttgagggaacctactgggtgacccttgagttttcaaagcttggctacatcggaaagctataccatagccatgacctgcccaggctcgctcacttccttttgatgttctaccaggagatgccctgcgactggcttcttacgcacttccggggactcttggcgcagaaaaatgttataagatttaaaccttctttgttccaacacatggggtactactccagttataaggggactgaaaataaacttaaagacgatgatttcgaagaagaaagttttgatattccggataatccaccggcttccctgtacaccaatatgaacgttttcgagaattatgaggcctcaaaggcatactccagtgtggacgagtacttctggggcaagcccccatccaccggagacgtgttcgtaattgtgtttgaaaaccctataatcataaagaagatcaaggtcaacaccggcactgaggatagacagaatgacatcttgcaccacggcgctctggatgtgggggaaaatgtcatgccgtctaaacagcgccgacagtgttccacctacctccgcttgggtgaatttaagaatgggaactttgagatgtcaggcgtgaatcagaagatcccttttgatattcactgcatgcgtatctacgtgactaagacccagaaagagtggttgattataaggtcgatttcgatatggacgtcctag

SEQ ID NO: 175130 - DNA, 1197 bp, Artificial Sequence
  derived and/or modified sequence
atgtttaaattccaccaaatgaagcatatcttcgagatcctggacaaaatgaggtgtctgaggaaaaggtcaactgtgtcttttttaggggtcctggttatttttttgctgttcatgaatctgtacatcgaggattcttacgtactggagggggataaacaactcataagagagaccagtacccatcagttaaatagtgagaggtacgtccatacttttaaggacctgagcaatttttcgggcgcaattaacgtgacttatagatatctggccgctacgcctctgcaacggaagcggtatttaacgatcggcctttcatctgtgaaaaggaagaaaggcaattacctcctggagacaatcaagagcatcttcgagcaatcatcttacgaggagcttaaggagatctctgtagtggtacatttggccgatttcaactcgtcatggcgcgatgctatggtacaggacattactcagaagtttgcacaccacattattgccggtagattaatggtcatccacgcccctgaagagtactaccccatcctggatggacttaaacgcaattacaacgaccccgaagacagagtgaagtttagaagtaaacagaacgtcgactacgcgttcctgcttaatttctgcgccaatacctccgattactatgtgatgcttgaggatgatgtgcggtgtagtaaaaatttcctgacagcaatcaagaaggtgattgctagtcttgagggcacatactgggtcacacttgagtttagcaagctcggttatatcggaaagctctaccacagtcacgatctccccagactcgcacactttctcctcatgttctaccaggagatgccctgtgattggctgcttactcacttccgcggattactggcacaaaagaacgttatccggttcaagccatccctgtttcagcacatgggctactattccagctataaggggacggagaacaagttaaaagacgatgattttgaggaagagtccttcgacatccctgacaatcctccggcttcactctacaccaacatgaacgtgttcgaaaattacgaggccagcaaggcttacagcagtgtggatgaatacttctggggtaaaccgccttcgacaggtgacgtgtttgtgatagtgtttgagaaccccatcatcatcaagaagatcaaggtgaacaccgggacatag

SEQ ID NO: 175131 - DNA, 1437 bp, Artificial Sequence
  derived and/or modified sequence
atgttcaagttccaccagatgaagcatatattcgagatcttggataagatgagatgcctaaggaagcggtccactgtgagttttctgggcgtgctcgtgattttcctactattcatgaacctgtacatcgaggacagctacgtactcgaaggcgacaagcagctgatcagagaaacgtccacccatcagctgaacagcgagaggtacgtgcatacctttaaagacctatccaatttttccggggctattaatgtgacatatcgctatctggctgccacgccgcttcagcggaaaagatacttgactataggactctccagcgtgaaaagaaaaaagggcaactacctgctcgagacgatcaagtccatctttgaacagtcttcttatgaggagctgaaggaaatctccgttgtggtgcacttggctgatttcaatagcagctggagagatgctatggtgcaggatattacccagaagttcgctcaccacattatcgccggacgattgatggtgatccacgcgcctgaagagtattacccgatactcgatggactgaaaagaaattataacgatccggaagatagagtgaagttccggtccaaacagaatgttgactacgccttcctgttgaatttctgtgctaacacctctgattactacgtcatgctcgaggatgacgtgcggtgcagcaagaatttcctgacggccatcaaaaaagttattgcgagtcttgagggaacttattgggtgacacttgaattttctaaactgggctatatcggcaagctgtatcattcacacgacttgccaagactagctcacttccttctcatgttttatcaggagatgccttgtgattggctattaacccacttcaggggacttttggcgcaaaagaatgtgatccgattcaagcccagcctgtttcagcatatgggttattatagctcctacaaaggcactgagaataaactcaaagacgacgactttgaagaagaaagtttcgatatccccgacaatccaccagctagtctgtacactaatatgaatgtgttcgaaaattacgaggcgtcaaaagcttattcctctgtggacgagtatttctggggcaaacctcctagcacaggtgacgtgttcgtgatcgtcttcgagaacccaatcatcatcaaaaaaatcaaagtcaacaccggaactgaggacaggcagaacgacatcctccaccatggcgctctcgatgtgggggagaacgtcatgccatctaagcagcgtagacaatgtagcacttaccttaggctcggcgaattcaagaacggcaattttgaaatgagtggagtcaatcaaaaaatccccttcgacatacattgcatgcgaatttatgtaactaagacccagaaggagtggctgatcatcaggtccatatccatatggacgagctag

SEQ ID NO: 175132 - DNA, 1437 bp, Artificial Sequence
  derived and/or modified sequence
atgttcaagttccatcagatgaagcatatctttgagatactcgacaaaatgcgctgcctgcgcaaacgaagcactgtcagctttctcggggtactagttatcttcctgcttttcatgaatctatacattgaggactcatacgtgcttgagggagacaagcaattgattcgggagacatccactcaccaacttaattctgagcgatacgtgcataccttcaaagacctgagtaattttagtggtgctatcaacgtgacatatagatatcttgctgcgactcccttgcagcggaaacgatacctgaccatcggcctaagcagtgttaaaagaaagaaggggaattatctcctggagacgattaaaagtatcttcgaacagtcatcatatgaggaactcaaggaaatatctgtcgtagttcacctggcagattttaacagctcgtggcgggatgctatggtacaggacatcacccagaagtttgcccaccatatcatcgctggtcggctgatggttatccacgctcccgaggagtattatccaattctcgacggcctcaagcggaactacaacgaccccgaagatagggtcaaatttaggagcaaacagaacgtagattatgctttcctcctgaacttctgtgccaatacctcagattactacgtgatgctcgaagatgacgtgcggtgttccaagaactttcttactgcgatcaaaaaagtaattgcaagtctagagggcacctactgggtgacgctcgaatttagcaaactgggctatatcggcaagctctatcactcccacgacctgccaaggctcgcgcatttcctcctgatgttttaccaggaaatgccttgtgattggctcctaacccactttaggggccttttagcgcaaaaaaatgtaattcggttcaaaccaagcctcttccagcatatggggtactactcttcttacaagggcaccgaaaataagctcaaggatgacgatttcgaggaagaaagcttcgatattccggataatcctccagcctccctctacactaatatgaacgtgttcgagaattacgaggcctccaaagcctactcgtccgttgacgaatacttttggggcaagcctccttccaccggcgatgtatttgttatcgtctttgaaaaccccataattatcaagaaaattaaggtgaacaccgggacggaggatagacagaacgatatcctgcaccacggcgctttagatgtgggcgaaaatgtcatgccatccaagcagaggaggcagtgcagcacgtatctgaggctgggggaatttaagaatggaaattttgagatgtccggcgtgaatcagaaaatcccctttgacatacactgcatgagaatttatgtcaccaagacacaaaaagagtggctcattattagatctatctcgatatggacgagttag

SEQ ID NO: 175133 - DNA, 1437 bp, Artificial Sequence
  derived and/or modified sequence
atgtttaagtttcatcaaatgaagcacatttttgagattcttgataaaatgcgatgtcttcgcaaaaggtctaccgtttccttcctaggggtgttagtgattttcctactgttcatgaatttatatatagaggactcatacgtccttgagggcgacaagcagctaattcgtgagacctctacacatcaactgaacagcgaaagatatgtgcacacctttaaagacttatctaacttttctggcgctatcaatgtcacttacaggtacctggcggctacacctctgcagagaaagcggtacctgacgatagggctgtcgtctgtgaagagaaaaaagggcaactacctgctggaaacaattaagtctatcttcgagcagtctagctatgaggaactgaaagagatctcggtagtagtacaccttgctgacttcaattctagctggcgggacgctatggtacaagatattactcaaaagtttgctcatcacatcatcgcagggagactcatggtgatccacgcccctgaggagtattaccccatactggatggactgaagcgaaactacaatgatccggaggatagggtaaagtttcggtctaaacagaatgtcgattatgctttcttgctcaacttctgtgcaaacacctcagactattacgtgatgctggaagatgatgtgaggtgcagcaagaattttctgactgccatcaagaaagtgatagcaagtctggaaggaacctattgggtgaccctggagttctcaaagctgggctacatcggtaaactataccattcacatgatctgcctcgactcgcccatttcctccttatgttttaccaggaaatgccctgtgattggcttttgacccacttcaggggactcctcgctcagaagaacgtgatacgctttaagccatcactattccagcacatgggctactattcttcttacaaaggcacagagaataaactgaaagatgatgatttcgaagaggagagctttgatatcccagataacccaccggcatctctgtacacaaacatgaatgtgtttgaaaattacgaggcctccaaggcctattcttctgtcgacgagtacttctggggcaaacctccatccacgggcgacgtcttcgtaatcgtgtttgagaaccctattataattaagaagatcaaagtgaacactggcactgaggatcgacagaatgatattctccaccacggcgcattggacgtcggcgaaaacgtgatgccctctaagcagagacgccagtgctcaacctacctgcgcctcggggagtttaagaacggcaacttcgagatgtcaggggtaaatcagaagatacccttcgacattcactgcatgcgcatttacgtcaccaagacacagaaggaatggctgatcatcaggtctatttcaatctggacatcttag

SEQ ID NO: 175134 - DNA, 1437 bp, Artificial Sequence
  derived and/or modified sequence
atgtttaaatttcaccagatgaagcacatcttcgaaatcctggacaaaatgcgctgcttgcgaaaacgctctactgtgagctttcttggggtcctcgtcatctttcttctcttcatgaacctttatatagaggatagctatgttctggaaggtgacaagcaacttattagggagacaagtacccaccagttgaactctgagagatatgtgcacacatttaaggaccttagcaatttctctggtgctattaacgtgacctacagatatctggccgcaaccccactgcagaggaaacgttatctcaccatagggctctccagcgtgaaacggaagaaggggaactatctcctagaaaccatcaagagcatttttgagcagtcaagctatgaggagctcaaggaaattagtgttgttgtccatctggcggacttcaacagctcctggcgtgatgccatggtgcaagacattactcagaagtttgcacaccacatcatcgcaggacggctgatggtcatccacgctcctgaggaatactatcccattctggacggactaaagaggaactataacgatccggaggaccgcgtaaagttcaggtcaaagcagaacgtcgattacgctttcctgctcaacttctgcgcgaacacgagtgactactacgttatgctcgaagatgatgtgcgatgctctaaaaactttctaactgctatcaaaaaggtaatcgcctccctcgagggcacgtattgggttacactcgaattctcaaaattgggctacatcggtaaactgtatcacagccacgatctaccacggcttgcacattttctgctcatgttttatcaggagatgccgtgcgattggttgctaacccacttcaggggtctgcttgcacaaaagaacgtgattcggttcaaaccaagcctattccagcacatgggctactatagctcctacaagggtacggagaacaaactaaaggatgatgattttgaggaggaatctttcgacatcccggacaatccgcctgctagcctgtatacaaacatgaacgtgtttgagaattatgaagcctcgaaagcatactcttctgtggacgaatatttctggggcaagccacccagcactggggatgtctttgtcatagtgtttgaaaacccaatcatcattaagaagattaaggtaaacaccggaaccgaagaccggcagaatgatattcttcaccacggagccctcgatgtcggagagaacgttatgcctagtaaacagaggcgccagtgttcaacataccttagattgggcgaatttaagaatgggaacttcgagatgagtggtgtcaaccagaagattccctttgatatccactgtatgcgcatatatgttaccaaaacacagaaggaatggctcatcattcgatcaatatctatatggacgagctag

SEQ ID NO: 175135 - DNA, 618 bp, Artificial Sequence
  derived and/or modified sequence
atgagcttcgccaccaagttcagcgactacttcctgctgatcgaggacaacgtgttcttcgcccccaacttcgtgacccacatccacagcagagtgaccaccatgaagagcaacagctgggtgctgatggagttcagcaacatgggcttcctgggcaagctgttccacagcagagacctgcccctgctggcccacttcctgctgctgttctacaaggagaagcccctggacagcctgatcagccacttccacaccctgctggtgcaggagagccccatcctgtgcagacccttcctgttctactgcagagtgagctacaccgccttcgaccacaagcagaaggccaccgccctgcagaagaagaacgccgacggccccaacaacccccccggcgccgtgttcaccgacatgcaggtgagcgacgtgcacttcccctgggaggcctacaccctggacgagagcttcttctggacccacaacatcagcatcggcaaccacctgaccgtgatcctgaaccaccccgccaacctgagcagagtgcaggtgatgaccggcagcatcgtggagtgggaggtgagacccggcgagggcgccggcggcgccggcctgcccacctag

SEQ ID NO: 175136 - DNA, 618 bp, Artificial Sequence
  derived and/or modified sequence
atgtcgtttgccactaagttcagtgactatttcttgctcatcgaagacaacgtgtttttcgcgcccaattttgtcacacacattcactccagagttaccacaatgaagtcgaatagttgggtgctgatggagttcagtaatatgggcttcttgggcaaactatttcatagtagggacctgcctctgctggctcattttctgctgcttttctacaaggagaagcccctcgactcactcatatcccattttcacactttgctggtgcaggagtcaccaatactatgcaggccttttcttttctattgccgtgtgagttataccgccttcgatcataaacagaaggcgacagccctccagaaaaagaatgccgacggcccaaataatccccccggcgctgtttttaccgatatgcaggtgagtgatgtgcacttcccctgggaagcatatactttggacgagagttttttttggactcataatatatcgattggaaaccatttgactgtgattctgaatcatcctgccaaccttagtcgtgttcaggttatgaccggtagcattgtggaatgggaagtccgtccgggagaaggggctggcggggccggactgccaacatag

SEQ ID NO: 175137 - DNA, 618 bp, Artificial Sequence
  derived and/or modified sequence
atgagttttgcaactaaattttccgactatttcttacttatcgaggacaacgtcttcttcgcgccaaacttcgtaacccatatccacagccgggtgactaccatgaagtctaactcgtgggttctgatggagtttagcaacatgggattcctcggtaaactattccactcccgcgatctaccactgctggcccactttcttctacttttctacaaggaaaaaccgcttgactccctgatttcacatttccatacattgctggtccaagagagtcccattctctgtcggccgttcctgttttattgcagagtttcctataccgcgttcgatcacaagcagaaagctaccgctctgcagaaaaaaaatgcggacggtcctaataatccacctggcgctgtgtttaccgatatgcaggtcagtgacgtgcacttcccctgggaagcatacaccctggacgaaagcttcttttggacccacaacatatccatcggaaatcacctgacggttattcttaatcacccagctaacttatcacgggtgcaggtgatgaccggttctatcgtagagtgggaagttaggccaggagagggtgccgggggcgcaggcctgccaacgtag

SEQ ID NO: 175138 - DNA, 2810 bp, Artificial Sequence
  derived and/or modified sequence
ggtccttatcaccccagctcctttttgtttttctgtctcctgccttttccagaagtctgttgaactcaaagggctgaatgacagcagtcttccctccgtgactgggaaactacacgggaggaaccgtatcctgacgcagacgcgatgcggtgttccatcaggaaatgcttcatactctcagtgggcatcgtattcctgtggcccttcatcactttgaaaatccccaaggaaactgaagatgatcaaaatgtgatgactgtcaaaggccaagtagcaagccttgagccttgctcagtttgggaactgggaatatagggtggaaatggtgtggacaggcagattctggaaagcccctgggctttcttccttcctgaccttttcacctgagagcaggaagctccaaagggaatgggggtatggacctgggcctattagtccatgaagaagctgtatttattttccttattcgttaaggtaaagaagacagcaaatactgcttgagccctggatattttagccaatggccaggcatcctgagaatgtgccaggctcactctagggagaatggttcactccacctctttccctagaaaagcttatgggaagccactggggtgtaaaatttgttctttttatgaaaggatatatatgtttgcccttgtcaatgcccccggaggccagttataacagccggaaggacccaagatcactagaagactggcagaacctcaccttcaaatatatggaaaaaatccagaagagaagaaagacatggctgacagtggggaatctcatcagtgcagcaaggggatggaagcagcctcttgtacacattggtctccctgttccgtgtttcttctaaggctgagcagaaacgtctcacggtgctggtccacctggcagattctgacctcacctggctcagagaaactcttgcccatatttcaagcctcttcagcccacagatcttgaaagggcagttgctactgatccatgcttcatccgatgcctaccccactgtggagagcatcagggatgaggcctttcatggcgaattctactccaagcagaacgtagatcatgccttcctcatgagctttgccacaaagttctctgattacttcctgttaatagaggacaatgtcttttttgcccccaactttgtcacccacattcattcaagggtgaccaccatgaagtccaactcgtgggtgctaatggagttctccaatatgggcttccttggcaaactcttccacagcagggacctcccactcctggcccatttcctccttctcttctacaaggagaaaccccttgacagcctgatttctcatttccatacgctcctggtccaggaaagcccaatcctctgcagacctttcctattctactgcagggtctcctacactgcctttgatcacaagcagaaggccacagcacttcagaaaaagaatgccgatggtcccaacaacccgcctggagctgtcttcactgatatgcaggtttccgatgtgcatttcccctgggaggcctacactctggatgagtcattcttttggacacacaacattagtataggaaaccacctgacagtgattctgaaccatccagcaaacctgagcagggtgcaagtgatgacgggctccattgtggaatgggaggtacgccctggagaaggggcaggtggagctgggctaccaacctgagggggtgccgcagcactgcaccagcttcgccttgctgggacatctttcggaggggcagatggatcagaagatacttctgaaaggtatggggtaccacgtgagctgtgtgaggctggtggtgaaagctggtcaggctggggggctcatgatcaggcatatctacctctgggagaaaaatgacaaatagcaagtggatcaatgctgaagataaatcagtagggggatgaaaaattaaaatcttaaagccacttcattctagtctatatgagtgacataggggagacacaatggaatgaagggcagacagagaagactatcagtctgttggtgccgccaagatgtcaggagacttgttgcttcctttctatccaaacaactctcataggatatcttttgctgtggcatatatagcttatccgaatttggggagagttttggtcactcccaaaatatttagatacctgggatgctgagatcagcccaaatcaaggtgtccctgtgtatacatgcgtgtgcatgtatgcacttctatgttcacacggaggcagaggtggggatgaggtatgtggtcacaggagggcaggcaggaaaatcacggctgaatccctagaattgacatcataaaaagccatgaaagggactctcattagaagttaaaatctccgaagtgcaggaaagtagcagatggacaaatagcaataaaacgaatcccttagctctattattgaagctgtttcacagtgccaatctagttccctcctttcctccccaacaaacttgggcacaaataggttttaactaggctgggtatggtggctcatgccagtaattgcagcctcccttaggaggctgaggtgggaggatctcttgaggccagcagttcaagaccaacctaggcaacacggcaagaccctgtctccacaaaaaattaaaaagttagccaggttgtggtggcatgtgcctgtggtcctagctactcaggaggctgaggcaggaggatcacttgagcccaggaggttgaggctgcagtgagccatgattatgccattacactccagcctgggcaacagcgtaagaccctgtctccaaaaaaaaaaaaaa

SEQ ID NO: 175139 - DNA, 2394 bp, Artificial Sequence
  derived and/or modified sequence
gaaccgtatcctgacgcagacgcgatgcggtgttccatcaggaaatgcttcatactctcagtgggcatcgtattcctgtggcccttcatcactttgaaaatccccaaggaaactgaagatgatcaaaatgtgatgactgtcaaaggccaagtagcaagccttgagccttgctcagtttgggaactgggaatatagggtggaaatggtgtggacaggcagattctggaaagcccctgggctttcttccttcctgaccttttcacctgagagcaggaagctccaaagggaatgggggtatggacctgggcctattagtccatgaagaagctgtatttattttccttattcgttaagcatggctgacagtggggaatctcatcagtgcagcaaggggatggaagcagcctcttgtacacattggtctccctgttccgtgtttcttctaaggctgagcagaaacgtctcacggtgctggtccacctggcagattctgacctcacctggctcagagaaactcttgcccatatttcaagcctcttcagcccacagatcttgaaagggcagttgctactgatccatgcttcatccgatgcctaccccactgtggagagcatcagggatgaggcctttcatggcgaattctactccaagcagaacgtagatcatgccttcctcatgagctttgccacaaagttctctgattacttcctgttaatagaggacaatgtcttttttgcccccaactttgtcacccacattcattcaagggtgaccaccatgaagtccaactcgtgggtgctaatggagttctccaatatgggcttccttggcaaactcttccacagcagggacctcccactcctggcccatttcctccttctcttctacaaggagaaaccccttgacagcctgatttctcatttccatacgctcctggtccaggaaagcccaatcctctgcagacctttcctattctactgcagggtctcctacactgcctttgatcacaagcagaaggccacagcacttcagaaaaagaatgccgatggtcccaacaacccgcctggagctgtcttcactgatatgcaggtttccgatgtgcatttcccctgggaggcctacactctggatgagtcattcttttggacacacaacattagtataggaaaccacctgacagtgattctgaaccatccagcaaacctgagcagggtgcaagtgatgacgggctccattgtggaatgggaggtacgccctggagaaggggcaggtggagctgggctaccaacctgagggggtgccgcagcactgcaccagcttcgccttgctgggacatctttcggaggggcagatggatcagaagatacttctgaaaggtatggggtaccacgtgagctgtgtgaggctggtggtgaaagctggtcaggctggggggctcatgatcaggcatatctacctctgggagaaaaatgacaaatagcaagtggatcaatgctgaagataaatcagtagggggatgaaaaattaaaatcttaaagccacttcattctagtctatatgagtgacataggggagacacaatggaatgaagggcagacagagaagactatcagtctgttggtgccgccaagatgtcaggagacttgttgcttcctttctatccaaacaactctcataggatatcttttgctgtggcatatatagcttatccgaatttggggagagttttggtcactcccaaaatatttagatacctgggatgctgagatcagcccaaatcaaggtgtccctgtgtatacatgcgtgtgcatgtatgcacttctatgttcacacggaggcagaggtggggatgaggtatgtggtcacaggagggcaggcaggaaaatcacggctgaatccctagaattgacatcataaaaagccatgaaagggactctcattagaagttaaaatctccgaagtgcaggaaagtagcagatggacaaatagcaataaaacgaatcccttagctctattattgaagctgtttcacagtgccaatctagttccctcctttcctccccaacaaacttgggcacaaataggttttaactaggctgggtatggtggctcatgccagtaattgcagcctcccttaggaggctgaggtgggaggatctcttgaggccagcagttcaagaccaacctaggcaacacggcaagaccctgtctccacaaaaaattaaaaagttagccaggttgtggtggcatgtgcctgtggtcctagctactcaggaggctgaggcaggaggatcacttgagcccaggaggttgaggctgcagtgagccatgattatgccattacactccagcctgggcaacagcgtaagaccctgtctccaaaaaaaaaaaaaa

SEQ ID NO: 175140 - DNA, 618 bp, Artificial Sequence
  derived and/or modified sequence
atgagctttgccaccaagttcagtgactacttcctgctgattgaagataatgtgttctttgcccccaactttgtgacccacatccacagccgggtgaccaccatgaagagcaacagctgggtgctgatggagttcagcaacatgggcttcctgggcaagctgttccacagccgggacctgcccctgctggcccacttcctgctgctcttctacaaggagaagcccctggacagcctcatcagccacttccacaccctgctggtgcaggagagccccatcctgtgccggcccttcctgttctactgccgggtgtcctacacagcctttgaccacaagcagaaggccacagccctgcagaagaagaatgctgatggccccaacaaccccccaggagctgtgttcacagacatgcaggtgtctgatgtgcacttcccctgggaggcctacaccctggatgagagcttcttctggacccacaacatcagcatcggcaaccacctgaccgtcatcctgaaccacccagccaacctgagccgggtgcaggtgatgacaggcagcatcgtggagtgggaggtgcggcctggagagggcgctgggggcgccggcctgcccacctag

SEQ ID NO: 175141 - DNA, 618 bp, Artificial Sequence
  derived and/or modified sequence
atgagcttcgccaccaagttcagcgactacttcctgctgatcgaggacaacgtgtttttcgccccaaactttgtgacacatattcacagcagagtaacaactatgaagtccaactcttgggtattaatggagttctccaatatgggtttcctgggcaaattgtttcactcccgagatctcccactgctggcacactttctgctccttttttataaagaaaaaccactggactctctgatctcacattttcacaccctgttggtgcaagagagtcccatcctgtgtcggcctttcctcttctattgtcgggtgagctacaccgcatttgaccacaagcaaaaagccacagctttgcagaaaaagaacgccgacggcccgaataatccaccgggagccgtgtttacagacatgcaggtgagcgacgtgcatttcccatgggaggcttacactctcgatgagtcttttttctggacccataatatttccataggaaaccatctgactgtgatcctcaaccacccagctaacctgagtagagtgcaggtcatgaccggctcaatagtggagtgggaggtgcgacccggtgagggcgctgggggcgctggactgcccacttag

SEQ ID NO: 175142 - DNA, 618 bp, Artificial Sequence
  derived and/or modified sequence
atgagcttcgccaccaagttcagcgactacttcctgctgatcgaggataacgtcttttttgcccccaacttcgtcacccacatacattctcgagtgacgaccatgaaaagtaactcctgggtcctaatggagttctcaaacatggggttcttggggaagctgtttcacagccgtgacctccccctgcttgctcacttcctgctactcttctataaggagaagccactggattcacttatcagtcattttcacacactcctcgtgcaggagtcacccatcctttgtaggccctttctgttttactgcagggtctcgtatactgctttcgaccataagcaaaaggccacagccctccagaagaaaaacgctgatgggcccaacaaccctccgggcgctgtgttcaccgatatgcaggttagcgatgtgcacttcccgtgggaggcctacaccctggacgagagctttttttggacccataacatttcaatcggcaaccatctgaccgtgatccttaaccatccagcaaatctttcacgcgtgcaagtgatgacgggaagtatagtcgaatgggaggtaagacctggcgagggcgccggcggtgccggactgcccacctag

SEQ ID NO: 175143 - DNA, 618 bp, Artificial Sequence
  derived and/or modified sequence
atgtcattcgcaactaaatttagtgactacttcctcttaatcgaggacaacgtcttcttcgctcctaattttgtgacccacatacatagtcgggtgactacaatgaagagtaacagctgggtacttatggaattttctaatatgggtttccttggaaaactgtttcactcgcgcgatctccctctgttggcacacttcctgctcttattctataaagagaagcctcttgacagcctaatctctcactttcacactctgctggttcaagaatcaccaattctctgtcggccattcctcttctattgtagggtctcttacaccgcctttgatcacaagcagaaagccaccgctctgcaaaaaaagaacgcagacgggcctaataaccctcctggcgcagtgttcactgatatgcaggtgtcagacgtgcacttcccctgggaagcatacactcttgacgaaagctttttttggacccataacatttccatcggtaaccacctgacagtcatcttaaaccatcccgctaacctatcaagagtccaggtgatgacgggctcgattgtggagtgggaagtgcggccaggtgagggggcaggcggtgcagggcttccaacgtag

SEQ ID NO: 175144 - DNA, 618 bp, Artificial Sequence
  derived and/or modified sequence
atgagctttgcaaccaagttctctgactactttttattgatcgaggacaacgttttttttgcaccgaacttcgttacacatatacacagccgtgttacaactatgaaatccaactcctgggtgctaatggagttctccaacatgggatttctaggcaaactgtttcacagccgcgaccttcccttactggcccactttctgcttctcttctataaggaaaaacctctggatagcttaatcagccacttccacaccctgctcgtccaggagtccccaattctctgtcggccattcctgttttactgccgcgtctcatacaccgcttttgaccataaacagaaggctaccgcgctccagaagaagaacgctgacgggccaaacaatcccccaggcgcagtgttcactgatatgcaggtttccgatgtgcattttccttgggaagcttatacattagacgagagcttcttctggacccacaacatctctataggcaaccacctcaccgtaattttaaatcacccagccaacctgtctcgcgtacaggtcatgaccggaagcatagttgagtgggaagtaagacctggagagggcgcaggcggtgcgggactgcccacctag

SEQ ID NO: 175145 - protein, 437 aa, Artificial Sequence
  derived and/or modified sequence
MTTSTLQKAIDLVTKATEEDKAKNYEEALRLYQHAVEYFLHAIKYEAHSDKAKESIRAKCVQYLDRAEKLKDYLRSKEKHGKKPVKENQSEGKGSDSDSEGDNPEKKKLQEQLMGAVVMEKPNIRWNDVAGLEGAKEALKEAVILPIKFPHLFTGKRTPWRGILLFGPPGTGKSYLAKAVATEANNSTFFSVSSSDLMSKWLGESEKLVKNLFELARQHKPSIIFIDEVDSLCGSRNENESEAARRIKTEFLVQMQGVGNNNDGTLVLGATNIPWVLDSAIRRRFEKRIYIPLPEEAARAQMFRLHLGSTPHNLTDANIHELARKTEGYSGADISIIVRDSLMQPVRKVQSATHFKKVCGPSRTNPSMMIDDLLTPCSPGDPGAMEMTWMDVPGDKLLEPVVCMSDMLRSLATTRPTVNADDLLKVKKFSEDFGQES

SEQ ID NO: 175146 - DNA, 1314 bp, Artificial Sequence
  derived and/or modified sequence
atgaccaccagcaccctgcagaaggccatcgacctggtgaccaaggccaccgaggaggacaaggccaagaactacgaggaggccctgagactgtaccagcacgccgtggagtacttcctgcacgccatcaagtacgaggcccacagcgacaaggccaaggagagcatcagagccaagtgcgtgcagtacctggacagagccgagaagctgaaggactacctgagaagcaaggagaagcacggcaagaagcccgtgaaggagaaccagagcgagggcaagggcagcgacagcgacagcgagggcgacaaccccgagaagaagaagctgcaggagcagctgatgggcgccgtggtgatggagaagcccaacatcagatggaacgacgtggccggcctggagggcgccaaggaggccctgaaggaggccgtgatcctgcccatcaagttcccccacctgttcaccggcaagagaaccccctggagaggcatcctgctgttcggcccccccggcaccggcaagagctacctggccaaggccgtggccaccgaggccaacaacagcaccttcttcagcgtgagcagcagcgacctgatgagcaagtggctgggcgagagcgagaagctggtgaagaacctgttcgagctggccagacagcacaagcccagcatcatcttcatcgacgaggtggacagcctgtgcggcagcagaaacgagaacgagagcgaggccgccagaagaatcaagaccgagttcctggtgcagatgcagggcgtgggcaacaacaacgacggcaccctggtgctgggcgccaccaacatcccctgggtgctggacagcgccatcagaagaagattcgagaagagaatctacatccccctgcccgaggaggccgccagagcccagatgttcagactgcacctgggcagcaccccccacaacctgaccgacgccaacatccacgagctggccagaaagaccgagggctacagcggcgccgacatcagcatcatcgtgagagacagcctgatgcagcccgtgagaaaggtgcagagcgccacccacttcaagaaggtgtgcggccccagcagaaccaaccccagcatgatgatcgacgacctgctgaccccctgcagccccggcgaccccggcgccatggagatgacctggatggacgtgcccggcgacaagctgctggagcccgtggtgtgcatgagcgacatgctgagaagcctggccaccaccagacccaccgtgaacgccgacgacctgctgaaggtgaagaagttcagcgaggacttcggccaggagagctag

SEQ ID NO: 175147 - DNA, 1314 bp, Artificial Sequence
  derived and/or modified sequence
atgacaacatcaaccctgcagaaggcgatagacctggtcaccaaggccaccgaggaggataaagccaaaaattacgaggaagctctaagactgtaccagcatgccgttgagtactttctgcatgctattaaatacgaggcgcacagcgacaaggccaaggaatccatccgcgcaaagtgcgttcagtatctggatcgggccgaaaaactgaaggattatctccgttctaaggagaaacacggaaaaaagcccgttaaagaaaaccaatcagaaggaaagggaagtgatagtgactccgagggtgataaccctgaaaaaaaaaaactccaggaacagctcatgggcgctgtggttatggaaaagcctaatattcgttggaatgacgtggccgggctcgaaggcgctaaagaggctctgaaggaggcagttattctgcccatcaaatttccccatctatttacgggcaagcgcaccccctggagaggcatattactgttcggaccaccaggcacgggaaaatcctatttggccaaggctgtcgcaaccgaggctaataattcgaccttctttagcgttagctcctctgacctcatgtccaaatggcttggggaaagcgagaaactggtgaaaaacctttttgagctggcgcgacaacacaaaccgtccattatcttcatcgacgaggtggactcgttgtgcggatcaaggaacgagaacgagagcgaggctgcccggcgaataaagactgagtttctggtccagatgcaaggagtcggcaacaacaatgacggcacactggtcctgggagccacaaacataccctgggtcctagattccgcaatccgcaggcgctttgaaaagcgtatatacatccccctccctgaagaagcggcaagagctcaaatgtttcgtctgcatctgggctccactccccataaccttaccgatgctaacatccacgaattagccaggaaaacagaaggctattccggtgctgatatctctataatcgtgagagattcgcttatgcagccggtgaggaaggtgcaatctgcgacacactttaagaaggtgtgcgggcctagtaggacgaatccctccatgatgatcgacgatctgctcactccctgctcacctggcgatcctggagccatggagatgacctggatggacgtgcctggggataagctgctcgagccggtcgtctgcatgtccgacatgcttcggagtttggccacaacgcgccctacagtgaatgccgacgatcttctgaaagtgaaaaaattctccgaagactttggtcaagaaagttag

SEQ ID NO: 175148 - DNA, 1314 bp, Artificial Sequence
  derived and/or modified sequence
atgaccaccagcaccctgcagaaggccatcgacctggtgaccaaggccacagaggaggacaaggccaagaactatgaggaggccctgcggctgtaccagcacgctgtggagtacttcctgcacgccatcaagtatgaggcccacagcgacaaggccaaggagagcatccgggccaagtgtgtgcagtacctggacagagctgagaagctgaaggactacctgcggagcaaggagaagcacggcaagaagcctgtgaaggagaaccagagcgagggcaaaggaagtgacagcgacagcgagggggacaaccctgagaagaagaagctgcaggagcagctgatgggcgctgtggtgatggagaagcccaacatccgctggaatgatgtggccggcctggagggcgccaaggaggccctgaaggaggccgtcatcctgcccatcaagttcccccacctgttcaccgggaagaggaccccctggaggggcatcctgctgtttggccccccaggcaccgggaagagctacctggccaaggctgtggccacagaggccaacaacagcaccttcttctctgtgagcagcagtgacctgatgagcaagtggctgggggagagcgagaagctggtgaagaacctgtttgagctggcccggcagcacaagcccagcatcatcttcattgatgaggtggacagcctgtgtggcagcagaaatgaaaatgaaagtgaagctgcccggcgcatcaagacagagttcctggtgcagatgcagggcgtgggcaacaacaatgatggcaccctggtgctgggcgccaccaacatcccctgggtgctggacagcgccatcagaagaagatttgagaagaggatctacatccccctgcctgaggaggccgcccgggcccagatgttccggctgcacctgggcagcaccccccacaacctgacagatgccaacatccacgagctggccaggaagacagagggctacagcggggctgacatcagcatcatcgtgcgggacagcctgatgcagcctgtgaggaaggtgcagagcgccacccacttcaagaaggtgtgtggccccagcaggaccaaccccagcatgatgattgatgacctgctgaccccctgcagccctggggaccccggggccatggagatgacctggatggatgtgcctggggacaagctgctggagcctgtggtgtgcatgtctgacatgctgcggagcctggccaccacccggcccaccgtgaatgctgatgacctgctgaaggtgaagaagttctctgaagattttggccaggagagctag

SEQ ID NO: 175149 - DNA, 1314 bp, Artificial Sequence
  derived and/or modified sequence
atgaccaccagcaccctgcagaaggccatcgacctggtgaccaaggctaccgaggaggacaaggccaaaaattatgaggaggctctgcggctgtaccaacatgccgtagagtattttctgcacgccatcaaatacgaggctcattccgacaaggccaaagagagcatcagggctaagtgcgtgcagtatctggatagggctgagaaacttaaggactatctacggtctaaagagaagcacgggaagaagcccgtaaaagagaatcagtccgagggcaaaggctcggacagcgactctgaaggcgataacccagagaagaagaaacttcaagagcagctcatgggtgcagttgtgatggaaaaacccaacatccggtggaacgacgtggctggacttgaaggcgccaaagaagccctgaaggaggccgttatcctccctatcaagttcccccatttattcacaggtaaacgaaccccttggagaggaatactactctttggtcctccaggaaccgggaagtcgtacttggctaaggcagtagccacagaggccaacaactccacgttcttctcagtctcaagtagtgatctcatgtctaagtggctaggagagtccgaaaaacttgtaaagaatctgttcgaattggcaagacagcataagccttccatcatcttcatcgacgaggtagactcactctgcggatcgcgaaacgaaaatgaatccgaggctgcccgccgaatcaagaccgagttcctggtgcagatgcagggggtggggaacaacaacgacggcacattagtcctgggggctacaaacattccttgggttttagacagtgccatccggagaaggtttgaaaagcgaatctacatccctctgcctgaagaagccgcccgcgcccagatgttcagacttcacctcggtagcacacctcacaacctgacagacgccaacatccatgaactggcccgaaagaccgaaggctactccggcgctgacataagtatcattgttagggacagcctgatgcagcccgtacgcaaagtccagagcgctacccactttaaaaaggtttgcggaccctctaggactaacccatcaatgatgattgatgacctgttgacgccatgttctccaggcgatcccggcgccatggaaatgacctggatggacgtgcctggggacaagttgttagagccggtggtttgtatgtctgatatgctgcgcagccttgcaacgacaaggcccacggtgaacgccgacgatttgctgaaggtgaagaagttcagcgaagattttgggcaggaatcttag

SEQ ID NO: 175150 - DNA, 1314 bp, Artificial Sequence
  derived and/or modified sequence
atgacaacaagtactctgcagaaggcgatcgacctggtgactaaggccaccgaagaagacaaggccaagaattatgaagaagccttacgattataccagcatgccgtagagtatttcctgcacgctattaagtacgaagctcactctgacaaagctaaggagtccattagagccaaatgcgtacaatatcttgatagagcagagaagctcaaggattacctcagatccaaagagaaacacggtaagaagcccgtgaaggagaaccagagcgaagggaaaggtagcgatagtgacagcgaaggcgacaaccccgaaaagaaaaagttgcaagaacagctgatgggcgcagtagtgatggagaaacccaatatacgctggaatgacgttgcgggtctggagggagcaaaggaggcactcaaagaggcagtcatacttcccataaagttcccccacctgtttacagggaaacggacaccatggagaggtatcctgctattcggcccaccgggtaccgggaaatcttacttggcgaaagctgtcgcaaccgaggccaacaattcaaccttcttctctgtgagtagctcagatctgatgtccaaatggctcggagaatctgaaaagctggtgaaaaatcttttcgagcttgccagacaacataagccatctatcatattcatcgacgaagtggactccctgtgtggtagccgcaacgaaaacgaatcggaggcggctcgtaggattaagactgaatttctcgtacagatgcagggtgtgggcaataataatgacggaacccttgttctaggagccacaaacatcccttgggtgttggacagcgctataaggcgtaggtttgaaaaaagaatctacattcccttacctgaggaagctgcgcgtgctcagatgttccgcctacacctgggatctactcctcacaatctgactgacgcgaatatacacgagttggccaggaagacggaggggtactcaggcgcagacataagcatcatcgttagggattcactaatgcagccagtacggaaggtacaaagtgcaactcattttaaaaaggtgtgcggaccctctcgtaccaatccaagtatgatgatagatgacctcctgaccccttgttctcctggagacccaggtgccatggagatgacatggatggatgttcctggggataagctgctcgaaccggtggtgtgtatgagcgacatgctgagatctttagctacaacgcggccaacagttaacgctgacgatctgttaaaggtcaaaaagttctccgaggatttcgggcaagaatcctag

SEQ ID NO: 175151 - DNA, 2175 bp, Artificial Sequence
  derived and/or modified sequence
cctgcccgcgcaccgcgctcagcgcccaccgccgggcttcccgcgccggacccagtacctcggctccccggggccggaccgaggccgcaagcagcgccgcggggtgtggggcggacccaggagatgaaatgacaacgtcaaccctccagaaagccattgatctggtgacgaaagccacagaggaggacaaagccaagaactacgaggaggcgctgcggctgtaccagcatgcggtggagtacttcctccacgctatcaagtatgaggcccacagcgacaaggccaaggagagcattcgagccaagtgcgtgcagtacctagaccgggccgagaagctgaaggattatttacgaagcaaagagaaacacggcaagaagccagtcaaagagaaccagagtgagggcaagggcagtgacagtgacagtgaaggggataatccggagaaaaagaaactgcaagaacagctgatgggtgccgtcgtgatggagaagcccaacatacggtggaacgacgtggccgggctggagggggccaaggaggccctcaaagaagctgtcattttgccaatcaaattcccacacttgttcacaggcaagcgcaccccctggcgggggattctgctgttcggaccccctggcacagggaaatcctacctggccaaagccgtggcaacagaggccaacaactccaccttcttctctgtgtcctcctcagatctgatgtccaagtggctgggggagagtgaaaagctggtcaagaacctgtttgagctggccaggcagcacaagccctccatcatcttcatcgatgaggtggattccctctgcgggtcccgaaatgaaaatgagagtgaggccgcccggaggatcaaaacggagttcttggtccagatgcagggggtggggaataacaatgatgggactctggttcttggagccacaaacatcccatgggtgttggattcggccatcaggaggaggtttgaaaaacgaatttatatccccttgccggaggaagctgcccgcgcccagatgttccggttgcatctcgggagcactccccacaacctcacggatgcaaacatccacgagctggcccggaagacggaaggctactcgggcgcggacatcagcatcatcgtgcgggactctctcatgcagcccgtgaggaaggtgcagtcggccacacacttcaaaaaggtctgtggcccctctcgcaccaaccccagcatgatgattgatgacctcctgactccatgctcaccaggggacccaggagccatggagatgacttggatggatgtccctggggacaaactcttagagcctgtggtttgcatgtcggacatgctgcggtctctggccaccacccggcccacggtgaatgcagacgacctcctgaaagtgaagaaattctcagaggactttgggcaagagagttaaaagctgcttcacttgggcaatggtgaaggtgggaggttgattggggcaaatccaggcactccccatgtcaacagccagacagggctccagggcttgtcccagtcaatacagagttccctctgctgtctggccgtctgccagggagccagaaggaagggccttgcagccacagagacactccactgccctggggcacacagtggacactgctcttcctacttcctcctctcctggatgctcatcagctccttctgcctcccccccttttttttccatcttttgttcccctaaattaatgctgcttggattttcatcttatttataaagataaaatcacctggaagtgtcaaggagtggggcggggtggcgggggagaagcagccgtgctgccaggtcacccagacctccagacagccggctagccccactgcccgttccttttacgcccaagttttgctccttgagagcagattggctgatgcccctgcaaccccagcccaagctctgcctcaaagaccgagtgacataagccattcccaccctcctaggttcacatccagggctgtgtcttccttgggggaggagatggtgtcgtttagatcagggtaaggcagtcaggcgggtgttcaccactgccttttcttcctctgagcgtgagaacactgaacccagccactgcccctgggtccctgtcctggaaatggtctaataaatccttttcccttcttgagct

SEQ ID NO: 175152 - protein, 225 aa, Artificial Sequence
  derived and/or modified sequence
MDLRAGDSWGMLACLCTVLWHLPAVPALNRTGDPGPGPSIQKTYDLTRYLEHQLRSLAGTYLNYLGPPFNEPDFNPPRLGAETLPRATVDLEVWRSLNDKLRLTQNYEAYSHLLCYLRGLNRQAATAELRRSLAHFCTSLQGLLGSIAGVMAALGYPLPQPLPGTEPTWTPGPAHSDFLQKMDDFWLLKELQTWLWRSAKDFNRLKKKMQPPAAAVTLHLGAHGF

SEQ ID NO: 175153 - DNA, 678 bp, Artificial Sequence
  derived and/or modified sequence
atggacctccgggccggagactcatgggggatgcttgcctgcctatgcaccgtcctatggcatctgcccgcggtgcctgcccttaacaggactggagatcctgggccagggccttctattcaaaagacttacgatctcaccaggtatctggaacaccagttgagatctctcgcaggcacctatttgaattacctcgggccgcccttcaacgagcccgatttcaaccctcctcgcttgggcgccgaaaccttaccaagggctactgtcgaccttgaagtttggcgttcactgaatgacaagctccgcttgacacagaactacgaagcttacagccatctgctatgttatctcagaggcctgaacagacaggccgcaactgccgaactcaggcgctctctggcccacttctgcacatcccttcagggactcctcggcagcatcgcaggcgtcatggccgcgttaggataccctttgcctcagcctctgcctggtacggaaccaacctggacacccggtcccgcgcacagtgactttttgcagaagatggatgacttttggctactgaaagaactgcaaacttggctttggcggtccgctaaagattttaatcgtctgaaaaagaaaatgcagcccccggcggcagcggtgacactgcatttaggggcccatggcttctag

SEQ ID NO: 175154 - DNA, 678 bp, Artificial Sequence
  derived and/or modified sequence
atggacctgcgggccggggacagctggggcatgctggcctgcctgtgcaccgtgctgtggcacctgcctgctgtgcctgccctgaacagaactggagaccccggccctggccccagcatccagaagacctatgacctgacccgctacctggagcaccagctgcggagcctggccggcacctacctgaactacctgggcccccccttcaatgaaccagacttcaaccccccccggctgggcgctgagaccctgccccgggccaccgtggacctggaggtgtggaggagcctgaatgacaagctgcggctgacccagaactatgaggcctacagccacctgctgtgctacctgcggggcctgaaccggcaggccgccacagctgagctgcggcgcagcctggcccacttctgcaccagcctgcagggcctgctgggcagcattgctggggtgatggccgccctgggctaccccctgccccagcccctgcctggaacagagcccacctggaccccaggccctgcccacagcgacttcctgcagaagatggatgacttctggctgctgaaggagctgcagacctggctgtggaggtctgccaaggacttcaaccggctgaagaagaagatgcagcccccagctgctgctgtgaccctgcacctgggcgcccacggcttctag

SEQ ID NO: 175155 - DNA, 678 bp, Artificial Sequence
  derived and/or modified sequence
atggacctgcgggccggcgacagctggggcatgctggcctgcctgtgtactgtactgtggcatctcccagccgttccagctctaaataggacaggagatcccgggccaggtccgtccatccagaaaacctacgatctgacaaggtatctcgaacatcagctaaggtctctggctggaacataccttaattacttgggccctcctttcaatgagcctgacttcaatcccccaagactgggtgcggagaccttgcccagagcgaccgtggatctcgaagtctggaggtcgttgaacgacaagctgcgactgacacagaattatgaagcatatagccacctcctgtgctacctgcgcggactaaataggcaggcagctaccgcagagctgcgaagatccctggcgcacttctgtacaagcttgcagggcctgctgggttcaatcgccggagtcatggccgctctagggtacccgcttccacagcctttgcctggaactgaacctacttggacacctggcccggcccattctgacttcctgcagaaaatggacgacttctggctcttaaaggagctccagacttggctctggcggtccgcgaaggatttcaaccgcctgaaaaagaaaatgcagcctccagctgcggctgtgaccctgcacctgggggcccacggcttctag

SEQ ID NO: 175156 - DNA, 678 bp, Artificial Sequence
  derived and/or modified sequence
atggatctgagagctggggactcgtggggaatgcttgcctgcctgtgtaccgtcctgtggcatctgccagcagtgcctgctctgaaccgtacaggcgaccctggtcccggacccagcattcagaaaacatacgacttgactcggtatctggagcatcagctgagaagtcttgctggtacatatctgaactacttagggcctccttttaacgaacccgacttcaatccaccgagactgggagcagagaccctccccagagcgaccgtagacctggaagtgtggcggtcactcaatgataagcttaggctgacacagaattacgaggcctatagtcatcttctttgctatctgcggggattgaatcgccaggccgcaacggcagagttacggaggagcctcgcccatttctgcacctctctacagggtctgttgggaagcatcgccggagtgatggctgctctgggctacccactgccacaaccactgcctggtacggaacctacatggacgcccggtccagcccattcagattttctgcagaaaatggatgatttctggttgctgaaagagctacagacctggctctggcgcagcgcgaaagacttcaatagactgaagaagaagatgcagccgccagcggctgctgtgacgctccatctgggggctcacggattttag

SEQ ID NO: 175157 - DNA, 1844 bp, Artificial Sequence
  derived and/or modified sequence
acacgtcagaaaaaaaaaaaaaaagtttgcagaatgtcccacaccgaaaaaaaaaaaaaatccgaaaccgagcgaaaaaaacctgcgagtgggcctggcggatgggattattaaagcttcgccggagccgcggctcgccctcccactccgccagcctccgggagaggagccgcacccggccggcccggccccagccccatggacctccgagcaggggactcgtgggggatgttagcgtgcctgtgcacggtgctctggcacctccctgcagtgccagctctcaatcgcacaggggacccagggcctggcccctccatccagaaaacctatgacctcacccgctacctggagcaccaactccgcagcttggctgggacctatctgaactacctgggcccccctttcaacgagccagacttcaaccctccccgcctgggggcagagactctgcccagggccactgttgacttggaggtgtggcgaagcctcaatgacaaactgcggctgacccagaactacgaggcctacagccaccttctgtgttacttgcgtggcctcaaccgtcaggctgccactgctgagctgcgccgcagcctggcccacttctgcaccagcctccagggcctgctgggcagcattgcgggcgtcatggcagctctgggctacccactgccccagccgctgcctgggactgaacccacttggactcctggccctgcccacagtgacttcctccagaagatggacgacttctggctgctgaaggagctgcagacctggctgtggcgctcggccaaggacttcaaccggctcaagaagaagatgcagcctccagcagctgcagtcaccctgcacctgggggctcatggcttctgacttctgaccttctcctcttcgctcccccttcaaaccctgctcccactttgtgagagccagccctgtatgccaacacctgttgagccaggagacagaagctgtgagcctctggccctttcctggaccggctgggcgtgtgatgcgatcagccctgtctcctccccacctcccaaaggtctaccgagctggggaggaggtacagtaggccctgtcctgtcctgtttctacaggaagtcatgctcgagggagtgtgaagtggttcaggttggtgcagaggcgctcatggcctcctgcttcttgcctaccacttggccagtgcccacccagcccctcaggtggcacatctggagggcaggggttgaggggccaccaccacacatgcctttctggggtgaagccctttggctgccccactctccttggatgggtgttgctcccttatccccaaatcactctatacatccaattcaggaaacaaacatggtggcaattctacacaaaaagagatgagattaacagtgcagggttggggtctgcattggaggtgccctataaaccagaagagaaaatactgaaagcacaggggcagggacagaccagaccagacccaggagtctccaaagcacagagtggcaaacaaaacccgagctgagcatcaggaccttgcctcgaattgtcttccagtattacggtgcctcttctctgccccctttcccagggtatctgtgggttgccaggctggggagggcaaccatagccacaccacaggatttcctgaaagtttacaatgcagtagcattttggggtgtagggtggcagctccccaaggccctgccccccagccccacccactcatgactctaagtgtgttgtattaatatttatttatttggagatgttatttattagatgatatttattgcagaatttctattcttgtattaacaaataaaatgcttgccccagaa

SEQ ID NO: 175158 - DNA, 781 bp, Artificial Sequence
  derived and/or modified sequence
cctgcccacaggggactcgtgggggatgttagcgtgcctgtgcacggtgctctggcacctccctgcagtgccagctctcaatcgcacaggggacccagggcctggcccctccatccagaaaacctatgacctcacccgctacctggagcaccaactccgcagcttggctgggacctatctgaactacctgggcccccctttcaacgagccagacttcaaccctccccgcctgggggcagagactctgcccagggccactgttgacttggaggtgtggcgaagcctcaatgacaaactgcggctgacccagaactacgaggcctacagccaccttctgtgttacttgcgtggcctcaaccgtcaggctgccactgctgagctgcgccgcagcctggcccacttctgcaccagcctccagggcctgctgggcagcattgcgggcgtcatggcagctctgggctacccactgccccagccgctgcctgggactgaacccacttggactcctggccctgcccacagtgacttcctccagaagatggacgacttctggctgctgaaggagctgcagacctggctgtggcgctcggccaaggacttcaaccggctcaagaagaagatgcagcctccagcagctgcagtcaccctgcacctgggggctcatggcttctgacttctgaccttctcctcttcgctcccccttcaaaccctgctcccactttgtgagagccagccctgtatgccaacacctgttgagccaggagacagaagctgtgagcct

SEQ ID NO: 175159 - DNA, 967 bp, Artificial Sequence
  derived and/or modified sequence
acttgctcccaggccagctcgctggcatttgggagaatgtgtcattgcatttactcaagggggaggaggagggaaggttagagatgaggaggcagaggtagggtgggagcagggacctcgcacaggcagaggggactcgtgggggatgttagcgtgcctgtgcacggtgctctggcacctccctgcagtgccagctctcaatcgcacaggggacccagggcctggcccctccatccagaaaacctatgacctcacccgctacctggagcaccaactccgcagcttggctgggacctatctgaactacctgggcccccctttcaacgagccagacttcaaccctccccgcctgggggcagagactctgcccagggccactgttgacttggaggtgtggcgaagcctcaatgacaaactgcggctgacccagaactacgaggcctacagccaccttctgtgttacttgcgtggcctcaaccgtcaggctgccactgctgagctgcgccgcagcctggcccacttctgcaccagcctccagggcctgctgggcagcattgcgggcgtcatggcagctctgggctacccactgccccagccgctgcctgggactgaacccacttggactcctggccctgcccacagtgacttcctccagaagatggacgacttctggctgctgaaggagctgcagacctggctgtggcgctcggccaaggacttcaaccggctcaagaagaagatgcagcctccagcagctgcagtcaccctgcacctgggggctcatggcttctgacttctgaccttctcctcttcgctcccccttcaaaccctgctcccactttgtgagagccagccctgtatgccaacacctgttgagccaggagacagaagctgtgagcctctggccctttcctggaccggctgggcgtgtgatgcgatcagccctgtctcctccccacctcccaaa

SEQ ID NO: 175160 - DNA, 678 bp, Artificial Sequence
  derived and/or modified sequence
atggacctgagagccggcgacagctggggcatgctggcctgcctgtgcaccgtgctgtggcacctgcccgccgtgcccgccctgaacagaaccggcgaccccggccccggccccagcatccagaagacctacgacctgaccagatacctggagcaccagctgagaagcctggccggcacctacctgaactacctgggcccccccttcaacgagcccgacttcaacccccccagactgggcgccgagaccctgcccagagccaccgtggacctggaggtgtggagaagcctgaacgacaagctgagactgacccagaactacgaggcctacagccacctgctgtgctacctgagaggcctgaacagacaggccgccaccgccgagctgagaagaagcctggcccacttctgcaccagcctgcagggcctgctgggcagcatcgccggcgtgatggccgccctgggctaccccctgccccagcccctgcccggcaccgagcccacctggacccccggccccgcccacagcgacttcctgcagaagatggacgacttctggctgctgaaggagctgcagacctggctgtggagaagcgccaaggacttcaacagactgaagaagaagatgcagccccccgccgccgccgtgaccctgcacctgggcgcccacggcttctag

SEQ ID NO: 175161 - protein, 458 aa, Artificial Sequence
  derived and/or modified sequence
MAAPRAGRGAGWSLRAWRALGGIRWGRRPRLTPDLRALLTSGTSDPRARVTYGTPSLWARLSVGVTEPRACLTSGTPGPRAQLTAVTPDTRTREASENSGTRSRAWLAVALGAGGAVLLLLWGGGRGPPAVLAAVPSPPPASPRSQYNFIADVVEKTAPAVVYIEILDRHPFLGREVPISNGSGFVVAADGLIVTNAHVVADRRRVRVRLLSGDTYEAVVTAVDPVADIATLRIQTKEPLPTLPLGRSADVRQGEFVVAMGSPFALQNTITSGIVSSAQRPARDLGLPQTNVEYIQTDAAIDFGNSGGPLVNLDGEVIGVNTMKVTAGISFAIPSDRLREFLHRGEKKNSSSGISGSQRRYIGVMMLTLSPSILAELQLREPSFPDVQHGVLIHKVILGSPAHRAGLRPGDVILAIGEQMVQNAEDVYEAVRTQSQLAVQIRRGRETLTLYVTPEVTE

SEQ ID NO: 175162 - DNA, 1377 bp, Artificial Sequence
  derived and/or modified sequence
atggccgctccacgcgcgggtagaggtgccggatggtcactgcgcgcttggcgcgccttgggcggaattagatggggaagacgcccgaggctgacccctgatttgagagccctcctgaccagcgggactagtgatccacgggcccgagttacatacggaactccgtctctgtgggcacggctttcagtgggcgttacagagcccagagcttgcctaacttctggcaccccggggccccgggcccagctcactgccgtcaccccagacacgcgcacccgtgaagcttctgaaaatagcgggacacgcagccgtgcttggcttgcggtggctctgggtgccggcggggcagtccttctcctactgtggggcggggggcggggtccccccgccgtgctggcggccgtgccaagtccaccccccgcatcacctaggagtcagtacaactttatcgccgacgtggtggagaaaacagccccagccgtggtatacatcgagatacttgataggcatccttttctgggccgtgaagttcccatcagcaatgggtctggattcgttgtagctgctgatggactgatcgtgactaacgcccatgtcgttgcggatagacgaagagtaagagtacgccttttgtcaggcgatacatatgaggccgtcgtgacagcggtcgacccagtggcggatatcgctactcttcgcattcaaaccaaggagcccctgccgacacttcccctgggacgatctgccgacgttaggcagggggaattcgtggtggccatggggtcccccttcgccttacagaacaccatcacaagcgggattgtgagttcggcacagcggccagctcgcgacctcgggctgccacaaacaaacgttgagtacatccagacagatgctgccatcgattttgggaatagtggtggcccacttgtgaacctggacggcgaagtgataggagtaaatacaatgaaggtcacagccggaatttccttcgcaatcccatccgacagactgagggagtttctacacagaggcgaaaaaaagaactctagcagcggaattagcggatcccagagacgctacataggggttatgatgctcaccctgtctccttcaatcctagcagaacttcaacttcgagagccgagtttcccagacgtgcagcatggtgtgctaatccacaaagtgatacttggttccccagctcatagggcaggattacggccaggggatgtcatactggccatcggagagcagatggtgcagaatgcagaggatgtgtatgaagccgtcagaacacagtcccagctggcagtccagattaggcgcggacgagagacgctgaccctgtacgtgacccccgaagtcacagagtag

SEQ ID NO: 175163 - DNA, 2367 bp, Artificial Sequence
  derived and/or modified sequence
tctggcagcgcgcagctgaccaggaagacgtggatcccgagaaagaggcgcaggacgaggaggcagaacccgactggcgcgtagagcagcagcacgagcagtaggaagcagtcacccggaagcctgggggcgagaggcgaagtggtcaggcgccgaaggccgagagcacgcggggatcggtctcttcccgccgggtctcttaccggtgcgagtcaaagagccgctccggccccggccctgagggaagctccataactgctgcttcaggagcgcccggccgtcgccgccgccgccattttcgcgcccggccgcaggggctcttgggaaggcggagtctttgggcatccgcccggggtgaggggacccgaagtcctgaggcgcgccggaagggctagcggtcccagcataccccgcggccccttgggccgtctcacaactcgcgtccggcggagaccacaattcccggcattcgtggggcagggaggagtcggcctcccggaatcctggtcccggcgtgcacttctgaaggacttcaggtaccggcgtgccccgcgtcctactgtccgcctgctcgcgtcctgggtgccgcctctgagtagggcgggcgaggaggcagccaaggcggagctgatggctgcgccgagggcggggcggggtgcaggctggagccttcgggcatggcgggctttggggggcattcgctgggggaggagaccccgtttgacccctgacctccgggccctgctgacgtcaggaacttctgacccccgggcccgagtgacttatgggacccccagtctctgggcccggttgtctgttggggtcactgaaccccgagcatgcctgacgtctgggaccccgggtccccgggcacaactgactgcggtgaccccagataccaggacccgggaggcctcagagaactctggaacccgttcgcgcgcgtggctggcggtggcgctgggcgctgggggggcagtgctgttgttgttgtggggcgggggtcggggtcctccggccgtcctcgccgccgtccctagcccgccgcccgcttctccccggagtcagtacaacttcatcgcagatgtggtggagaagacagcacctgccgtggtctatatcgagatcctggaccggcaccctttcttgggccgcgaggtccctatctcgaacggctcaggattcgtggtggctgccgatgggctcattgtcaccaacgcccatgtggtggctgatcggcgcagagtccgtgtgagactgctaagcggcgacacgtatgaggccgtggtcacagctgtggatcccgtggcagacatcgcaacgctgaggattcagactaaggagcctctccccacgctgcctctgggacgctcagctgatgtccggcaaggggagtttgttgttgccatgggaagtccctttgcactgcagaacacgatcacatccggcattgttagctctgctcagcgtccagccagagacctgggactcccccaaaccaatgtggaatacattcaaactgatgcagctattgattttggaaactctggaggtcccctggttaacctggatggggaggtgattggagtgaacaccatgaaggtcacagctggaatctcctttgccatcccttctgatcgtcttcgagagtttctgcatcgtggggaaaagaagaattcctcctccggaatcagtgggtcccagcggcgctacattggggtgatgatgctgaccctgagtcccagcatccttgctgaactacagcttcgagaaccaagctttcccgatgttcagcatggtgtactcatccataaagtcatcctgggctcccctgcacaccgggctggtctgcggcctggtgatgtgattttggccattggggagcagatggtacaaaatgctgaagatgtttatgaagctgttcgaacccaatcccagttggcagtgcagatccggcggggacgagaaacactgaccttatatgtgacccctgaggtcacagaatgaatagatcaccaagagtatgaggctcctgctctgatttcctccttgcctttctggctgaggttctgagggcaccgagacagagggttaaatgaaccagtgggggcaggtccctccaaccaccagcactgactcctgggctctgaagaatcacagaaacactttttatataaaataaaattatacctagcaacatattatagtaaaaaatgaggtgggagggctggatcttttcccccaccaaaaggctagaggtaaagctgtatccccctaaacttaggggagatactggagctgaccatcctgacctcctattaaagaaaatgagctgctgccatcttttgtgggcagttagtcaggtgc

SEQ ID NO: 175164 - DNA, 1377 bp, Artificial Sequence
  derived and/or modified sequence
atggccgccccccgggccggccgcggggccggctggagcctgcgggcctggagggccctgggcggcatccgctggggcagaagaccccggctgaccccagacctgcgggccctgctgaccagcggcaccagtgacccccgggcccgggtgacctacggcacccccagcctgtgggcccggctgtctgtgggcgtgacagagccccgggcctgcctgaccagcggcaccccaggcccccgggcccagctgacagctgtgaccccagacaccaggacccgggaggcctctgaaaattctggcaccaggagccgggcctggctggccgtggccctgggcgccggcggcgctgtgctgctgctgctgtggggcggcggccggggccccccagctgtgctggccgctgtgcccagccccccaccagccagccccaggagccagtacaacttcatcgcagatgtggtggagaagacagccccagctgtggtgtacatcgagatcctggacagacaccccttcctgggccgggaggtgcccatcagcaatggaagtggctttgtggtggccgcagatggcctgattgtgaccaatgcccacgtggtggccgacagaagaagagtgcgggtgcggctgctgagcggggacacctatgaggccgtggtgacagctgtggaccctgtggccgacatcgccaccctgcgcatccagaccaaggagcccctgcccaccctgcccctgggccgctctgcagatgtgcggcagggcgagtttgtggtggccatgggcagcccctttgccctgcagaacaccatcaccagcggcatcgtgtcctctgcccagaggcctgcccgggacctgggcctgccccagaccaacgtggagtacatccagacagatgctgccatcgactttggaaacagcggcggccccctggtgaacctggatggagaggtgattggagtgaacaccatgaaggtgacagctggcatcagctttgccatccccagcgaccggctgcgggagttcctgcacagaggagagaagaagaacagcagcagcggcatcagcggcagccagaggcgctacatcggcgtgatgatgctgaccctgagccccagcatcctggccgagctgcagctgcgggagcccagcttcccagatgtgcagcacggcgtgctgatccacaaggtgatcctgggcagccctgcccacagagctggcctgcggcctggagatgtgatcctggccatcggggagcagatggtgcagaatgcagaagatgtgtatgaggccgtgaggacccagagccagctggccgtgcagatccggcggggccgggagaccctgaccctgtatgtgaccccagaggtgacagaatag

SEQ ID NO: 175165 - DNA, 1377 bp, Artificial Sequence
  derived and/or modified sequence
atggccgccccccgggccggccggggcgccggctggagcctgcgggcttggagggctctggggggaatccgctggggtcggaggcctaggttaactcccgatctgagagccctgctcacaagcggcaccagtgacccccgagccagagtgacctatggcacccccagcttatgggcccggctctccgtgggtgttaccgagcctcgagcctgcctgacctccggcacgcctggcccccgcgcccagctgactgcagtcactcctgacacccgcacccgtgaggcctcagaaaattctggtaccagatccagggcttggctggccgtggctctgggagccggcggagcagtgctgctcctcctttgggggggagggaggggcccacctgccgtgttggcggcagtcccgagtccaccgcctgccagtccacgctctcaatataatttcatcgcggatgtcgttgagaaaacggctccggcggtggtctacatcgagatcctggatcgccatccttttttgggcagagaggtgcctattagcaatgggagcggattcgtggtggcagccgacggcctgatcgttactaacgctcacgtcgtggccgacaggagacgggtcagggtgcgacttctgtctggggatacttacgaagcagttgttacagcagtggacccagtcgccgatatcgccactctaagaattcaaaccaaagaacccctcccgactctcccattgggacgcagcgctgacgtccggcagggcgaatttgttgtggccatgggtagccctttcgctctgcagaacaccataacgtccgggatcgtgagtagcgcacaacgccccgcccgagaccttggccttccccagaccaacgtggaatatatacagacggacgcagcaatcgacttcgggaactccggaggaccactggtgaacctagacggcgaggttatcggcgtgaatactatgaaagttaccgccgggatttccttcgcaatacctagcgatcggctgagagaattcctacacagaggagaaaaaaagaatagtagtagcggcattagtgggagccagaggcgctacattggtgttatgatgctgacgctgtccccatccatcctcgctgaattgcagcttcgcgagccaagctttccagacgtacagcatggcgtattaattcataaggtcattctggggtccccggctcaccgagccggtttacggcctggagacgtcatcctcgctattggagagcagatggttcagaacgccgaagatgtgtacgaagctgtgagaactcagagccaactggcagtccagataagacgcggcagagagacactgaccctgtatgtgaccccagaagttacggaatag

SEQ ID NO: 175166 - DNA, 1377 bp, Artificial Sequence
  derived and/or modified sequence
atggccgcaccaagagctggcagaggggcaggctggtctctgcgcgcatggcgtgcgttaggcggaatccgatggggcagacgcccaagactcacacctgatctgcgcgcacttctgactagcgggacttcggaccctagagctcgagtgacctacggaactccctccttgtgggccagactctctgtaggcgtgacagagcctcgtgcctgtctcacgtcaggcactcccggacctagagcccagctaaccgcggtcactccggatacaagaactagagaagcatcggagaattctgggacaaggtccagagcctggctcgcagtggcactcggcgcaggaggggcagtgctcttactgctctggggaggtggacggggacccccagccgtcctcgcagctgtcccctccccgccacccgcaagtcccaggagtcaatataacttcatcgccgatgtggtagaaaagactgctcccgctgtggtctacatcgaaatcttagaccggcatcctttcctgggtcgagaagtgcccatctctaacggctctggatttgtggtggcagcagatggtctgatagtcaccaatgcacatgtggtggccgatcgacgcagagtgcgagtgagacttctttcgggcgacacctacgaggccgtcgtgaccgcagtggatcctgtggccgatatcgcaaccctgcggattcaaacaaaggaacctttaccgaccctgcccttgggtcgcagcgccgacgtacggcaaggtgaatttgtggtggcaatgggaagccctttcgcacttcagaacacgattaccagtggtattgtcagcagcgcccagcgtcctgcgagggatttgggcctcccacagacaaacgtagaatacatccagacggacgctgcaatcgattttggcaacagcggcggtccgctcgtaaacctggatggagaagtgatcggtgtaaatactatgaaagtcaccgcaggcatctccttcgctattccgtctgaccgtctccgtgaattcctgcaccgcggagaaaagaagaattcttcaagcgggatttccggctcacagagacgctacataggggtgatgatgttgactctctctccatctatcctagccgagctgcagctcagagagccttcgtttccggacgtccagcatggagtactcatccataaggtgattctgggctcacctgcacacagggcaggccttcgaccaggggacgttatcttagcgatcggtgagcagatggtgcagaacgcagaggacgtctatgaagcagtgcgcactcagagtcaactggccgtacagataagaagaggaagggagactctgaccctctatgtgacccctgaggtgaccgagtag

SEQ ID NO: 175167 - DNA, 1377 bp, Artificial Sequence
  derived and/or modified sequence
atggccgcccccagagccggcagaggcgccggctggagcctgagagcctggagagccctgggcggcatcagatggggcagaagacccagactgacccccgacctgagagccctgctgaccagcggcaccagcgaccccagagccagagtgacctacggcacccccagcctgtgggccagactgagcgtgggcgtgaccgagcccagagcctgcctgaccagcggcacccccggccccagagcccagctgaccgccgtgacccccgacaccagaaccagagaggccagcgagaacagcggcaccagaagcagagcctggctggccgtggccctgggcgccggcggcgccgtgctgctgctgctgtggggcggcggcagaggcccccccgccgtgctggccgccgtgcccagccccccccccgccagccccagaagccagtacaacttcatcgccgacgtggtggagaagaccgcccccgccgtggtgtacatcgagatcctggacagacaccccttcctgggcagagaggtgcccatcagcaacggcagcggcttcgtggtggccgccgacggcctgatcgtgaccaacgcccacgtggtggccgacagaagaagagtgagagtgagactgctgagcggcgacacctacgaggccgtggtgaccgccgtggaccccgtggccgacatcgccaccctgagaatccagaccaaggagcccctgcccaccctgcccctgggcagaagcgccgacgtgagacagggcgagttcgtggtggccatgggcagccccttcgccctgcagaacaccatcaccagcggcatcgtgagcagcgcccagagacccgccagagacctgggcctgccccagaccaacgtggagtacatccagaccgacgccgccatcgacttcggcaacagcggcggccccctggtgaacctggacggcgaggtgatcggcgtgaacaccatgaaggtgaccgccggcatcagcttcgccatccccagcgacagactgagagagttcctgcacagaggcgagaagaagaacagcagcagcggcatcagcggcagccagagaagatacatcggcgtgatgatgctgaccctgagccccagcatcctggccgagctgcagctgagagagcccagcttccccgacgtgcagcacggcgtgctgatccacaaggtgatcctgggcagccccgcccacagagccggcctgagacccggcgacgtgatcctggccatcggcgagcagatggtgcagaacgccgaggacgtgtacgaggccgtgagaacccagagccagctggccgtgcagatcagaagaggcagagagaccctgaccctgtacgtgacccccgaggtgaccgagtag

SEQ ID NO: 175168 - protein, 517 aa, Artificial Sequence
  derived and/or modified sequence
MQPLSKLMAISKPRNLSLREQREVLRADMSWQQETNPVVETHDSEASRQKFRHFQYLKVSGPHEALSQLWELCLQWLRPEIHTKKQIIELLVLEQFLAILPEEVRTWVNLQHPNNSKDMVTLIEDVIEMLEDEDMPCKDSALQMGSIKEKMKAGSRTGKPQEPVTFKDVVVEFSKEEWGQLDSAVKNLYRNVMLENFRNLNSLRKAHLLSKPFESLKLESKKKRWIMEKEIPRKTIFDMKSISGEESSHGVIMTRLTESGHPSSDAWKGENWLYRNQKKWDINLPQEAFIPETIYTEEEDFECSENKKSFDINSVSSICAIQVGIPSRKGSPKCDKFKTYFKFNLDSVGKQHSEYEYGNDLSLSTDIRHQKSHTTMNSYECYQCGKAFCRSSSLIRHQIIHTGEKPYKCSECGRFFNRRTNLTKHQKLHAEAKACTSNKCGKAFSKSEDSNNPTLHFGNNFYQCVNCGKSFNRSSSLIRHQMIHTGEKPFKCKECSKAFNRSSNLVKHQKLHTRDKS

SEQ ID NO: 175169 - DNA, 3658 bp, Artificial Sequence
  derived and/or modified sequence
tgcagaaagggacggggctggcaaaggcctggtctacctcaccgatccgggtcgcgggggctcctagggggttccttccacagctggtgcgcgtgcgcaagagtgcgtcgaggttgttccgcggcaatttatgaaactcggagccggcagtgagttgagggttcggcgaggtcagggattcctagttgcagcgtgattaccaacgccagctcccttcactgtccaagacagcgattccgcggctcctctgagaactggcgctttgttcatcatttgccacttaagctacttgcagtcacgtcacaccttggatctctatcatcaaaactattccacctcggaaatcttacctaaatgcagcatgccatcctgaacgtctctccctgtcctagctctgtaactgtttacattgctcaggtacctgaatattggctttgtgtctaaagtttctggaactttcctccttaccgtgaaataacttggcttaaatcacactgcatatagtacacaggtgcttagctcaagcctgagaattactgcaatctagtaaggcggatttgaactactgtgggagttctatttaggaagatgcagcctctgagcaagttgatggctatctcaaaacctcgaaacctgtctctacgtgaacaaagagaggttctgagagcagatatgtcttggcagcaggaaaccaaccccgtcgtggagacacatgactctgaggcatctcgtcaaaagttcagacatttccagtatttgaaagtgtctgggccccatgaagccctgagccaactctgggagctctgtcttcaatggctgagaccagagattcatacaaagaagcagattatagaactgttggtgctggaacaattcctggcaatcctgcctgaagaagtcaggacttgggtgaatttacaacatccaaacaacagtaaagatatggtgaccctcatagaagatgtgattgaaatgcttgaagatgaagatatgccctgcaaggactctgccctgcagatggggagcatcaaggagaaaatgaaagctggctcacgaacaggcaaaccacaggaaccagtgacattcaaagatgtggttgtggaattcagcaaggaagagtgggggcaactggactctgctgtaaagaacctgtacaggaatgtgatgctggaaaactttaggaacctgaattcattgcgtaaagcacatctactttccaaaccatttgagagccttaagttggagagtaagaaaaaaagatggataatggagaaagaaataccaaggaagactatttttgacatgaagagtatttctggagaagaatcatcccatggagtgattatgacaaggcttaccgaaagtggacacccttcttcagatgcctggaaaggtgagaattggttatataggaaccagaaaaaatgggacataaatttgccacaagaggctttcattcctgagacaatttacactgaggaggaagattttgaatgtagtgaaaataagaaaagctttgatattaattcagttagctcaatttgtgctatacaagtgggaattccttcaagaaaggggtctccaaaatgtgataagtttaaaacttacttcaaatttaatttagactcagtaggtaagcaacattcagaatatgaatatgggaatgacttgagtttgagtacagatattcgacaccaaaaaagtcatactacaatgaattcctatgaatgttatcaatgtgggaaagccttctgccgaagttcatcccttattcgacatcagatcattcacacaggagagaaaccctataaatgcagtgaatgtgggagattcttcaaccgacgtacaaaccttactaagcatcaaaaacttcatgctgaagcaaaggcctgcacaagcaataaatgtggaaaggccttcagtaaaagtgaagacagtaataatccaacactccattttggaaacaatttctatcaatgtgttaactgtggaaaatccttcaaccggagctcctctcttattcgacaccaaatgattcacacgggagagaaaccattcaaatgtaaggaatgtagtaaagccttcaacaggagttcaaaccttgttaaacatcaaaaactgcatactcgagataagtcctgaaaaaagaaaaaatgaaagattaccttcagtcagaatgcagaactcatttaacatcatgaatttatgctggataaaatctcatgaatataatgtaagaaaacatttgtcagatttttctttaaatgatatcacagaattaatgttggatagaaatatcattggatagaaatctgtttgaaggaattttcctggttttcagatgaagccataaggctttggagttaaaccacagtatcaccatacaagtatttgtttatcattattttgatatccattaccctcacctctccctagttcataaataggtctatagcatactaatatccacctgatttattgacgaagtagacattaggcaaagccaaacaatactcttggagttgatatttaataaaactcagcccttttaagaaggtcacaagaaatcattagctcatgcgaatataagagaatacttctaaggacagaaatctctgaatcaatggctaagacaacagtaacagccatttactccactcctgacaataccctttgttgtcttgctgttgaatggagactagagttgggaaagggttatcaactgcaatgggagaagtatgtattgctgttaatctatatgtattcttaaaatctgcatttgtttatagcaggtccttgaaaaatgtttttgttttgttataatgttataattgttatgatgttgatgagaaaaatatcgattcccagccagggacactgtgtggagttcgcacactctccctatgtctccgggtgctccagtttcaaaccccaaagatgtatacattaggttaattgacatatctaaattatctcagtctgagtttgtgaggaagtgtgccctgcagtggaatggctcctaatcagggtttgttcccaccattgccctgagctgctaggatgcgctctgtccacccatggccctgtactggaataacagggtaaataattatcttatctgtttttattaatccgtcttaaatgtgtatatagctcagatttattttaatgtctgatattggaagcgtttggggtctttagaagtttgatgatgttgtgaccagacatttgccttaggaacttaactcttgtttgtatccattagtctatggtaaaattggttttgttatacatcatttcacttaaagttgcagttcctaagaacctattgatgatgttcagtgcagacttactgtacctttgggaatttaggctggagagacgtccatagccttaggtatatcatttataccagacattatgaagttattaaagtctcctatactctgtacaccagaactgtgtcttctgtaaactacctcaggatcccatctggttcttgagccaagaagtatgacttaatctgccccaaaaaattcacactggagacattcccaattaatgatgatggtagctttttgtgaaggttcataccttattcaaaggcagaaaaggtatactggagtgaactcctatgattaaataatgtcaaaatcta

SEQ ID NO: 175170 - DNA, 1554 bp, Artificial Sequence
  derived and/or modified sequence
atgcagcccctgagcaagctgatggccatcagcaagcccagaaacctgagcctgagagagcagagagaggtgctgagagccgacatgagctggcagcaggagaccaaccccgtggtggagacccacgacagcgaggccagcagacagaagttcagacacttccagtacctgaaggtgagcggcccccacgaggccctgagccagctgtgggagctgtgcctgcagtggctgagacccgagatccacaccaagaagcagatcatcgagctgctggtgctggagcagttcctggccatcctgcccgaggaggtgagaacctgggtgaacctgcagcaccccaacaacagcaaggacatggtgaccctgatcgaggacgtgatcgagatgctggaggacgaggacatgccctgcaaggacagcgccctgcagatgggcagcatcaaggagaagatgaaggccggcagcagaaccggcaagccccaggagcccgtgaccttcaaggacgtggtggtggagttcagcaaggaggagtggggccagctggacagcgccgtgaagaacctgtacagaaacgtgatgctggagaacttcagaaacctgaacagcctgagaaaggcccacctgctgagcaagcccttcgagagcctgaagctggagagcaagaagaagagatggatcatggagaaggagatccccagaaagaccatcttcgacatgaagagcatcagcggcgaggagagcagccacggcgtgatcatgaccagactgaccgagagcggccaccccagcagcgacgcctggaagggcgagaactggctgtacagaaaccagaagaagtgggacatcaacctgccccaggaggccttcatccccgagaccatctacaccgaggaggaggacttcgagtgcagcgagaacaagaagagcttcgacatcaacagcgtgagcagcatctgcgccatccaggtgggcatccccagcagaaagggcagccccaagtgcgacaagttcaagacctacttcaagttcaacctggacagcgtgggcaagcagcacagcgagtacgagtacggcaacgacctgagcctgagcaccgacatcagacaccagaagagccacaccaccatgaacagctacgagtgctaccagtgcggcaaggccttctgcagaagcagcagcctgatcagacaccagatcatccacaccggcgagaagccctacaagtgcagcgagtgcggcagattcttcaacagaagaaccaacctgaccaagcaccagaagctgcacgccgaggccaaggcctgcaccagcaacaagtgcggcaaggccttcagcaagagcgaggacagcaacaaccccaccctgcacttcggcaacaacttctaccagtgcgtgaactgcggcaagagcttcaacagaagcagcagcctgatcagacaccagatgatccacaccggcgagaagcccttcaagtgcaaggagtgcagcaaggccttcaacagaagcagcaacctggtgaagcaccagaagctgcacaccagagacaagagctag

SEQ ID NO: 175171 - DNA, 1554 bp, Artificial Sequence
  derived and/or modified sequence
atgcagccactaagtaagcttatggccatttcaaagcccaggaacctcagtttgagagagcagcgcgaagtgctgcgcgcagatatgtcctggcagcaggaaacaaacccagttgttgaaacgcacgacagtgaggcctcacgacaaaagttcagacacttccagtatctgaaggtttccggacctcacgaggcgttatcccaactgtgggaactctgcctgcagtggcttcgtccagagatccacaccaagaaacagataatcgagctcctagtgctagaacagtttctggctatccttcccgaagaggtcaggacgtgggtaaatctccagcatcctaacaactctaaggacatggtgaccttgattgaagacgtcatagaaatgctggaggacgaggacatgccctgcaaggatagtgccctccaaatgggcagcataaaagagaaaatgaaagcaggatctagaaccggtaagccccaggagccagtgaccttcaaggacgttgtggtcgagttttctaaggaggagtggggccagttggattctgccgtgaagaacctgtaccggaacgtgatgctggaaaacttccgaaatctgaactcgctgagaaaggcacatttactctccaagcctttcgagagcttgaagctcgagtctaaaaaaaaacgatggattatggaaaaagaaatcccacgaaagactatattcgatatgaaatccatttctggcgaggagtctagtcatggcgtcattatgaccaggctaaccgagtctggccaccctagcagtgatgcttggaaaggcgaaaactggctatatcggaatcagaaaaaatgggacatcaatctacctcaagaagcgtttatacccgagaccatatacacggaggaggaagattttgagtgtagcgaaaacaagaaatcattcgacatcaacagtgtctccagtatatgtgcgatccaagtgggaatccctagccggaaagggtctcccaagtgtgacaaatttaaaacctatttcaagtttaacctggactcggttggtaaacaacactccgaatacgaatatggcaacgacctgtccctatctactgacatcaggcaccagaaaagccatactaccatgaactcctatgagtgttatcaatgcggcaaagcattttgcagatcatcctcactcatccgacaccagataattcacaccggagagaagccatataaatgtagcgagtgcggaagattctttaatcgtagaactaacttaaccaaacaccaaaagctgcacgcagaagctaaagcttgtacctcgaacaaatgcggaaaagcgttctctaaaagcgaggactctaacaaccccacattacacttcggaaataatttttaccagtgtgttaactgcggcaagtcttttaaccggagctccagcctgatccggcatcagatgatccataccggagagaagcccttcaaatgcaaagagtgcagcaaggcctttaaccgcagttcgaatctggttaaacaccagaaattgcacaccagggacaaatcatag

SEQ ID NO: 175172 - DNA, 1554 bp, Artificial Sequence
  derived and/or modified sequence
atgcagcctctgagtaagctgatggcgatcagcaaaccacgaaatttgagtctgagagaacaacgtgaggtgctccgggccgacatgtcatggcagcaggagacaaaccccgtggtggagacccacgatagtgaggcctctcgccagaaatttcggcacttccagtacctaaaagtcagcgggccgcacgaggccctgtcacaactgtgggagctgtgtttgcagtggctaaggccggaaatacacacgaaaaagcagataatcgagctgcttgtgctggagcaattcctggccatcctgcctgaagaggtgcgtacatgggtaaacttacaacatccaaacaatagtaaggacatggtcacattaatagaggacgtcatcgaaatgctggaagatgaggatatgccgtgcaaagatagtgccctgcagatgggcagcattaaggagaaaatgaaggccgggagcagaacggggaaacctcaggagcccgtgacttttaaagatgtggtggtcgagttttcaaaggaggagtgggggcagctggacagcgccgtaaaaaacctgtatcgcaacgtgatgcttgagaacttccgtaacctcaactccctgagaaaagcccatctgctgtcgaagccattcgaatctttgaagctcgaaagtaagaaaaagcgctggataatggagaaagaaatccctaggaagaccatatttgacatgaagtctatctctggcgaagaatccagccacggggtgattatgaccagactcacagaatctgggcatcctagctcagacgcatggaaaggggagaattggttatacagaaatcagaaaaagtgggatattaatttgccccaggaggccttcatccccgagacgatttacaccgaagaagaggatttcgagtgctcagaaaataaaaagagctttgacatcaactcggttagcagcatctgtgccatccaggtgggcatccccagccggaagggatcccccaaatgtgacaagttcaagacgtactttaaatttaacctcgattccgtgggaaagcagcactccgaatatgaatacgggaatgatctatctctttccactgacattagacaccagaagagtcacaccacgatgaattcttacgagtgttatcagtgtggcaaggctttctgccgctcttcgagcctgatacggcaccagatcattcacacaggcgagaagccttacaagtgctccgagtgcgggaggttcttcaataggagaacaaacctgaccaaacaccagaaactgcatgcagaagccaaagcatgtacgagtaataaatgcggtaaagcatttagtaagagcgaagatagtaataatcctaccctgcatttcggaaataacttttatcagtgtgtgaactgtggaaagagcttcaaccggagtagcagtctgatacgccaccaaatgattcatacaggggaaaagcccttcaagtgcaaagagtgtagtaaagccttcaacagatccagcaacctggtcaagcaccagaagctccacactagagacaagagttag

SEQ ID NO: 175173 - DNA, 1554 bp, Artificial Sequence
  derived and/or modified sequence
atgcagcccctgagcaagctgatggccatcagcaagcccaggaacctgagcctgcgggagcagcgggaggtgctgcgggctgacatgtcctggcagcaggagaccaaccctgtggtggagacccatgacagcgaggccagccggcagaagttccgccacttccagtacctgaaggtgtctggcccccatgaggccctgagccagctgtgggagctgtgcctgcagtggctgcggcctgagatccacaccaagaagcagatcatcgagctgctggtgctggagcagttcctggccatcctgcctgaggaggtgaggacctgggtgaacctgcagcaccccaacaacagcaaggacatggtgaccctgattgaagatgtgattgagatgctggaggatgaggacatgccctgcaaggacagcgccctgcagatgggcagcatcaaggagaagatgaaggccggcagcaggacaggcaagccccaggagcctgtgaccttcaaggatgtggtggtggagttcagcaaggaggagtggggccagctggacagcgctgtgaagaacctgtacagaaatgtgatgctggagaacttcaggaacctgaacagcctgaggaaggcccacctgctgagcaagccctttgagagcctgaagctggagagcaagaagaagcgctggatcatggagaaggagatccccaggaagaccatctttgacatgaagagcatctctggagaggagagcagccatggagtcatcatgacccggctgacagaaagtggccaccccagcagtgatgcctggaagggggagaactggctgtacagaaaccagaagaagtgggacatcaacctgccccaggaggccttcatccctgagaccatctacacagaggaggaggactttgagtgcagcgagaacaagaagagctttgacatcaacagcgtgagcagcatctgtgccatccaggtgggcatccccagcaggaagggcagccccaagtgtgacaagttcaagacctacttcaagttcaacctggacagcgtgggcaagcagcacagtgaatatgaatatggaaatgacctgagcctgagcacagacatccgccaccagaagagccacaccaccatgaacagctatgagtgctaccagtgtgggaaggccttctgccgcagcagcagcctcatccgccaccagatcatccacactggagagaagccctacaagtgcagtgaatgtggccgcttcttcaacagaaggaccaacctgaccaagcaccagaagctgcacgccgaggccaaggcctgcaccagcaacaagtgtgggaaggccttcagcaagtctgaggacagcaacaaccccaccctgcactttggaaacaacttctaccagtgtgtgaactgtgggaagagcttcaacagaagcagcagcctcatccgccaccagatgatccacactggagagaagcccttcaagtgcaaggagtgcagcaaggccttcaacagaagcagcaacctggtgaagcaccagaagctgcacacccgggacaagagctag

SEQ ID NO: 175174 - DNA, 1554 bp, Artificial Sequence
  derived and/or modified sequence
atgcagcccctgagcaagctgatggccatcagcaagccccggaacttgtctctgcgcgaacagcgcgaagtgctgcgggccgacatgtcctggcaacaggaaacgaaccccgtagtcgagactcatgactcggaagcctccagacagaagtttaggcacttccagtacctaaaagtatccggcccacacgaggctttatcacagctgtgggagctgtgcttgcaatggcttaggccagagatccacactaaaaagcagatcatagagttattggttctggaacagttcctcgccatcctacctgaagaagtcaggacatgggtcaatttgcagcaccccaacaattctaaggacatggttactctgatagaggacgtcattgagatgcttgaggacgaagatatgccttgcaaggacagtgctctacagatggggagcataaaggaaaagatgaaggcaggatcgaggactggcaagccacaggagccagtaacctttaaagatgtcgtcgtggaattctccaaagaagaatggggccaactggattcggctgtcaaaaatctgtaccggaatgtaatgcttgagaactttaggaatctaaacagccttaggaaagcccacttgctcagtaaacctttcgaatctctgaaactggaaagtaaaaaaaagaggtggatcatggaaaaagaaattcccagaaagacaatttttgatatgaagtccatctccggcgaggaaagtagccacggggttattatgacgcgtcttactgaatcagggcatccatcttctgatgcctggaagggagagaactggctataccggaatcaaaaaaaatgggatattaacctcccacaggaggcctttattcccgagactatttatacagaggaagaggacttcgagtgctctgaaaataagaagtcattcgacattaactccgtcagcagcatctgcgccatccaagttgggatccctagtaggaagggcagccctaaatgcgacaaatttaagacatactttaaatttaacctggattcggtgggaaaacaacacagcgagtatgaatatggcaatgacctgtctctgtccacagatattcggcaccagaagtcccatacgacaatgaacagctacgaatgctaccaatgtgggaaagcattctgtagaagttctagcctcattcggcatcagattattcacaccggcgagaagccatataaatgtagcgaatgtgggcgattctttaataggaggacgaacttaactaagcaccagaagctccatgctgaggccaaagcatgtacaagtaataaatgtggaaaggcattctccaagtcggaggactcaaataacccaaccctgcacttcggtaataacttttatcagtgcgtgaattgtggcaagagtttcaatcggtcttcctctctgatcagacatcaaatgattcacactggagagaagcccttcaagtgcaaggagtgctccaaggcctttaatcggtccagcaacttggtgaaacatcaaaaactgcacacacgggacaagtcatag

SEQ ID NO: 175175 - DNA, 1554 bp, Artificial Sequence
  derived and/or modified sequence
atgcagcccctgagcaagctgatggccatcagcaagccccggaacctttctctgagagagcaaagagaggtactgagagccgacatgagttggcagcaggaaaccaatccagtggtggagacccacgattcggaggcgtcaagacagaagtttcgccactttcagtacctaaaggtttctggcccccacgaagccctctcccaactgtgggagctgtgcctgcaatggctccgtcctgagattcacactaagaagcaaataatcgagctgcttgtgctcgagcaattcctggcaattctcccagaggaagttcgcacatgggttaacctgcagcacccgaataactccaaagacatggttactctgattgaggatgtgattgagatgcttgaggacgaggatatgccttgtaaagactccgccttgcaaatggggagcattaaggagaaaatgaaggctggctccaggacgggcaaaccacaggagccagttacgtttaaggatgtagtggtagaattttccaaggaagagtggggtcagctcgactctgccgtgaaaaacctatatagaaacgtgatgttagagaactttcgcaacctgaattccctgagaaaagcacacctcctcagcaaaccatttgaatcactgaaactcgaatcaaaaaaaaaacggtggattatggagaaggagattccacggaagaccattttcgatatgaaaagcatctcaggcgaagagagtagtcacggagttattatgacacggcttaccgagtccggacacccgtcttcggatgcatggaagggggagaactggctttaccggaaccagaaaaagtgggatatcaacctgcctcaggaagccttcatccccgagacgatttacactgaagaggaggattttgagtgcagcgaaaacaaaaaaagctttgacataaactccgtgagctcaatttgcgccatccaggtcggcattccaagtcgcaaaggttcccccaagtgtgacaagttcaaaacctatttcaagtttaatttggattccgtcgggaagcaacactcagaatatgagtacggcaatgatctgagcctgtccacggacatacgccatcagaagagccacacaaccatgaattcatatgaatgctatcagtgcggcaaggctttctgcaggagcagcagcctcatccgacatcaaattattcataccggggagaaaccatataagtgttcagagtgcggcaggtttttcaacaggagaacaaaccttactaaacaccagaaattgcatgcagaagcgaaagcctgcacctcaaacaaatgtggtaaagcattctcaaagtccgaggactcgaacaatccaacactgcacttcggcaataatttttaccagtgtgtcaactgcggaaagtccttcaacaggagcagttccctgatcagacatcaaatgattcacaccggagagaagccctttaaatgcaaggaatgctccaaagccttcaacaggtccagtaatctcgtgaaacatcaaaaactgcatactcgtgataaatcttag

SEQ ID NO: 175176 - DNA, 1554 bp, Artificial Sequence
  derived and/or modified sequence
atgcagccactgagtaagctgatggcgatttccaagcctagaaacctgagcctgcgtgaacagagagaggtcttacgtgctgatatgagctggcagcaggaaacaaatcctgtggtggagactcacgactccgaggcctcccgtcagaagttcaggcatttccagtatctgaaggtgagtgggcctcatgaagccctgagccagctgtgggagttgtgtctccagtggctccggccagagatccatacaaaaaagcagataattgagttgctggtgttagaacagttcttggcaatcctgccagaagaggtgaggacatgggtgaacctgcagcatcctaataatagtaaggacatggtgactttgatagaagacgtcatcgagatgctggaggatgaagacatgccatgcaaagactcagccctccagatgggttcaattaaggagaaaatgaaagctggaagcaggacaggcaagccacaggagcccgtcactttcaaggacgtggtcgttgaatttagtaaagaagagtggggccagctggacagtgccgttaagaacctctatcgaaatgttatgctggagaattttcggaacctgaacagcctgcggaaggcccatctgctttctaaaccttttgaaagcctgaaactggagtctaaaaaaaagcggtggattatggaaaaagaaatccccagaaaaactatctttgatatgaaatccatatcgggggaagagtcctcccacggggtcatcatgacaagactcaccgagtctgggcatcctagttcagatgcctggaagggagagaattggctgtatcggaaccaaaaaaaatgggatattaatctgcctcaggaggcattcattcctgagaccatatacacagaagaggaggatttcgagtgctctgagaataagaagagcttcgacataaactccgtgtctagcatttgtgccatccaggttggcataccctcacgtaagggcagccctaagtgcgacaaatttaagacttactttaagttcaaccttgacagcgtggggaaacagcattcagaatatgaatatgggaatgacctcagtctctctactgacattcgccaccaaaagagccatacaacaatgaattcatacgagtgttatcagtgcgggaaagccttctgtcgctcgtcatcgctcatcagacatcagatcatacacaccggtgagaagccgtataaatgcagcgaatgcggcagattcttcaaccgacggacaaacctgaccaagcaccagaaattacacgctgaagccaaggcctgtacttcaaataagtgcggaaaggcttttagtaaatccgaggatagtaacaaccctacacttcacttcgggaacaatttctaccagtgtgtgaattgcgggaaatcttttaaccggtcatccagcctgatccggcaccaaatgatccatacaggagagaaaccgtttaaatgtaaggaatgtagcaaggctttcaacaggagttcaaatctggtgaaacaccaaaagctgcacacacgtgacaagagctag

SEQ ID NO: 175177 - DNA, 1554 bp, Artificial Sequence
  derived and/or modified sequence
atgcaaccgttatccaagctgatggccatctcaaaacccaggaatttaagcctgcgggaacagcgcgaggttttacgggctgacatgagttggcagcaagagaccaaccccgtggtggagacacacgattccgaggcttctcgacaaaagttcaggcatttccagtacctcaaggtgagtggccctcatgaagccttgagccagctttgggagctctgtctgcagtggctgcgccctgaaattcacaccaagaagcagataatagaactattagtgctcgaacagtttctggctatcctccctgaagaggtgagaacatgggtgaatttgcaacaccccaacaactcaaaggacatggttacacttattgaggatgtgatagagatgctcgaggatgaggacatgccatgcaaggatagcgccctccaaatgggctccataaaggagaagatgaaggccggttcacgaactggcaagcctcaggaacccgttacctttaaagatgtagtggtagagttctcaaaagaggagtggggccagttggactccgccgtgaagaacctataccgtaacgtgatgttggaaaatttccggaatctgaacagcctaagaaaagcccacctcctcagtaaaccctttgaaagtctgaaattagagagcaagaagaagcgttggatcatggagaaggagattccacggaaaacaatatttgacatgaaatctatcagcggcgaggaaagcagccacggcgtgatcatgactcggttgacagagagcgggcacccaagctctgacgcttggaaaggagaaaactggctctatagaaatcagaaaaagtgggacattaatctgccacaagaagcattcataccggaaaccatatatactgaggaagaagactttgagtgcagcgagaataagaagtcttttgacataaactcagttagttcaatttgtgcgatacaagtcggcattccaagcaggaagggcagccccaagtgcgacaagttcaaaacatatttcaagttcaacctggactccgtggggaagcagcacagcgagtacgaatacggcaacgacctgtccttatctactgacattcgccatcaaaagtcacacacaaccatgaacagctatgagtgctatcagtgtggcaaagcgttttgcagatccagctctctcatcaggcatcagatcattcatacgggcgaaaaaccttacaaatgtagcgaatgcggcaggtttttcaacaggcgcacaaatctgactaagcaccagaagctgcacgccgaggcaaaggcctgcacttctaacaaatgcggaaaggccttctccaaaagtgaagattctaacaaccctactcttcattttggcaacaacttttaccagtgtgtgaattgtggcaaaagtttcaatcgcagctcctcactcattaggcaccaaatgatccatacaggtgaaaaacctttcaagtgtaaagagtgttctaaagccttcaatagatcctctaaccttgttaagcatcagaaactacacacgcgggacaagagctag

SEQ ID NO: 175178 - DNA, 3448 bp, Artificial Sequence
  derived and/or modified sequence
tgcagaaagggacggggctggcaaaggcctggtctacctcaccgatccgggtcgcgggggctcctagggggttccttccacagctggtgcgcgtgcgcaagagtgcgtcgaggttgttccgcggcaatttatgaaactcggagccggcagtgagttgagggttcggcgaggtcagggattcctagttgcagcgtgattaccaacgccagctcccttcactgtccaagacagcgattccgcggctcctctgagaactggcgctttgttcatcatttgccacttaagctacttgcagtcacgtcacaccttggatctctatcatcaaaactattccacctcggaaatcttacctaaatgcagcatgccatcctgaacgtctctccctgtcctagctctgtaactgtttacattgctcaggtacctgaatattggctttgtgtctaaagtttctggaactttcctccttaccgtgaaataacttggcttaaatcacactgcatatagtacacaggtgcttagctcaagcctgagaattactgcaatctagtaaggcggatttgaactactgtgggagttctatttaggaagatgcagcctctgagcaagttgatggctatctcaaaacctcgaaacctgtctctacgtgaacaaagagaggttctgagagcagatatgtcttggcagcaggaaaccaaccccgtcgtggagacacatgactctgaggcatctcgtcaaaagttcagacatttccagtatttgaaagtgtctgggccccatgaagccctgagccaactctgggagctctgtcttcaatggctgagaccagagattcatacaaagaagcagattatagaactgttggtgctggaacaattcctggcaatcctgcctgaagaagtcaggacttgggtgaatttacaacatccaaacaacagtaaagatatggtgaccctcatagaagatgtgattgaaatgcttgaagatgaagatatgccctgcaaggactctgccctgcagatggggagcatcaaggagaaaatgaaagctggctcacgaacaggcaaaccacaggaaccagtgacattcaaagatgtggttgtggaattcagcaaggaagagtgggggcaactggactctgctgtaaagaacctgtacaggaatgtgatgctggaaaactttaggaacctgaattcattgcgtaaagcacatctactttccaaaccatttgagagccttaagttggagagtaagaaaaaaagatggataatggagaaagaaataccaaggaagactatttttgacatgaagagtatttctggagaagaatcatcccatggagtgattatgacaaggcttaccgaaagtggacacccttcttcagatgcctggaaaggtgagaattggttatataggaaccagaaaaaatgggacataaatttgccacaagaggctttcattcctgagacaatttacactgaggaggaagattttgaatgtagtgaaaataagaaaagctttgatattaattcagttagctcaatttgtgctatacaagtgggaattccttcaagaaaggggtctccaaaatgtgataagtttaaaacttacttcaaatttaatttagactcagtaggtaagcaacattcagaatatgaatatgggaatgacttgagtttgagtacagatattcgacaccaaaaaagtcatactacaatgaattcctatgaatgttatcaatgtgggaaagccttctgccgaagttcatcccttattcgacatcagatcattcacacaggagagaaaccctataaatgcagtgaatgtgggagattcttcaaccgacgtacaaaccttactaagcatcaaaaacttcatgctgaagcaaaggcctgcacaagcaataaatgtggaaaggccttcagtaaaagtgaagacagtaataatccaacactccattttggaaacaatttctatcaatgtgttaactgtggaaaatccttcaaccggagctcctctcttattcgacaccaaatgattcacacgggagagaaaccattcaaatgtaaggaatgtagtaaagccttcaacaggagttcaaaccttgttaaacatcaaaaactgcatactcgagataagtcctgaaaaaagaaaaaatgaaagattaccttcagtcagaatgcagaactcatttaacatcatgaatttatgctggataaaatctcatgaatataatgtaagaaaacatttgtcagatttttctttaaatgatatcacagaattaatgttggatagaaatatcattggatagaaatctgtttgaaggaattttcctggttttcagatgaagccataaggctttggagttaaaccacagtatcaccatacaagtatttgtttatcattattttgatatccattaccctcacctctccctagttcataaataggtctatagcatactaatatccacctgatttattgacgaagtagacattaggcaaagccaaacaatactcttggagttgatatttaataaaactcagcccttttaagaaggtcacaagaaatcattagctcatgcgaatataagagaatacttctaaggacagaaatctctgaatcaatggctaagacaacagtaacagccatttactccactcctgacaataccctttgttgtcttgctgttgaatggagactagagttgggaaagggttatcaactgcaatgggagaagtatgtattgctgttaatctatatgtattcttaaaatctgcatttgtttatagcaggtccttgaaaaatgtttttgttttgttataatgttataattgttatgatgttgatgagaaaaatatcgattcccagccagggacactgtgtggagttcgcacactctccctatgtctccgggtgctccagtttcaaaccccaaagatgtatacattaggttaattgacatatctaaattatctcagtctgagtttgtgaggaagtgtgccctgcagtggaatggctcctaatcagggtttgttcccaccattgccctgagctgctaggatgcgctctgtccacccatggccctgtactggaataacagggtaaataattatcttatctgtttttattaatccgtcttaaatgtgtatatagctcagatttattttaatgtctgatattggaagcgtttggggtctttagaagtttgatgatgttgtgaccagacatttgccttaggaacttaactcttgtttgtatccattagtctatggtaaaattggttttgttatacatcatttcacttaaagttgcagttcctaagaacctattgatgatgttcagtgcagacttactgtacctttgggaatttaggctggagagacgtccatagccttaggtatatcatttataccagacattatgaagttattaaagtctcctatactct

SEQ ID NO: 175179 - DNA, 3257 bp, Artificial Sequence
  derived and/or modified sequence
agagtgcgtcgaggttgttccgcggcaatttatgaaactcggagccggcagtgagttgagggttcggcgaggtcagggattcctagttgcagcgtgattaccaacgccagctcccttcactgtccaagacagcgattccgcggctcctctgagaactggcgcttgtgagtgactgaacgggccactggagaggagcggtgctcacggttgctcaggtacctgaatattggctttgtgtctaaagtttctggaactttcctccttaccgtgaaataacttggcttaaatcacactgcatatagtacacaggtgcttagctcaagcctgagaattactgcaatctagtaaggcggatttgaactactgtgggagttctatttaggaagatgcagcctctgagcaagttgatggctatctcaaaacctcgaaacctgtctctacgtgaacaaagagaggttctgagagcagatatgtcttggcagcaggaaaccaaccccgtcgtggagacacatgactctgaggcatctcgtcaaaagttcagacatttccagtatttgaaagtgtctgggccccatgaagccctgagccaactctgggagctctgtcttcaatggctgagaccagagattcatacaaagaagcagattatagaactgttggtgctggaacaattcctggcaatcctgcctgaagaagtcaggacttgggtgaatttacaacatccaaacaacagtaaagatatggtgaccctcatagaagatgtgattgaaatgcttgaagatgaagatatgccctgcaaggactctgccctgcagatggggagcatcaaggagaaaatgaaagctggctcacgaacaggcaaaccacaggaaccagtgacattcaaagatgtggttgtggaattcagcaaggaagagtgggggcaactggactctgctgtaaagaacctgtacaggaatgtgatgctggaaaactttaggaacctgaattcattgcgtaaagcacatctactttccaaaccatttgagagccttaagttggagagtaagaaaaaaagatggataatggagaaagaaataccaaggaagactatttttgacatgaagagtatttctggagaagaatcatcccatggagtgattatgacaaggcttaccgaaagtggacacccttcttcagatgcctggaaaggtgagaattggttatataggaaccagaaaaaatgggacataaatttgccacaagaggctttcattcctgagacaatttacactgaggaggaagattttgaatgtagtgaaaataagaaaagctttgatattaattcagttagctcaatttgtgctatacaagtgggaattccttcaagaaaggggtctccaaaatgtgataagtttaaaacttacttcaaatttaatttagactcagtaggtaagcaacattcagaatatgaatatgggaatgacttgagtttgagtacagatattcgacaccaaaaaagtcatactacaatgaattcctatgaatgttatcaatgtgggaaagccttctgccgaagttcatcccttattcgacatcagatcattcacacaggagagaaaccctataaatgcagtgaatgtgggagattcttcaaccgacgtacaaaccttactaagcatcaaaaacttcatgctgaagcaaaggcctgcacaagcaataaatgtggaaaggccttcagtaaaagtgaagacagtaataatccaacactccattttggaaacaatttctatcaatgtgttaactgtggaaaatccttcaaccggagctcctctcttattcgacaccaaatgattcacacgggagagaaaccattcaaatgtaaggaatgtagtaaagccttcaacaggagttcaaaccttgttaaacatcaaaaactgcatactcgagataagtcctgaaaaaagaaaaaatgaaagattaccttcagtcagaatgcagaactcatttaacatcatgaatttatgctggataaaatctcatgaatataatgtaagaaaacatttgtcagatttttctttaaatgatatcacagaattaatgttggatagaaatatcattggatagaaatctgtttgaaggaattttcctggttttcagatgaagccataaggctttggagttaaaccacagtatcaccatacaagtatttgtttatcattattttgatatccattaccctcacctctccctagttcataaataggtctatagcatactaatatccacctgatttattgacgaagtagacattaggcaaagccaaacaatactcttggagttgatatttaataaaactcagcccttttaagaaggtcacaagaaatcattagctcatgcgaatataagagaatacttctaaggacagaaatctctgaatcaatggctaagacaacagtaacagccatttactccactcctgacaataccctttgttgtcttgctgttgaatggagactagagttgggaaagggttatcaactgcaatgggagaagtatgtattgctgttaatctatatgtattcttaaaatctgcatttgtttatagcaggtccttgaaaaatgtttttgttttgttataatgttataattgttatgatgttgatgagaaaaatatcgattcccagccagggacactgtgtggagttcgcacactctccctatgtctccgggtgctccagtttcaaaccccaaagatgtatacattaggttaattgacatatctaaattatctcagtctgagtttgtgaggaagtgtgccctgcagtggaatggctcctaatcagggtttgttcccaccattgccctgagctgctaggatgcgctctgtccacccatggccctgtactggaataacagggtaaataattatcttatctgtttttattaatccgtcttaaatgtgtatatagctcagatttattttaatgtctgatattggaagcgtttggggtctttagaagtttgatgatgttgtgaccagacatttgccttaggaacttaactcttgtttgtatccattagtctatggtaaaattggttttgttatacatcatttcacttaaagttgcagttcctaagaacctattgatgatgttcagtgcagacttactgtacctttgggaatttaggctggagagacgtccatagccttaggtatatcatttataccagacattatgaagttattaaagtctcctatactctgtacaccagaa

SEQ ID NO: 175180 - protein, 188 aa, Artificial Sequence
  derived and/or modified sequence
MNWHMIISGLIVVVLKVVGMTLFLLYFPQIFNKSNDGFTTTRSYGTVSQIFGSSSPSPNGFITTRSYGTVCPKDWEFYQARCFFLSTSESSWNESRDFCKGKGSTLAIVNTPEKLKFLQDITDAEKYFIGLIYHREEKRWRWINNSVFNGNVTNQNQNFNCATIGLTKTFDAASCDISYRRICEKNAK

SEQ ID NO: 175181 - DNA, 567 bp, Artificial Sequence
  derived and/or modified sequence
atgaattggcatatgataatctctggcctgatcgtcgtcgtattgaaagtggtggggatgacactgttcctcctctacttcccacagatcttcaataaaagcaatgatggctttacaacgacaagaagttacggtacagtgtcacagatcttcggcagctctagcccctcgcccaatggcttcatcacgacgagaagctacggcaccgtgtgtcctaaggactgggaattttaccaggctaggtgcttcttcctcagcacctcggaaagcagctggaatgaaagtcgggacttttgtaagggcaagggaagtacccttgcaatcgtgaacactccagagaaattaaaattcctgcaagacattactgacgccgagaaatactttatcggcttgatataccacagggaggagaagcggtggcgctggattaacaattccgtatttaatggcaatgtgaccaaccagaaccaaaacttcaattgcgccaccatcggcttaactaaaaccttcgacgccgcttcctgtgatatctcctatcgccgaatatgtgaaaagaatgctaagtag

SEQ ID NO: 175182 - DNA, 567 bp, Artificial Sequence
  derived and/or modified sequence
atgaactggcacatgatcatcagcggcctgattgtggtggtgctgaaggtggtgggcatgaccctcttcctgctgtacttcccccagatcttcaacaagagcaatgatggcttcaccaccaccaggagctatggcaccgtgtcccagatcttcggcagcagcagccccagccccaacggcttcatcaccaccaggagctatggaacagtgtgccccaaggactgggagttctaccaggcccgctgcttcttcctgagcaccagcgagagctcctggaatgaaagccgggacttctgcaagggcaagggcagcaccctggccatcgtgaacaccccagagaagctgaagttcctgcaggacatcacagatgctgagaagtacttcatcggcctcatctaccaccgggaggagaagcgctggcgctggatcaacaacagcgtcttcaatggaaatgtgaccaaccagaaccagaacttcaactgtgccaccatcggcctgaccaagacctttgatgctgccagctgtgacatctcctaccgccgcatctgtgagaagaatgccaagtag

SEQ ID NO: 175183 - DNA, 567 bp, Artificial Sequence
  derived and/or modified sequence
atgaactggcacatgatcatcagcggcctgatcgtggtggtgctgaaggttgtgggcatgacgctgttcctgctgtatttcccccaaatttttaataagtcaaatgacgggttcactaccacgagatcttatggaaccgtgtcccagatcttcggatcatcctcgccatctcccaacggctttattactaccagatcatacggtactgtgtgtccaaaggattgggagttttatcaggcaaggtgctttttcctgagcacctcggaaagctcctggaacgagagtcgtgatttttgcaaggggaaaggaagcacactggccatcgtgaacactcccgagaaactgaaatttctgcaagatattaccgacgccgaaaagtactttataggactgatttaccatcgcgaagaaaaacggtggaggtggattaataactcagtcttcaatgggaacgtgaccaaccagaatcagaacttcaactgcgccacgataggactcacaaagacttttgatgccgctagttgcgatataagctaccgccgcatttgcgaaaaaaatgctaaatag

SEQ ID NO: 175184 - DNA, 567 bp, Artificial Sequence
  derived and/or modified sequence
atgaattggcacatgatcatttccggccttattgtagtggtactaaaagtggtaggtatgaccctttttttgctctatttcccccaaatctttaataagtcaaacgatggcttcactactactcgttcctatgggactgtgtcgcaaatctttggcagtagcagtcccagtcctaacgggttcattactactaggagttatggcacagtgtgtccaaaagattgggaattctaccaggccaggtgtttctttctttccacatccgagagcagctggaacgaaagtagagatttttgtaaagggaagggcagtacactggccatagtcaacacccctgaaaaactgaagtttctacaggacatcactgatgccgaaaagtatttcataggactcatttaccaccgtgaagagaaaagatggcgctggattaacaatagcgtctttaacggaaatgtgactaatcaaaaccagaatttcaactgtgccacgatcggactaaccaaaacttttgacgctgcctcttgtgacatctcttaccgcagaatttgcgagaagaacgccaaatag

SEQ ID NO: 175185 - DNA, 3511 bp, Artificial Sequence
  derived and/or modified sequence
caggaagaggtatttcttggggatgctaccaaggcagagactgtgaagaaggaagaacgttgcttgggcaaaaggagcatattctcaggagacggggcccctgcctgccacaccaagcattaggccaccaggaagacccccatctgcaagcaagcctagccttccagggagaaagaggcccctgcagctccttcatcatgaactggcacatgatcatctctgggcttattgtggtagtgcttaaagttgttggaatgaccttatttctactttatttcccacagatttttaacaaaagtaacgatggtttcaccaccaccaggagctatggaacagtctcacagatttttgggagcagttccccaagtcccaacggcttcattaccacaaggagctatggaacagtctgccccaaagactgggaattttatcaagcaagatgttttttcttatccacttctgaatcatcttggaatgaaagcagggacttttgcaaaggaaaaggatccacattggcaattgtcaacacgccagagaaactgaagtttcttcaggacataactgatgctgagaagtattttattggcttaatttaccatcgtgaagagaaaaggtggcgttggatcaacaactctgtgttcaatggcaatgttaccaatcagaatcagaatttcaactgtgcgaccattggcctaacaaagacatttgatgctgcatcatgtgacatcagctaccgcaggatctgtgagaagaatgccaaatgatcacagttccctgtgacaagaactatacttgcaactctttttgaatccatacaggtcgtctggccaatgattcttttacttacctatctgtctaccagtagcggtccttgcccatttgggaaactgagcttctttcttctgcactgggggactggatgctagccatctccaggagacaggatcagttttacggaaacaactcagttagtatagagatgaggtccgcttctgtagtactgagcatttctgactgatcaaaaaggcctagtctgttgacagggtttgttttattttagcctcagagtataccatactactagggagtaactgtagagtgagaaattataaacattatttagggattaccatggtggaagagggataaacataggtcctgtgacttcgtctctgttctcaagggaaccccattcacatgcccctcctaactccacaagcgagggtagcagaggctctcctcagtctgaactaaggcttggccttggggagggctcctagtgctgagcttggagcagcacggacagcagcattgtttatgggaatggagagaggtctgggcaggataggaaccttcttggagacccctttgaagaaaaccaggcagccaagggagccaaacacactagatttctgttcttcagcaaagccctgaagagacacttaagctaaaaattcccttgtcatatttctgaaactccattataacatatgtaactcctttgtaaccaaaatttaggtaagcaggcttcctttgctctgaaggttttgagtacctggctgtatttgttgagtatttttaaaattttggatagtctcttaggcaacaataatcacaatatattcatcccttcagttctggagaaagcctgataccaggcacagcctactgaccccaaggagcctggcactgattggcatcacattgatctagaactggtccagccgacgaagagtaggaaaagagaagggctgctcagggaaacattggctgggggcacggaataagcacatagtaaaaagggaacatcagggtcaaatggaaatcacctgagacaggaaacagggagttcatttggccacactggaagaaaggcaagaaagaggaagacaagtcttggagtaccctggctgttctccacactcacaagacatcagctatatactctgcttggtgcataagaaagagaaaagagatgccttttgtgttttgagtaagaataattaaaccataaggaagaccatgtataaaactgatggaaataatagtcaccaaagtacagcacataccattttgtgtctaataacaatgtagcacagtaatgactgtacatgtcattgtatgtataccaaacaagattgttgtaaatcatattttttattacaacactaagttctgcttctgcattcctaggtttcatcatttttggctccttagcatggccacttacaattttttaacatgagataacacatcaggtgtcagaacttgcttgaagggaattaccagaagtaatttgtgtttgagatggggtggaaattggaattatattagtagccggtggagatacaagttctctgactgtgttgggaaaggataagtgctaccgttgagaagggaagaaaggctgagtctaggtggagaaaaatatcaacagaactctagccaaaggcaagccccagaactcagacaacagaaaggaaatcctaatccttctgttttgagaagagagaactgtagttgcttcacttcctatttcatgacagaataactgcaaacttttaagatcaggaaatgtagacatctagtgatttctttagtagacagtttaatttcccccaagattaggagacacttctgtgcaggttctaaaaggagcccaatggcctggggtgggagtggggagtagatagggaatatgtgggatttggtttaagttcatcattggaagagttcctggatccttgcaagcttagataaatgtgatctttattagatagcagtggcatgctttaaaaaaaaaaaaggcaatgaaaatttagcaagccactgaatttgagttttcactttgtttctaatatgctgtgtgaatcagtacagttttcttaccctttcttggtcttaatttccttactgataaaatggggtagtaatacctatctcaaaaaattattgcacatattaaataacattcctctatgtatctcaatggcattagacattaggagaagcattttgtggaggatttgaagttgagatcttcatccaagaagtagcttttcaatttgctagaagcttaatgtaggcaagccacttcatttttcagaacttgtttactcatttataatatgggaataaaaatttgtgcaagtcagagaagggtgccttaaaaatgttgtggccaagccacatgagatcaaagacacacttttcatgacctcaaatgtgggcccagcctaggtcagccaacccccatccaacccttagactcacgaacaaatccacctgagatcagcagagccaccctagatcagctgaaactctaagcacaaaaataaaaacttatcactgtataccactggagttttctggttatctctcgtatagcaaaatctaactgatgcaatctccatctggccttcatccttctccctttattgtcctttcgtgtattgttcatccagcaaccaggatgatcttgttaaaacattaaacagattctgtcactctt

SEQ ID NO: 175186 - DNA, 567 bp, Artificial Sequence
  derived and/or modified sequence
atgaactggcacatgatcatcagcggcctgatcgtggtggtgctgaaggtggtgggcatgaccctgttcctgctgtacttcccccagatcttcaacaagagcaacgacggcttcaccaccaccagaagctacggcaccgtgagccagatcttcggcagcagcagccccagccccaacggcttcatcaccaccagaagctacggcaccgtgtgccccaaggactgggagttctaccaggccagatgcttcttcctgagcaccagcgagagcagctggaacgagagcagagacttctgcaagggcaagggcagcaccctggccatcgtgaacacccccgagaagctgaagttcctgcaggacatcaccgacgccgagaagtacttcatcggcctgatctaccacagagaggagaagagatggagatggatcaacaacagcgtgttcaacggcaacgtgaccaaccagaaccagaacttcaactgcgccaccatcggcctgaccaagaccttcgacgccgccagctgcgacatcagctacagaagaatctgcgagaagaacgccaagtag

SEQ ID NO: 175187 - protein, 735 aa, Artificial Sequence
  derived and/or modified sequence
MAAGGAVAAAPECRLLPYALHKWSSFSSTYLPENILVDKPNDQSSRWSSESNYPPQYLILKLERPAIVQNITFGKYEKTHVCNLKKFKVFGGMNEENMTELLSSGLKNDYNKETFTLKHKIDEQMFPCRFIKIVPLLSWGPSFNFSIWYVELSGIDDPDIVQPCLNWYSKYREQEAIRLCLKHFRQHNYTEAFESLQKKTKIALEHPMLTDIHDKLVLKGDFDACEELIEKAVNDGLFNQYISQQEYKPRWSQIIPKSTKGDGEDNRPGMRGGHQMVIDVQTETVYLFGGWDGTQDLADFWAYSVKENQWTCISRDTEKENGPSARSCHKMCIDIQRRQIYTLGRYLDSSVRNSKSLKSDFYRYDIDTNTWMLLSEDTAADGGPKLVFDHQMCMDSEKHMIYTFGGRILTCNGSVDDSRASEPQFSGLFAFNCQCQTWKLLREDSCNAGPEDIQSRIGHCMLFHSKNRCLYVFGGQRSKTYLNDFFSYDVDSDHVDIISDGTKKDSGMVPMTGFTQRATIDPELNEIHVLSGLSKDKEKREENVRNSFWIYDIVRNSWSCVYKNDQAAKDNPTKSLQEEEPCPRFAHQLVYDELHKVHYLFGGNPGKSCSPKMRLDDFWSLKLCRPSKDYLLRHCKYLIRKHRFEEKAQVDPLSALKYLQNDLYITVDHSDPEETKEFQLLASALFKSGSDFTALGFSDVDHTYAQRTQLFDTLVNFFPDSMTPPKGNLVDLITL

SEQ ID NO: 175188 - DNA, 2208 bp, Artificial Sequence
  derived and/or modified sequence
atggctgctggaggggccgtagcggccgcacccgaatgtagacttctgccatatgcactccataagtggtcgtcattcagcagtacttatttgcccgaaaatattctggtggataaaccaaatgaccagtctagccggtggagctccgagagtaactaccctccacaatacctgattctcaaattagaacgaccggccatcgtacagaatattactttcggtaagtacgagaagacacacgtgtgcaatctcaagaaatttaaagttttcggcgggatgaatgaagagaacatgactgaattgctctcttccggcctgaaaaacgactacaacaaggagacattcaccctaaagcacaaaatagatgaacagatgttcccctgccggtttatcaagatagtgccactactgagctggggccctagttttaattttagcatatggtatgtggagctcagcggcatcgacgatcctgacatcgtccagccctgcctcaattggtactctaagtacagagagcaggaggctatccgcttgtgcctgaaacacttcaggcagcataactatactgaggcctttgagtcactgcagaagaaaaccaagatcgccctagaacatcccatgctgactgacattcacgacaaactggtcctcaagggggacttcgatgcttgtgaagaattgatcgagaaggctgtgaacgacggcctttttaaccagtatatcagccagcaggagtacaagccccgatggagccagattataccgaagtctacaaaaggggatggtgaggacaatcggcccggtatgcgggggggccatcaaatggtcatcgacgtccagaccgagaccgtctatctgttcggcggctgggacggaacccaggacttagcagacttttgggcctactctgtcaaagagaaccagtggacctgtatttcacgcgacaccgagaaggaaaacggtccctccgcccgcagttgtcacaaaatgtgcattgatatccagcgccggcagatctacactctcggcagatatttggatagctccgtccggaactcgaaatcacttaagagcgacttttatcgatacgatatcgacacaaacacttggatgctcttgagcgaagacactgccgcagatggtgggcccaagctcgtgttcgatcaccagatgtgtatggacagtgaaaaacatatgatatatacattcggaggtcgcattctgacttgcaacgggtctgtggacgactctcgcgcctctgagcctcaattttctggactttttgcttttaactgccagtgtcagacatggaaactgttgcgtgaggactcctgtaacgcaggcccggaagacattcagtccaggattgggcattgtatgttgtttcattctaagaatcgatgtttgtatgtctttgggggccagcgcagcaaaacatacctgaacgacttcttctcatacgatgtcgatagtgaccatgtggacataatctcagatggaaccaagaaggacagcgggatggtcccgatgacaggctttacccagcgcgcgactatagaccctgagttgaacgagattcacgtgctaagcgggcttagcaaggacaaagaaaagcgggaggagaacgtgaggaactctttctggatttatgatattgtaagaaattcgtggtcctgcgtctataaaaacgaccaggcagccaaggacaatcctactaagtccctgcaagaggaggaaccatgccccaggtttgcccaccaactggtctacgacgagctacacaaggttcactatttgtttggcgggaatcctgggaagtcttgcagccccaaaatgcgacttgacgacttttggtccctcaaattatgcagacctagtaaggattatttgctccgtcattgtaagtacctgatccggaaacacaggttcgaggaaaaagcccaagttgatccccttagcgccttgaagtatctccagaacgatctgtatatcaccgtggatcactcggatccagaagagactaaagagttccagctacttgcttcagccctgttcaagtctggctcggactttaccgccttaggatttagcgacgttgaccacacttatgcccagcgaacccagctgtttgacacccttgttaacttctttccagactcaatgactcctcccaagggaaatttggtggaccttattactctgtag

SEQ ID NO: 175189 - DNA, 2208 bp, Artificial Sequence
  derived and/or modified sequence
atggctgctggaggagctgtggccgccgcccctgagtgccgcctgctgccctatgccctgcacaagtggagcagcttcagcagcacctacctgcctgagaacatcctggtggacaagcccaatgaccagagcagccgctggagcagcgagagcaactacccaccccagtacctgatcctgaagctggagaggcctgccatcgtgcagaacatcaccttcggcaagtatgagaagacccacgtgtgcaacctgaagaagttcaaggtgtttggaggcatgaatgaggagaacatgacagagctgctgagcagcggcctgaagaatgactacaacaaggagaccttcaccctgaagcacaagattgatgagcagatgttcccctgccgcttcatcaagatcgtgcccctgctgtcctggggccccagcttcaacttcagcatctggtacgtggagctgtctggaattgatgatcctgacatcgtgcagccctgcctgaactggtacagcaagtaccgggagcaggaggccatccggctgtgcctgaagcacttccggcagcacaactacacagaggcctttgagagcctgcagaagaagaccaagatcgccctggagcaccccatgctgacagacatccatgacaagctggtgctgaagggggactttgatgcctgtgaggagctgattgagaaggctgtgaatgatggcctcttcaaccagtacatcagccagcaggagtacaagccccgctggagccagatcatccccaagagcaccaagggagatggagaggacaaccggcccggcatgaggggcggccaccagatggtgattgatgtgcagacagagaccgtgtacctgtttggaggctgggatggcacccaggacctggccgacttctgggcctacagcgtgaaggagaaccagtggacctgcatcagccgggacacagagaaggaaaatggccccagcgcccggagctgccacaagatgtgcatcgacatccagaggcggcagatctacaccctgggccgctacctggacagctctgtgaggaacagcaagagcctgaagagtgacttctaccgctatgacatcgacaccaacacctggatgctgctgtctgaggacacagctgctgatggcggccccaagctggtgtttgaccaccagatgtgcatggacagcgagaagcacatgatctacaccttcggcggccgcatcctgacctgcaatggatctgtggatgacagccgggccagcgagccccagttcagcggcctgtttgccttcaactgccagtgccagacctggaagctgctgcgggaggacagctgcaatgccggccctgaggacatccagagcagaattggccactgcatgctgttccacagcaagaaccgctgcctgtatgtgtttggaggccagaggagcaagacctacctgaatgacttcttctcctatgatgtggacagcgaccacgtggacatcatcagtgatggcaccaagaaggacagcggcatggtgcccatgacaggcttcacccagagggccaccatcgaccctgagctgaatgagatccacgtgctgagcggcctgagcaaggacaaggagaagcgggaggagaatgtgagaaattccttctggatctatgacatcgtgagaaattcctggagctgtgtgtacaagaatgaccaggccgccaaggacaaccccaccaagagcctgcaggaggaggagccctgccccaggtttgcccaccagctggtgtatgatgagctgcacaaggtgcactacctgtttggaggcaaccctgggaagagctgcagccccaagatgaggctggatgacttctggagcctgaagctgtgccggcccagcaaggactacctgctgcggcactgcaagtacctgatcaggaagcacagatttgaggagaaggcccaggtggaccccctgagcgccctgaagtacctgcagaatgacctgtacatcaccgtggaccacagcgaccctgaggagaccaaggagttccagctgctggccagcgccctcttcaagagcggcagtgacttcaccgccctgggcttcagtgatgtggaccacacctacgcccagaggacccagctgtttgacaccctggtgaacttcttcccagacagcatgaccccacccaagggcaacctggtggacctgatcaccctgtag

SEQ ID NO: 175190 - DNA, 11156 bp, Artificial Sequence
  derived and/or modified sequence
gctgccagcggtcggtggcggccgctacggtgctgacaagatggcggctggcggagctgtcgctgcggcgcccgagtgccggcttctcccctacgcgctacacaagtggagctccttttcctccacctaccttcccgagaacattttagtggacaaaccaaatgaccaatcttcaagatggtcttcagagagcaactatcctccccagtacttgattctaaagctcgaaaggcctgctatagttcagaatatcacatttggaaaatatgagaaaactcatgtttgcaatttgaagaaatttaaagtctttggtggaatgaatgaagaaaatatgacagagctgttgtccagtggcttaaagaatgattataacaaagaaacattcaccttgaagcataaaattgatgaacagatgttcccttgtcgattcattaaaatagttccactcttgtcctggggacccagctttaactttagcatctggtatgttgaacttagtggcattgatgatcctgatatagtacaaccttgtctcaactggtatagcaagtaccgtgaacaggaagctattcgcctttgcctaaaacacttcagacaacacaactatacagaagcttttgagtcactgcaaaagaaaaccaagattgcactggaacatcccatgttaacagatattcatgacaagctggtgttgaagggtgattttgatgcttgcgaagagttgattgaaaaggctgtaaatgatggcttgttcaatcagtatatcagtcaacaggaatataagccacgatggagtcaaatcattcccaaaagtaccaaaggtgatggggaagataaccgtccaggaatgagaggaggccatcagatggttattgatgttcaaacagagactgtttatttgtttggtggctgggatggaacacaagatcttgctgacttctgggcgtacagtgtgaaggagaaccagtggacatgtatctctagagacactgaaaaagagaatggtcctagtgccagatcgtgtcataaaatgtgcattgatattcaacggaggcaaatctacacattggggcgttacttggattcctctgtgaggaacagcaaatctctgaaaagtgacttctatcgttatgacattgatacaaacacatggatgttactaagtgaggatactgctgctgatggagggccgaaattggtgtttgatcatcagatgtgtatggactcagaaaaacatatgatctacacttttggtggtagaattttgacttgtaatggcagcgtagatgacagcagagccagtgaaccacaattcagtggcttgtttgctttcaactgtcaatgtcaaacctggaaacttcttcgagaggactcctgtaatgctgggcctgaggacatccagtctcgaataggacactgcatgttattccactcaaaaaatcgttgcttatatgtatttggtggccagcgatcaaagacctatttgaatgatttctttagttatgatgtggactctgatcatgtagacataatatcagatggcaccaagaaagactctgggatggttccaatgacaggatttacacagagagcaactattgatccagaactgaatgaaatacacgtcttatctggactcagcaaagataaggaaaagagggaagaaaatgttagaaattcattctggatttatgacattgtgaggaatagttggtcttgtgtctataagaatgatcaagctgcaaaggataatccaactaaaagtcttcaggaagaagaaccatgtccaaggtttgcccatcagcttgtatacgatgagctacacaaggttcattacttatttggtgggaatccaggaaaatcttgctctccaaagatgagattagatgacttctggtcactgaagttgtgtagaccttcaaaagattatttactgaggcattgcaagtacctcataagaaaacacaggtttgaagaaaaggcccaagtggatccccttagtgctctgaaatatttacaaaatgatctttatataactgtggatcattcagacccagaagagacaaaagagtttcagctcctggcatcagctctattcaaatctggttcagattttacagctctgggcttttctgatgtggatcacacctatgctcaaagaactcagctctttgacaccttagtaaatttctttcctgacagcatgactcctcctaaaggcaacctggtagacctcatcacactgtaactgaagagtcactggacacagaaatggaaaacaggagtcgattttccgtcttttggattgcagctccactgactgacagtaaagctgcagtgattgaggactgcaccagagttctgaagggatcttaaccatcacaagtttttaccctcttccttcatgcctgacctcaaccccgctctcctcatcctattcctaaattaggctaataaagtgaaattggtatactttccagttaaatatatatatatatatattttttcttactttatcttttaagaattaatgagtataaaagaaaaattaggcagtttacccttttcagatttttatttcttttttttttaattgggggaaataagcactattaacagattcagcactacaagtattttgaatgttgttgctgttggtcatttggcctgccttttcccttcctatttcactttgcctcccatcacacaactgcgtgtaaatggtgtcacttgttcacctctttacttcattcttaacaagtgtatagttctctaggacagttgatgtatgttaaggtgatatctgtgtctgtattgacttgtcttgtgttacattaaacagtaggcagaactgaggtctcaagtttgcactcttggccatagaactaaaaatgaaacctgagattgacccaagcacctatctgagattggtatataatatttctataatgatatattttatagtagatattacaatagcatctgactttgagtcacagaaaccttaaactgaggagacaatagttcagaacctttttaagagccattctaaaagtgaccagcaggagggatctagtagtgaataatatcttaatagcaattttaggagaaaatgactctttcgtccagaagagctctgcagaaccagggctcccgtttatcttgtgctatctctgtagtattttcatttgagagaggaggctgagtttccagagctttgctttcatttatttttatacacattgtctctctatatctgcttgtggatattgttattttgaagagaaatggtttgtggttgtccagtggtatacaactgacaggcatttcattaagcacatagaccagactttgtgaatggttcagatattttttcattaaaaaacaaggtatggcagatggacttttccatgggtcaaattttttgtgtgagagatagaggtacatgtcttctgatgatgtgctgtggaatgcaatgtgggaaacctacatctggctagtgcttacatttgctcaaaaagcatgttgtatgaagctgactgccaccatgctaaagcagattcatattaagaagtgtcggtcgatccagtggctcttaagagtgaatagctttatggaatcaagtatgtccctgagtagcaagattaggcctcaccaaagaagaaattaacctgcactttcaaaaagtaccatgtataggaatgaaacattgaggtcccactttattctgtctttagtacatggttttacttattttggggatggatagaaatatatttttgctagttctaggcttgaatcatgggctccttggctttcctagcatcccaaagcagtcaacagtgatttcttaagcaatttgatctgtacctttacttgtgaaaggtatgctatataattcagcaagtaccaacttgtgtagctgcagaataaccaagtggctatccagtcaagtaaatacagtttgcttacatacttcaacagtttcataaaacgattcccctgagtgacacaagaacataaaatgttaatatcactaatatagcctgttaaatcttttgtggagacaggtgcaaatcagaagattgacaaggaagaacttgagcttgctaaataagacttcctaaatttaaaagctctagttttgcttagtgtgaattctggcactttaaaaagattaagcaagtgaaattctgctgccctccaccatttatttttacagtgctttgtaatttttttcatcagttccttaaatgttatttggaggaaactaagttcttgacctcagtaattttatttttgtttttccctaaatgtttccctactagtctttttggaaaacatgtttgttttaatttcatcttccctcactttatttaggtagaatttttcccccttcatttctgaaattttttgctcaccgccatgtttaaatggggttgaatcatagcgagccatttgctcttgccaaagtgagatagatgtactgaggagataattgaaaagtcagactctgtactgtggggctttaatcggagcactgctggaaatgattgcagagaatgtagtgcttcatatatccatgaccaagattgacatgttgctcacaacatgtcacaatttagtgaggagctacatgtatttccaagaattccagcatagattataatttaaataatcgaatttggtatttaggtacattgtttatatagccaagtgtatatgctttactacctaacaattattctagcctaggtgaatccctaattgaaacacctggctaacactttagacacataaattaagtgggatacagttttctcatttgtattatctccagcttcaacctcatttatcctttttcctagtataatacattgttttcaaccagaaattaaagtagatatccaacattattttcagtgcttgtacttcatgagaaataatctgattttcaagacacctcttaagtgcatttgcattttattttggtaatggcagagacctcatgtggccagtttgattgattgaagaatgtatcactcttattcaagcaaaggaattcagacttaaatgcctacctctgtgctgaagctgacagacagtattaactcttatcaaggccatcttttagacctgattttcatttatatgaaaacagacctgtccatgtctaataagtaaaaactgatagaatacattaaaaagtcactggtttatcatagaaaagtttgatgggtttagagctcagtgatttaagcttgtaaaactgcattcttgggcaaaatatttatattgtatataaatggttggcagcttattccagttgatctcttcacatctgccttaaaagtgctatgtagagatacattaacagagttataataaaacagtgttttaaaatctagcctataaacaaaaactagtttgaggcacccaagcatttagtgagagattgagaatgatgcttaatggatcaaaaaagcaattaggagtatgttcctgattttattctctaaattatactcaatttcatggtaattacatgaagaagttacctgcaattattcttaacactacatggaattcactgggtaattgtgggtcatttatttcctgaaagtcacgtgaaatccttagctggttgaatgttgcacagtatttgagaattacggtttgaagtgatttctgtgggagggaatcattgcaatgtatattctaaataaagtcatctaactattaaaaaaaaaacacccttcctaacccttcttttcttaaaattccacattcatccacaatctcatccctttgtagaaattcttgcctgaattctcaccaagttttgaattcctaaggtagccccgatctaggatgtgaaggctgcccagaaaaagtttatggctggaggagtatcatacagtgtctacatatgatagtacttacagattaggtctttggatgctttaacacaaaagatttttgttatccttattagtcaaataacgctattcttttgtggttctagaccctggcttctatctccctgtgatttgttttaatgctgaaatgacttggctatccaaagcttctagtctagaggtctgttggttgaaggcagacatttccaagtttgttgaaataatacgaagctgactagcttacgtgaatgatgttgccctcatttgttttgggtgaggactcattactgcagtatattgatctcttcaccaaatgctttttctttttctgaataaatgctgtattagaggttctatttatatatgatttttaaaactttggtttccttctatccaccaaatactgtgaattgtttttccatttatttttcttagctaatgtaactttattcttcacttttttttagccctagacttcctagattttctgtggcattctgtaggacattgtattgcttggaaaaaaaaagatcaaaatcattctggggcaaatgctctattatccttatttatgacaagagaataatgaaattcataagaaattaataacattcagatattgctataaatgtacttgagtcattttcatttggggatagtaataatggctgtggcagctttaatggagaaacctgtgttggcctctttttctggcattaggatctcttgtcatagaactattggtaaagtacaggtttgatagcagagttcctgaattcagcatatcatcagaatttccatttaccttttgtcttttctttttattgtattttttaacctttttgtttctattcctacctcccatgagtaacattgatttctgctgaagttagaatttgtgttaagaattgactttaaacttctgaaatagttgaatattagaagtggcttcagttgccatgaaatgattgcttttctttttctttttttttccttaaataaaaataatgcagccttatatatgtctcttcccctcaagaatgtgaatttaggctgggcatagtgactcacgcctgtaatcccagacctttgggaggctgacacgggaagattgcttgagcccaggaatttcagaccagcctgggcaacacaggaagactccatctctacttaaaatatttttgttttttagccaggtgtggtggtatgtgcctgtagtcccagctacttgggaggctgaggtgggaggatcacttgaacccaggagtttggggtgcagtgagctatgattgcgacactgcactccagcctgggcaacagagcaagaccctgtctcaaaaaaaaaaaaaaaaaaagaatgtgaatttagctccaattccaaatgactaactcttaggccagtcatagccaatgaaatcatctgacggtagcttctgtagcccttaacctaaggagtcattagaggttatagtaaattagtttctctagtggtgcagagagaaatgccatcggggaaattatcactgtctttttggctaaagttttatattgtgaactggatcccacttaacagcttaaaaacacaaaaatgaaagggtagtcctagtttatcttcttaattagaatcattatttggaaataagatttgcaatgtgctgtctatccccaaacactgctgagcttgctggaaaacagaatttaacatgaatgttgtctgaaagctgtaggatcaatggcaaaaaaggggaaatgtttggtagggaattggaccagttctaaggtatcacttttaattataaaataatgtcttcctttttatctgcttttcagacagcctcagtgaactattaaacatttgtgtgcaaagtcctattttgcttatctaaggcattttgacttggaagtattaaacttcaggaacgagctagagaagacaatgagggtatgttagagaaggaaaaataggagctttttgcttatggattttagaggtccacaaatcgaaaggaaaaataaatttcttcatttctaaccctaaaataattttgttaatgagatgctgggaagaagactaccaaaaggcctcaaagctcatgcttctagaatattcagtaattctgaatagtctttgggaagtagcatttcttgggaagtagcatttcccttcttccaaataactgtttgagatcttaaaacagaaaatccagtgttaatgggctctagatcttaaactaggtgagcagcttcttacatacaaccagttccttgttaaggatccagcaggaaaaccagccataaaacatttcaacatgcagtttgggggctcccttgcttattcactgagtttaagctcttgctgcaacatagctctgtaccatctgggatgctagcagtcacagcagttagctcagatatctgagctgtctgccacacaaagcctgaggagatcatcattcttcagtttcattcattacttaatgaatgccaaattaattggcaggaagaagaaacactgtgtgatatactgaacaagcctgtgtgcatgaataaggagccactcaaaaagccaattttgagctttatttctccgttgttaacaaatctcaagaaagcctttgttacagtttagctcatgtcatttggttggttttattttctagccctttaacataggaggaaaattgtcatttcatgtataacttgtaacacagaattgaactgatactagtttccttgccttaaattaattatatgtcatcccaagggtctctgttaattctgctttgccaagcaataatgagatctgggtttggcattagaagtatttcataattttggttttttatttaggtttcctccacatctgtaaagtgattgattaaattagaggaggcgtgtagaataaatcccaatcccattgcaactggcagagctttataaatctttataaattcagttacaacaaaggagaggatcctacaccattagagccatgccatcaggtgtttgcaagtgacagctgtagtgtgttgcctcaaataataccaagttataaataataccaagtaattatcaactcactcccaaatttaataagatatcaaagtccaaaaggttacttaggagtagtcttccgtgggggaagataaatttattaaagagtcatgtactgatctttttcttgggattttttttcctttcccagaaaaaaaaattattttggtgactgatcaattgtaaacaattttcttccttacttacaaatcatccgttcagaaaaataaaagtggacttcctttcctaagcattacaattagcctgggcaagaggtgttatgattgtcttattctttaagccggcttactttttggatttgtgtgaaatgtcttttgaaaagaaagtagatagtatagtattaattaactactttgtatagtcttctgcataatttagagttgaaaataatgtaacattttcctgtgaacagattcctttatgcgtacatactttataaatatacatacatacacatacacatacatttttaaaatgctctttttaaagagattcttatcttgctcccactccaaaagctatgtacagttgagttattagcctcagaggaagagtacaggaaagcgaagatgaggacctccttttcttgtgttggtcttgggaacaaacagtattccgtctttcaaatatggcatatttctaaacagtttgggaaagatgttagaattttttaaaagtcagctcttttataaattggaagtactcagtagtcagaaattaagatcccctctgatagagatagattctcaaaaccaaaattggactgaaaattagattgagaagaaagatacaacttcctccatagccaataaaatctgtctttccaagtctgcttattaatgctgtgaatcgctccttctgtttgtgaaaacatctcctggactggaaatgtggtgctgtaaccagctgagccgaaagttggagaatgttaaatatcttatatgggacttacgataaaatgtattgatgttagtgattgtcaaaataggtttatcatttaaaaaactaggaaattactaagtataaagaagaaaaaccagtattaattaagtgatgagacctgttcattttgttttccctgacttatttccattaccaaacatagtaaaggccagaaaagattaaaaaaaaaattaacacagccattccattgttttttaccacatggagaaaggaccaggctggaagcatatgtccccccacccttatttatattcctttgagcattgccgttttctagacagacaatccgaaaataattgtgttgataggtctgtttaagcctgaactctgggtgtaaaatgttatccagaagctatagggagctgccttgctcaggtcattggaaatttcaaccctaagactcattggaatttctaagtccgttatgcaccattatgggcatatggagcatattcataccatgaggaggagtctttgtttatgatggactttttaatatggccataattaaactcacactcaaaaaggatgagctattgtcaaaagccaaaagaaaaacagacaaaatgaacatgaagcaaggagtccataaaacaagagttctttaccacgtttaagcaaatgtctctcaaaaaaaattgtatttctgtgcacattagctgagattcacacattttgcacctcagtagtatttcagatgagactcaatgtgtggagaaaaccgctaacttgtttggttctactcttaccccctcttctgtggcaatgtggggtcagggccgtatcctaaagtatccacatggtcttaaatggaaatcatgggactctggaaagctggcatgagctggttggagcttttaaacagaagtgctttatgggtatcagatctcttctgacatcaattgtttcaaatcattgttgggctctgtcgtgttctgcaatcttccccattcccctcatgatctctggcttatcttttatccaatctgtatggactttttaggattttttttttcttatagtacaaataattttcagatcccagctttggtaaatgtgttaattctactttgtgaataaataaatgagtgatctgctaaaaatggcaattgtagaattatgttgtatgtaatgtacatatggagaaagaatgtattttgttcattttcttaataaaatgttatatatggatgctacaag

SEQ ID NO: 175191 - DNA, 2408 bp, Artificial Sequence
  derived and/or modified sequence
ggccgctacggtgctgacaagatggcggctggcggagctgtcgctgcggcgcccgagtgccggcttctcccctacgcgctacacaagtggagctccttttcctccacctaccttcccgagaacattttagtggacaaaccaaatgaccaatcttcaagatggtcttcagagagcaactatcctccccagtacttgattctaaagctcgaaaggcctgctatagttcagaatatcacatttggaaaatatgagaaaactcatgtttgcaatttgaagaaatttaaagtctttggtggaatgaatgaagaaaatatgacagagctgttgtccagtggcttaaagaatgattataacaaagaaacattcaccttgaagcataaaattgatgaacagatgttcccttgtcgattcattaaaatagttccactcttgtcctggggacccagctttaactttagcatctggtatgttgaacttagtggcattgatgatcctgatatagtacaaccttgtctcaactggtatagcaagtaccgtgaacaggaagctattcgcctttgcctaaaacacttcagacaacacaactatacagaagcttttgagtcactgcaaaagaaaaccaagattgcactggaacatcccatgttaacagatattcatgacaagctggtgttgaagggtgattttgatgcttgcgaagagttgattgaaaaggctgtaaatgatggcttgttcaatcagtatatcagtcaacaggaatataagccacgatggagtcaaatcattcccaaaagtaccaaaggtgatggggaagataaccgtccaggaatgagaggaggccatcagatggttattgatgttcaaacagagactgtttatttgtttggtggctgggatggaacacaagatcttgctgacttctgggcgtacagtgtgaaggagaaccagtggacatgtatctctagagacactgaaaaagagaatggtcctagtgccagatcgtgtcataaaatgtgcattgatattcaacggaggcaaatctacacattggggcgttacttggattcctctgtgaggaacagcaaatctctgaaaagtgacttctatcgttatgacattgatacaaacacatggatgttactaagtgaggatactgctgctgatggagggccgaaattggtgtttgatcatcagatgtgtatggactcagaaaaacatatgatctacacttttggtggtagaattttgacttgtaatggcagcgtagatgacagcagagccagtgaaccacaattcagtggcttgtttgctttcaactgtcaatgtcaaacctggaaacttcttcgagaggactcctgtaatgctgggcctgaggacatccagtctcgaataggacactgcatgttattccactcaaaaaatcgttgcttatatgtatttggtggccagcgatcaaagacctatttgaatgatttctttagttatgatgtggactctgatcatgtagacataatatcagatggcaccaagaaagactctgggatggttccaatgacaggatttacacagagagcaactattgatccagaactgaatgaaatacacgtcttatctggactcagcaaagataaggaaaagagggaagaaaatgttagaaattcattctggatttatgacattgtgaggaatagttggtcttgtgtctataagaatgatcaagctgcaaaggataatccaactaaaagtcttcaggaagaagaaccatgtccaaggtttgcccatcagcttgtatacgatgagctacacaaggttcattacttatttggtgggaatccaggaaaatcttgctctccaaagatgagattagatgacttctggtcactgaagttgtgtagaccttcaaaagattatttactgaggcattgcaagtacctcataagaaaacacaggtttgaagaaaaggcccaagtggatccccttagtgctctgaaatatttacaaaatgatctttatataactgtggatcattcagacccagaagagacaaaagaggcttttctgatgtggatcacacctatgctcaaagaactcagctctttgacaccttagtaaatttctttcctgacagcatgactcctcctaaaggcaacctggtagacctcatcacactgtaactgaagagtcactggacacagaaatggaaaacaggagtcgattttccgtcttttggattgcagctccactgactgacagtaaagctgcagtgattgaggactgcaccagagttctgaagggatcttaaccatcacaagtttttaccctcttccttcatgcctgacctcaaccccgctctcctcatcctattcctaaattaggctaataaagtgaaattggtatactttccagtt

SEQ ID NO: 175192 - DNA, 2208 bp, Artificial Sequence
  derived and/or modified sequence
atggccgccggcggcgccgtggccgccgcccccgagtgccggctgttgccctatgcactgcacaaatggagctcgttcagctcgacctatctgcccgaaaacatcttagtggataagccaaacgaccagtcctccaggtggtccagtgagagcaactacccgcctcaatatcttatcttgaagctagagcggccagctattgtgcagaacatcacctttggaaagtatgaaaaaacccacgtgtgcaacctgaagaagttcaaggtattcggaggaatgaacgaagagaatatgacggagttgctttcctcaggcctcaaaaacgactacaacaaggagactttcacactgaaacataaaatcgatgagcagatgtttccctgcaggtttatcaagattgtcccactgctcagttgggggccaagtttcaactttagcatttggtatgtcgagctctccggcattgacgatcccgatattgtccaaccctgtctgaattggtatagcaagtacagggagcaggaggccatccgcctctgcctcaaacatttccgtcagcacaattatacagaggcattcgagtcactacagaaaaagacaaagatcgctctcgagcatcccatgcttactgacatacacgacaaactagtgctgaaaggggattttgacgcctgcgaggaacttatcgagaaggctgttaacgacggtcttttcaaccagtatatctcacaacaagagtacaagccgcggtggtcccagatcatccccaaaagcaccaaaggcgatggggaggataatcgcccaggcatgagggggggccaccaaatggtgatcgacgttcaaacagaaaccgtatacctttttggtggttgggatggtacacaggacttggcagatttctgggcctattccgtgaaggagaaccagtggacctgcatttcccgtgacacagaaaaggagaatggaccctctgctcggagctgccataagatgtgtatagacatccagaggcgacagatctacactctgggtagatatctggatagctccgtccgcaactcaaagagtctcaaatccgacttttacagatatgacatcgataccaacacatggatgttgctgtcagaggacacagctgccgatggcggtcctaaactcgttttcgatcatcaaatgtgtatggattccgaaaagcacatgatctacacatttggggggagaatactgacatgtaacggatcagttgatgacagccgggcaagtgagccgcagttttccgggctctttgctttcaactgccagtgccagacatggaagctgttgcgagaggatagctgtaacgccggtcctgaagacattcaatcacgtatcggccattgtatgctgtttcactcgaagaacaggtgtctgtacgtatttgggggccagcgcagcaagacctacctgaacgactttttttcatatgacgttgatagtgaccatgttgacataatttctgatggtaccaagaaagactcaggtatggtcccgatgacaggatttactcagcgagccaccatagaccctgaactcaacgagatccatgtgctgagtgggctcagcaaggacaaagagaagcgcgaggaaaacgtgagaaattctttctggatctacgacatagtgcggaacagctggtcctgcgtgtacaaaaacgatcaggctgctaaggacaatccgacaaagtcactacaggaagaagaaccttgcccaagatttgctcaccagctagtatacgatgagctgcacaaggtgcactacctgtttggcggcaaccccggtaagagctgcagccctaagatgcgtttagatgacttttggtccttgaagctgtgtcgaccaagcaaagattatctgctgcgtcattgtaagtatttgatccgcaagcatcgtttcgaagagaaggcacaggtagatccgctatccgcactgaagtacctgcagaacgatctgtatataacagttgatcatagtgacccggaggagacaaaggagttccagctactggcttccgccctgttcaaatcggggtcagatttcaccgctctgggattttcagatgtcgatcacacctatgctcagcgtacccaactattcgataccctggtgaatttctttcctgactcaatgaccccacccaagggtaacctggtggacttaataactctttag

SEQ ID NO: 175193 - DNA, 2208 bp, Artificial Sequence
  derived and/or modified sequence
atggccgctgggggagccgtggctgcggcacccgaatgcagattgttaccttatgccctgcataaatggagcagcttcagctctacatatctccccgaaaacatcctggtggacaagccgaacgatcagtctagtagatggtctagcgagagcaattacccaccgcagtacctcatcttaaagctggagcgaccagcgatcgtgcaaaatatcaccttcggtaaatacgaaaaaacacacgtatgcaacctgaaaaagttcaaagtgttcggcggtatgaacgaggagaatatgactgaacttttgtcctcagggttgaaaaacgactataacaaggagaccttcaccctaaagcataaaatagatgagcagatgtttccttgtcgatttatcaagatcgtgccactcctcagttggggaccttcattcaatttctcaatctggtacgtggaactgtccggaatcgacgatccagacatcgtccagccttgcctgaactggtatagcaaataccgagaacaggaagctattaggctgtgcctgaagcacttccgccaacacaattacacagaggccttcgagtccctgcaaaagaagaccaaaattgctctggagcaccctatgttgaccgatatccacgataagttggtgctcaaaggcgattttgatgcctgtgaggagctgatcgagaaagccgtgaacgatggcctcttcaatcaatatattagtcagcaggagtataagcccagatggagtcagattatcccgaaatcaaccaagggagacggcgaagacaaccgcccaggtatgaggggagggcaccagatggtcatcgacgtccagacagagaccgtgtacttgtttggcggttgggatggaacacaggacctggctgacttctgggcatacagtgtgaaggaaaatcaatggacttgtattagtagagacacagagaaagagaatgggccatctgcacgcagttgtcataagatgtgcatcgacattcagcgcaggcagatctatacactgggaaggtacctcgattccagcgtcaggaactccaaaagtctgaaaagcgacttctacaggtatgatatagacaccaatacctggatgctccttagcgaagatacagctgctgacgggggtcccaaattggtgttcgaccaccagatgtgcatggactctgaaaagcatatgatctacacctttgggggaaggatactcacgtgcaatgggtctgtggacgactcaagagccagtgaaccacaatttagtggactgtttgccttcaactgccaatgtcagacctggaaactgctgagggaagatagctgtaacgctggtcctgaagatatccaaagcaggatcggtcactgcatgctctttcactctaaaaacagatgcctgtacgtttttggtggacaaagatcaaagacgtacctcaatgatttctttagctatgatgtggactccgaccatgtcgatataattagcgatggaacaaagaaggacagcgggatggtgcctatgacgggctttactcagagggccactatagaccctgagctgaacgaaatccacgtactctctgggctgagtaaagacaaagaaaaacgggaggagaatgtgaggaattctttctggatttacgatatcgtgaggaactcctggtcttgcgtctacaaaaatgaccaggccgctaaagacaatccaaccaaaagcttgcaggaagaagagccatgcccacgatttgctcatcagttggtgtatgacgagttacacaaagtgcactatctgttcgggggtaatcccggaaaatcctgttccccaaagatgcgacttgatgacttttggtctctgaagctatgtcgcccatccaaagactatctcttgcgacactgcaagtacctgataagaaagcatagatttgaggaaaaagcccaggtagaccctctcagtgctctgaagtatttgcagaatgacttgtacattacagtggatcatagcgatccagaggagaccaaagagtttcaactcctggcgtcagccctcttcaaatccggaagcgatttcactgccttaggtttctcagacgtggaccacacgtatgcccagagaactcagctctttgataccctggtgaatttttttccagactcaatgacacccccaaaaggcaatctggtagatctcataactctttag

SEQ ID NO: 175194 - DNA, 2208 bp, Artificial Sequence
  derived and/or modified sequence
atggccgccggcggcgccgtggccgccgcccccgagtgcagactgctgccctacgccctgcacaagtggagcagcttcagcagcacctacctgcccgagaacatcctggtggacaagcccaacgaccagagcagcagatggagcagcgagagcaactaccccccccagtacctgatcctgaagctggagagacccgccatcgtgcagaacatcaccttcggcaagtacgagaagacccacgtgtgcaacctgaagaagttcaaggtgttcggcggcatgaacgaggagaacatgaccgagctgctgagcagcggcctgaagaacgactacaacaaggagaccttcaccctgaagcacaagatcgacgagcagatgttcccctgcagattcatcaagatcgtgcccctgctgagctggggccccagcttcaacttcagcatctggtacgtggagctgagcggcatcgacgaccccgacatcgtgcagccctgcctgaactggtacagcaagtacagagagcaggaggccatcagactgtgcctgaagcacttcagacagcacaactacaccgaggccttcgagagcctgcagaagaagaccaagatcgccctggagcaccccatgctgaccgacatccacgacaagctggtgctgaagggcgacttcgacgcctgcgaggagctgatcgagaaggccgtgaacgacggcctgttcaaccagtacatcagccagcaggagtacaagcccagatggagccagatcatccccaagagcaccaagggcgacggcgaggacaacagacccggcatgagaggcggccaccagatggtgatcgacgtgcagaccgagaccgtgtacctgttcggcggctgggacggcacccaggacctggccgacttctgggcctacagcgtgaaggagaaccagtggacctgcatcagcagagacaccgagaaggagaacggccccagcgccagaagctgccacaagatgtgcatcgacatccagagaagacagatctacaccctgggcagatacctggacagcagcgtgagaaacagcaagagcctgaagagcgacttctacagatacgacatcgacaccaacacctggatgctgctgagcgaggacaccgccgccgacggcggccccaagctggtgttcgaccaccagatgtgcatggacagcgagaagcacatgatctacaccttcggcggcagaatcctgacctgcaacggcagcgtggacgacagcagagccagcgagccccagttcagcggcctgttcgccttcaactgccagtgccagacctggaagctgctgagagaggacagctgcaacgccggccccgaggacatccagagcagaatcggccactgcatgctgttccacagcaagaacagatgcctgtacgtgttcggcggccagagaagcaagacctacctgaacgacttcttcagctacgacgtggacagcgaccacgtggacatcatcagcgacggcaccaagaaggacagcggcatggtgcccatgaccggcttcacccagagagccaccatcgaccccgagctgaacgagatccacgtgctgagcggcctgagcaaggacaaggagaagagagaggagaacgtgagaaacagcttctggatctacgacatcgtgagaaacagctggagctgcgtgtacaagaacgaccaggccgccaaggacaaccccaccaagagcctgcaggaggaggagccctgccccagattcgcccaccagctggtgtacgacgagctgcacaaggtgcactacctgttcggcggcaaccccggcaagagctgcagccccaagatgagactggacgacttctggagcctgaagctgtgcagacccagcaaggactacctgctgagacactgcaagtacctgatcagaaagcacagattcgaggagaaggcccaggtggaccccctgagcgccctgaagtacctgcagaacgacctgtacatcaccgtggaccacagcgaccccgaggagaccaaggagttccagctgctggccagcgccctgttcaagagcggcagcgacttcaccgccctgggcttcagcgacgtggaccacacctacgcccagagaacccagctgttcgacaccctggtgaacttcttccccgacagcatgaccccccccaagggcaacctggtggacctgatcaccctgtag

SEQ ID NO: 175195 - protein, 195 aa, Artificial Sequence
  derived and/or modified sequence
MGRARDAILDALENLTAEELKKFKLKLLSVPLREGYGRIPRGALLSMDALDLTDKLVSFYLETYGAELTANVLRDMGLQEMAGQLQAATHQGSGAAPAGIQAPPQSAAKPGLHFIDQHRAALIARVTNVEWLLDALYGKVLTDEQYQAVRAEPTNPSKMRKLFSFTPAWNWTCKDLLLQALRESQSYLVEDLERS

SEQ ID NO: 175196 - protein, 135 aa, Artificial Sequence
  derived and/or modified sequence
MGRARDAILDALENLTAEELKKFKLQAATHQGSGAAPAGIQAPPQSAAKPGLHFIDQHRAALIARVTNVEWLLDALYGKVLTDEQYQAVRAEPTNPSKMRKLFSFTPAWNWTCKDLLLQALRESQSYLVEDLERS

SEQ ID NO: 175197 - DNA, 588 bp, Artificial Sequence
  derived and/or modified sequence
atgggcagagccagagacgccatcctggacgccctggagaacctgaccgccgaggagctgaagaagttcaagctgaagctgctgagcgtgcccctgagagagggctacggcagaatccccagaggcgccctgctgagcatggacgccctggacctgaccgacaagctggtgagcttctacctggagacctacggcgccgagctgaccgccaacgtgctgagagacatgggcctgcaggagatggccggccagctgcaggccgccacccaccagggcagcggcgccgcccccgccggcatccaggcccccccccagagcgccgccaagcccggcctgcacttcatcgaccagcacagagccgccctgatcgccagagtgaccaacgtggagtggctgctggacgccctgtacggcaaggtgctgaccgacgagcagtaccaggccgtgagagccgagcccaccaaccccagcaagatgagaaagctgttcagcttcacccccgcctggaactggacctgcaaggacctgctgctgcaggccctgagagagagccagagctacctggtggaggacctggagagaagctag

SEQ ID NO: 175198 - DNA, 408 bp, Artificial Sequence
  derived and/or modified sequence
atgggcagagccagagacgccatcctggacgccctggagaacctgaccgccgaggagctgaagaagttcaagctgcaggccgccacccaccagggcagcggcgccgcccccgccggcatccaggcccccccccagagcgccgccaagcccggcctgcacttcatcgaccagcacagagccgccctgatcgccagagtgaccaacgtggagtggctgctggacgccctgtacggcaaggtgctgaccgacgagcagtaccaggccgtgagagccgagcccaccaaccccagcaagatgagaaagctgttcagcttcacccccgcctggaactggacctgcaaggacctgctgctgcaggccctgagagagagccagagctacctggtggaggacctggagagaagctag

SEQ ID NO: 175199 - DNA, 588 bp, Artificial Sequence
  derived and/or modified sequence
atgggtagagcccgcgacgccatactcgatgccctggaaaacttgacagccgaggaactcaagaagttcaagctgaagctgctgtctgtgccacttcgcgaagggtacgggcgcatccccagaggagcccttctgagtatggatgcgctggacctgaccgataagctggtttccttttatctagagacctatggagcagagctgacagcaaacgtcctcagagacatgggactgcaagaaatggccggccagttgcaggccgcaactcatcagggatccggcgctgcgcccgccgggattcaagcacccccccagtccgccgctaaacccggtctgcactttatcgaccaacatcgggcagccctgatcgccagggtcaccaacgttgaatggctcttggatgcactgtatggtaaggttctgaccgatgagcagtaccaggcagtgagagccgaacccactaatccttctaaaatgcgaaagctcttttcctttacacctgcttggaattggacatgcaaggatcttttgctccaggcactgcgcgaaagtcaatcctatctggtggaggatttagagagatcttag

SEQ ID NO: 175200 - DNA, 408 bp, Artificial Sequence
  derived and/or modified sequence
atgggacgtgctagggacgcaatacttgacgccctcgagaacctgacagcagaggagctcaaaaaattcaaactgcaagctgccacccatcaggggagcggcgcagcaccggccggcatccaagcccctcctcagagcgccgccaaaccgggtcttcactttatcgatcagcatcgcgccgcactcattgcacgcgtcactaatgtagaatggctcctggacgccctctatggcaaagtcctcaccgacgagcagtatcaggcggtgcgagctgagcctacaaatccatctaagatgagaaagctctttagcttcacacctgcgtggaattggacttgcaaagatctcctgctccaggccctaagggaaagtcagtcttatctggtcgaggatctcgagcgaagctag

SEQ ID NO: 175201 - DNA, 588 bp, Artificial Sequence
  derived and/or modified sequence
atgggccgggccagagatgccatcctggatgccctggagaacctgacagctgaggagctgaagaagttcaagctgaagctgctgtctgtgcccctgcgggagggctacggccgcatccccaggggggccctgctgtccatggatgccctggacctgacagacaagctggtgtccttctacctggagacctacggggctgagctgacagccaacgtgctgcgggacatgggcctgcaggagatggccggccagctgcaggccgccacccaccagggcagcggggccgccccagctggcatccaggccccaccccagagcgctgccaagccaggcctgcacttcatcgaccagcaccgggccgccctgattgcccgggtgaccaacgtggagtggctgctggatgccctgtatggcaaggtgctgacagatgagcagtaccaggccgtgcgggcagagcccaccaaccccagcaagatgaggaagctgttctccttcaccccagcctggaactggacctgcaaggacctgctgctgcaggccctgcgggagagccagagctacctggtggaggacctggagaggagctag

SEQ ID NO: 175202 - DNA, 408 bp, Artificial Sequence
  derived and/or modified sequence
atgggccgggccagagatgccatcctggatgccctggagaacctgacagctgaggagctgaagaagttcaagctgcaggccgccacccaccagggcagcggggccgccccagctggcatccaggccccaccccagagcgctgccaagccaggcctgcacttcatcgaccagcaccgggccgccctgattgcccgggtgaccaacgtggagtggctgctggatgccctgtatggcaaggtgctgacagatgagcagtaccaggccgtgcgggcagagcccaccaaccccagcaagatgaggaagctgttctccttcaccccagcctggaactggacctgcaaggacctgctgctgcaggccctgcgggagagccagagctacctggtggaggacctggagaggagctag

SEQ ID NO: 175203 - DNA, 588 bp, Artificial Sequence
  derived and/or modified sequence
atgggccgggcccgggacgccatcctggacgccctggagaacctgaccgcagaggagctcaaaaaatttaaactcaaactgctatccgtgccactcagagagggctatggccgcattccccgcggggcgctgctgtctatggatgccctcgacctcacggacaagctggtttctttctacctggagacctacggcgctgagctgacggccaatgtgctgcgtgacatgggcctgcaggaaatggcaggccaactgcaggcagcgacccatcaaggctctggtgccgcccctgccgggattcaagcgccacctcagtccgctgccaaaccaggactgcacttcatagatcagcatagggcagcactaattgcccgggtgacaaacgtcgaatggcttctggacgcactgtatggaaaagtgctcaccgacgagcaatatcaggccgtgagagcagaacccaccaatcctagtaagatgaggaagttattctcatttacccccgcctggaattggacctgcaaggatctgttgctgcaagctttacgggagtcccaaagttacctcgtggaggatctcgaacggagctag

SEQ ID NO: 175204 - DNA, 408 bp, Artificial Sequence
  derived and/or modified sequence
atgggccgggcccgggacgccatcctggacgccctggagaacctgaccgccgaggaattgaaaaagttcaagctacaggctgctactcaccaaggaagtggggctgccccggccggtattcaggcgcctcctcaaagtgccgctaagccaggcctccattttatagaccagcatcgagccgccttgatcgcgagagtgactaatgtggagtggctcctggacgccctctacgggaaagtactgacagacgagcagtatcaagccgtgcgcgccgagcccactaacccttccaagatgcggaagttattttccttcacaccagcctggaattggacatgcaaggaccttctccttcaggctctaagggagtctcagagctacctcgtcgaagacctggagcgcagttag

SEQ ID NO: 175205 - DNA, 588 bp, Artificial Sequence
  derived and/or modified sequence
atgggtcgagcacgcgacgccatcctcgacgctctggagaacctgacagcagaggagttaaaaaaattcaagttgaaactgttgtccgtgccattgcgcgaaggttacgggaggatacccaggggtgcactgctgagcatggatgcgctcgacttgacagacaagcttgtgagtttttatctggagacatacggcgcagagctcactgccaatgtcctgcgagacatgggactccaggaaatggctggtcagctccaagcagccacacatcaaggaagtggcgctgctcctgcagggatccaggcacctcctcaatccgctgctaaaccaggtctccatttcattgatcagcatcgagcagccctaattgcaagggtaacaaatgtggaatggttgctcgatgctctgtacggtaaagttctcaccgatgagcagtaccaagcagtcagggccgagccaactaaccccagcaagatgcgcaagctctttagttttactccagcttggaactggacctgcaaagacttgttactccaagcgctcagagagagtcaatcttacctagtggaagaccttgagcgctcctag

SEQ ID NO: 175206 - DNA, 408 bp, Artificial Sequence
  derived and/or modified sequence
atgggtagggctagagatgccatcctggatgctctggagaacttaacagcggaggagttaaaaaaattcaagttacaagcagctacacatcaggggagcggggcagctcccgctggaattcaagccccacctcagtcagccgcaaaacctggcctgcattttatcgaccagcacagagccgctttgattgctcgcgtgacgaacgtcgagtggctgctggacgcgctgtacggtaaagtgctgactgatgagcaatatcaagccgtacgcgcagaacccactaatccctctaagatgcgcaagctgttctcgttcactcctgcgtggaattggacgtgcaaggacctcctgctccaggcgcttagggagagtcaatcttatctggtcgaagacctggagcgtagctag

SEQ ID NO: 175207 - DNA, 989 bp, Artificial Sequence
  derived and/or modified sequence
gcaggcgccacccatgagcccctctgcggccccctcccgggtcccacctcgcaggccagctggagggcgcgatcctggcgtcccccgacggcctggggccccaatccagaggcctgggtgggaggggaccaagggtgtagtaaggaagcgccttttgctggagggcaacggaccggggcggggagtcgggagaccagagtgggaggaaggcggggagtccaggttccgccccggagccgacttcctcctggtcggcggctgcagcggggtgagcggcggcagcggccggggatcctggagccatggggcgcgcgcgcgacgccatcctggatgcgctggagaacctgaccgccgaggagctcaagaagttcaagctgaagctgctgtcggtgccgctgcgcgagggctacgggcgcatcccgcggggcgcgctgctgtccatggacgccttggacctcaccgacaagctggtcagcttctacctggagacctacggcgccgagctcaccgctaacgtgctgcgcgacatgggcctgcaggagatggccgggcagctgcaggcggccacgcaccagggctctggagccgcgccagctgggatccaggcccctcctcagtcggcagccaagccaggcctgcactttatagaccagcaccgggctgcgcttatcgcgagggtcacaaacgttgagtggctgctggatgctctgtacgggaaggtcctgacggatgagcagtaccaggcagtgcgggccgagcccaccaacccaagcaagatgcggaagctcttcagtttcacaccagcctggaactggacctgcaaggacttgctcctccaggccctaagggagtcccagtcctacctggtggaggacctggagcggagctgaggctccttcccagcaacactccggtcagcccctggcaatcccaccaaatcatcctgaatctgatctttttatacacaatatacgaaaagccagcttgaa

SEQ ID NO: 175208 - DNA, 505 bp, Artificial Sequence
  derived and/or modified sequence
atggggcgcgcgcgcgacgccatcctggatgcgctggagaacctgaccgccgaggagctcaagaagttcaagctgcaggcggccacgcaccagggctctggagccgcgccagctgggatccaggcccctcctcagtcggcagccaagccaggcctgcactttatagaccagcaccgggctgcgcttatcgcgagggtcacaaacgttgagtggctgctggatgctctgtacgggaaggtcctgacggatgagcagtaccaggcagtgcgggccgagcccaccaacccaagcaagatgcggaagctcttcagtttcacaccagcctggaactggacctgcaaggacttgctcctccaggccctaagggagtcccagtcctacctggtggaggacctggagcggagctgaggctccttcccagcaacactccggtcagcccctggcaatcccaccaaatcatcctgaatctgatctttttatacacaatatacgaaaagccagcttg

SEQ ID NO: 175209 - protein, 308 aa, Artificial Sequence
  derived and/or modified sequence
MAGKKNVLSSLAVYAEDSEPESDGEAGIEAVGSAAEEKGGLVSDAYGEDDFSRLGGDEDGYEEEEDENSRQSEDDDSETEKPEADDPKDNTEAEKRDPQELVASFSERVRNMSPDEIKIPPEPPGRCSNHLQDKIQKLYERKIKEGMDMNYIIQRKKEFRNPSIYEKLIQFCAIDELGTNYPKDMFDPHGWSEDSYYEALAKAQKIEMDKLEKAKKERTKIEFVTGTKKGTTTNATSTTTTTASTAVADAQKRKSKWDSAIPVTTIAQPTILTTTATLPAVVTVTTSASGSKTTVISAVGTIVKKAKQ

SEQ ID NO: 175210 - protein, 168 aa, Artificial Sequence
  derived and/or modified sequence
MAGKKNVLSSLAVYAEDSEPESDGEAGIEAVGSAAEEKGGLVSDAYGEDDFSRLGGDEDGYEEEEDENSRQSEDDDSETEKPEADDPKDNTEAEKRDPQELVASFSERVRNMSPDEIKIPPEPPGRCSNHLQDKIQKLYERKIKEGMDMNYIIQRKKEFRNPSQGPEN

SEQ ID NO: 175211 - DNA, 2519 bp, Artificial Sequence
  derived and/or modified sequence
gaagtcggcgtcttgagtcataggagtgagccacgcccgggctgtgggaataagatggcggggaagaagaatgttctgtcgtctctcgcagtttacgcggaagattcagagcccgagtctgatggcgaggctggaatcgaggcggtgggcagcgcggctgaggagaaaggcggattggtatctgatgcctatggggaggatgacttttctcgtctagggggtgatgaagatggttatgaagaagaagaagatgagaacagtagacagtcggaagatgacgattcagagactgaaaaacctgaggctgatgacccaaaggataatacagaagcagaaaagcgagacccccaggaactcgtggcctccttttctgaaagagttcggaacatgtcgcctgatgaaatcaagatcccgccagaaccccctggcagatgttcaaatcacttgcaagacaagatccagaagctttatgaacgaaagataaaggagggaatggatatgaactacattatccaaaggaagaaagaatttcggaaccctagcatctacgagaagctgatccagttctgtgccattgacgagcttggcaccaactacccaaaggatatgtttgatccccatggctggtctgaggactcctactatgaggcattagccaaggcccagaaaattgagatggacaaattggaaaaggccaaaaaggagcgaacaaaaattgagtttgtgacgggcaccaaaaaaggcaccacgaccaacgccacgtccaccaccactaccactgccagcacagctgttgcagatgctcagaagagaaagagcaagtgggattcggctatcccagtgacaacgatagcccagcccaccatcctcaccaccacagccaccctgccagctgttgtcacggtcaccaccagcgccagcggctccaagaccaccgtcatctctgctgtgggcaccattgtgaagaaggccaagcagtgacctgaggggccaccctaggacttgaaaggaccgtgcagcccagtgaccactgcccagtgggaggcgccactttgtatatttcaggactgggacctactccccagatgccacctgagaggagcttctgtttggcattccagatggaaggacaggcagcacgggagccaggcgctgtggacagggtctgtccacgcaccacctggggtctgccgcctattaaaagtgccgtattcttacctcttggcatctcagatgcactggcctctcctgcattctgtttgcaggcaaatgcttcagctcacatgtcccccaagactcaatagtcttggttgggactattgcctcagggttgacaacagggtgatggaggcctgggacgctgttcagaggggtgacccaagaagtcaccgttgttatccgtgtatgcctctgggcatggacaggcgggagtccccgagccccacgtatgccccatctgccgccttgatcccaaaacccagccagttctcgggtgatggtggagctgtgctcccttgagtgcacttgagcactccccagaccagatcactttttggacacacccaggaaggcttttgaagtcaagccagtttccagaagggctggggtgagatcctgacctgtgcagagagtggggaggcgtcagcgcctggccagggctgccccagtcctttggtgcccggtgagcgcagccagcaggagctgagcagcgggggagatgaatcacctcctgccttggcgaggcggcagctcattgtttacaggcaagccctgctcctgggagggctcctgccaccccacccttcctctgtgtgttatctctgccccacagcagcccctgggcagcaccagtggccactgggctccccccggggttgaaacgggtttcccagaccaggggttcagaggagactatttacccttcatgatctttggcgattctccactggagcggaagggctgtgtgtcaaaagaaggaagccaggctgtgaagggccgtgttgctttcagtgggtgggcagaggtttagaaaggtggttctgaaatggcacctggtactcttgtgggacctggggaatataaggaactctgtgcatgaggtttcaaaaataaaaattgagtccactctccccgtacacacacactcgggcacttcaggaggtcagttctcaccccttcctcgatggggctttaaagctctggggagaagagctgctccccactcatgccccagagggactgtgaaaaggcttcctgtgacctccgatggcggcccctcattggccaagggcactgtggatgttttgtgggaggcagcatggcaccgtggaaagggcagtagacgtggagccggcacctctggtctggattccacttaaaaccagttgagtggtctcaagcccttaacctctgtaagcctgtttcttctctgaaatcacagtaataaagcgtcgtaagatggttgggaagaaccagaggtgacttatgcaaaagctttataaactgtaaagttcctgcca

SEQ ID NO: 175212 - DNA, 927 bp, Artificial Sequence
  derived and/or modified sequence
atggctgggaaaaaaaacgtgctctcttcattggcagtctacgctgaagattcagaacccgagtcagatggcgaagctggaatcgaagccgtgggtagcgccgccgaggagaagggaggccttgtgtcagacgcctatggggaagatgacttttcacggctggggggagacgaggacgggtatgaggaggaagaagacgagaactccagacagagcgaggacgatgacagcgaaacggaaaagcccgaggcagacgacccaaaagataacacagaggctgagaagcgcgacccgcaggagttggtggcctcttttagcgagagagtcagaaatatgtcaccagatgaaattaaaattcctcctgagccgccagggagatgcagcaatcacttacaagacaaaattcagaagctgtacgaaagaaagataaaggaggggatggatatgaattatatcattcagaggaagaaggagtttagaaacccctctatctacgaaaagctcatccagttttgtgccatagacgaattagggaccaactaccctaaagacatgtttgatcctcacggttggtcagaggacagctattacgaggctctcgctaaggcccagaagatcgagatggacaagctggagaaggcaaaaaaggagcgtacaaaaattgagtttgtcactggcactaagaagggaaccactactaatgccacatcaacaactaccacaacggcatccaccgcggtggcggatgctcagaaaagaaagtccaagtgggacagcgctatccccgtgacaaccatcgcacagcctacaatccttaccaccaccgccactctccccgcggtggttaccgtcaccacgtcagcttctggatctaagacaaccgttatttccgctgtagggacgatcgtcaagaaggcgaaacagtag

SEQ ID NO: 175213 - DNA, 507 bp, Artificial Sequence
  derived and/or modified sequence
atggcaggtaagaagaacgttctctctagcctggccgtatatgctgaggatagcgagccggagtctgacggcgaggccggaatcgaagcggtcgggagcgccgccgaggagaaaggtggcctggtcagcgacgcgtacggagaggacgacttcagtaggctgggcggagacgaagacgggtacgaggaggaggaggacgagaactccagacaatcagaggacgacgattccgagaccgaaaagccagaagccgatgacccgaaagacaatacagaagccgagaaaagagatccgcaagagcttgtggcgagcttcagtgagcgcgtgcgtaatatgtcacctgatgagatcaagattccacctgagccaccaggcagatgcagtaatcatctccaagacaagatccagaaattgtatgagagaaaaataaaggaaggaatggacatgaactatattatccagcgcaagaaagagttcaggaacccgagccaggggccagagaactag

SEQ ID NO: 175214 - DNA, 927 bp, Artificial Sequence
  derived and/or modified sequence
atggcaggcaagaagaacgtcctgtcttccttggcggtctatgccgaggattctgagcccgagtccgacggtgaggctggaatcgaggcagtgggcagcgctgctgaggagaaaggtggactggtgtcagacgcctacggggaagacgatttctccaggctcggaggggacgaggacggatacgaggaggaagaggatgaaaatagtaggcagtctgaagacgacgatagtgagaccgaaaaacccgaagccgacgaccctaaagacaatactgaggccgaaaaacgggacccacaggagttagtggcctcattttctgagcgcgtccgaaatatgtcccccgacgagatcaagataccaccagaacccccaggcagatgcagcaaccacctccaggataagatacaaaaactttacgagcgcaagatcaaggaaggaatggatatgaattacattatccagcgaaagaaagaattcaggaatccttctatatatgaaaaactgatccagttctgcgccatagatgagctcggcaccaattacccaaaggacatgttcgatccccatggatggtccgaagattcttattatgaggcccttgcaaaggcacagaagattgagatggataagctcgaaaaagccaagaaagaacgaacgaaaatcgagttcgtgacgggaaccaagaaaggtaccaccaccaatgccacttctacaaccactactacagcaagcacagcagtggcggatgctcagaaaagaaaaagcaaatgggattctgcgattcccgtgaccacaatcgcccagccgacaatcctgaccaccaccgccactctgcccgctgtggtgacggtcacaacgtccgcatctgggtctaaaactacagtaatttcagccgtgggcaccatcgttaaaaaggcaaaacagtag

SEQ ID NO: 175215 - DNA, 927 bp, Artificial Sequence
  derived and/or modified sequence
atggccggcaagaagaatgtgctgagcagcctggccgtgtatgcagaggacagcgagcctgagagtgatggagaggccggcatcgaggccgtgggcagcgctgctgaggagaagggcggcctggtgtctgatgcctacggggaggatgacttcagccggctgggcggagatgaagatggctatgaggaggaggaggatgagaacagccggcagagtgaagatgatgattctgaaacagagaagccagaggctgatgaccccaaggacaacacagaagctgagaagagggacccccaggagctggtggccagcttcagcgagcgggtgaggaacatgagcccagatgagatcaagatccccccagagcccccaggccgctgcagcaaccacctgcaggacaagatccagaagctgtatgaaaggaagatcaaggagggcatggacatgaactacatcatccagaggaagaaggagttcaggaaccccagcatctatgagaagctgatccagttctgtgccattgatgagctgggcaccaactaccccaaggacatgtttgacccccacggctggagcgaagattcctactatgaggccctggccaaggcccagaagattgagatggacaagctggagaaggccaagaaggagaggaccaagattgaatttgtgacaggcaccaagaagggcaccaccaccaatgccaccagcaccaccaccaccacagccagcacagctgtggctgatgcccagaagaggaagagcaagtgggacagcgccatccctgtgaccaccatcgcccagcccaccatcctgaccaccacagccaccctgcctgctgtggtgacagtgaccaccagcgccagcggcagcaagaccaccgtcatctctgctgtgggcaccatcgtgaagaaggccaagcagtag

SEQ ID NO: 175216 - DNA, 507 bp, Artificial Sequence
  derived and/or modified sequence
atggccggcaagaagaatgtgctgagcagcctggccgtgtatgcagaggacagcgagcctgagagtgatggagaggccggcatcgaggccgtgggcagcgctgctgaggagaagggcggcctggtgtctgatgcctacggggaggatgacttcagccggctgggcggagatgaagatggctatgaggaggaggaggatgagaacagccggcagagtgaagatgatgattctgaaacagagaagccagaggctgatgaccccaaggacaacacagaagctgagaagagggacccccaggagctggtggccagcttcagcgagcgggtgaggaacatgagcccagatgagatcaagatccccccagagcccccaggccgctgcagcaaccacctgcaggacaagatccagaagctgtatgaaaggaagatcaaggagggcatggacatgaactacatcatccagaggaagaaggagttcaggaaccccagccagggcccagaaaattag

SEQ ID NO: 175217 - DNA, 927 bp, Artificial Sequence
  derived and/or modified sequence
atggccggcaagaagaacgtgctgagcagcctggccgtgtacgccgaagactccgaacccgagtctgacggcgaagccggcattgaggccgtagggtcagccgccgaagagaagggaggcttggtcagcgacgcgtacggagaagacgacttttccaggctggggggggatgaggacggctacgaggaggaggaggacgagaattccaggcagtctgaagatgacgactccgagaccgagaaacctgaggccgatgaccctaaggacaatacagaagcagagaaacgtgaccctcaggaactggtggccagtttctccgagagagtgagaaacatgagcccagacgagatcaaaataccaccagagccgccaggcagatgcagtaaccacttgcaggacaagatccaaaaactgtatgagaggaagattaaggaaggcatggatatgaattacattatccagcgcaagaaagagtttagaaatcccagtatctacgagaaactcattcagttctgtgccattgatgaactgggaaccaattatcccaaagacatgtttgaccctcacggctggagcgaagattcgtactacgaggcactggctaaggcacaaaagatcgagatggataaattagaaaaggcaaagaaagaacgtactaaaattgagtttgtgactggcactaagaaaggcactaccactaacgccacatccactactaccaccaccgctagcactgcggtcgctgacgcccagaaacgaaagagtaaatgggattccgccattcctgtaactaccatcgcacagcccaccattctgactacaaccgcgaccctgccagcggtggtgactgtgacgacaagtgcctcagggtcgaagacaaccgttatctccgcagtcggaacgatcgtgaaaaaagccaaacaatag

SEQ ID NO: 175218 - DNA, 507 bp, Artificial Sequence
  derived and/or modified sequence
atggccggcaagaagaacgtgctgagcagcctggccgtgtacgccgaggattccgagcccgaatccgatggagaggcaggtattgaagccgtgggatcagcagctgaggaaaagggaggactggtcagcgatgcttacggtgaggatgatttttctcggctcggtggcgacgaggatggctacgaagaggaggaggatgagaattccaggcagtccgaggacgatgactctgagacagagaagcccgaggccgatgaccctaaggataacactgaagcagaaaaaagggatcctcaggaattagtggcgagcttctccgaacgggttaggaacatgagccctgatgagataaagattcccccggaacccccggggaggtgttccaaccacctgcaggataaaatccagaaactgtatgagagaaagattaaagaaggcatggatatgaactatattatacaaagaaaaaaagaattccgaaaccccagccaggggcctgagaactag

SEQ ID NO: 175219 - DNA, 927 bp, Artificial Sequence
  derived and/or modified sequence
atggccggcaagaagaacgtgctgagcagcctggccgtgtacgccgaggactccgaacctgagtccgacggagaagccggaatcgaagccgtcgggtctgctgctgaggaaaaaggcgggctcgtgtccgacgcctatggcgaggatgatttcagccgcctcgggggagatgaagatggctatgaggaggaggaggacgagaattctcgacagtccgaggatgatgatagtgagactgaaaagcccgaagccgacgatcctaaggacaacactgaggccgagaaacgcgatccccaggaattagtagcgagcttttctgagagagtacgcaacatgagccccgatgaaatcaagattccaccagaaccgcccggaaggtgtagcaaccacctacaggataagattcagaagctgtacgagcggaaaatcaaagagggaatggacatgaactacatcatccagcggaagaaggaattccggaacccaagcatctatgagaagctcatccagttttgcgcaatcgacgagctggggactaactacccgaaggatatgtttgaccctcacggctggtcagaggacagctactacgaggctctagcgaaagctcaaaaaatcgagatggacaagctggaaaaagctaaaaaagagaggacaaaaatagagtttgtaacaggcactaaaaaagggaccaccaccaatgctacctctacaacaaccaccacagctagtacggctgtggccgacgcccagaagcgcaagtcgaaatgggattccgccattcccgtgacaactattgcacagccaactatactcacgacaacagccacactgccagctgtcgtgaccgtcacaacgtccgcctccggcagcaagacgaccgtcatatccgccgtggggacgatcgtgaaaaaggcgaagcagtag

SEQ ID NO: 175220 - DNA, 927 bp, Artificial Sequence
  derived and/or modified sequence
atggccggaaaaaaaaacgtcctctcctccctagctgtgtatgccgaggactctgaacccgagagcgatggggaggccggaattgaggccgttggctcagcggcagaagagaagggtggcctggtttcagacgcttatggtgaggacgacttctctagattggggggagacgaggatggatatgaggaggaggaagatgagaacagcagacaatcagaagatgacgacagcgagacggaaaaacctgaggccgatgatccaaaggacaacacagaagccgagaagcgagacccccaagagctcgtcgcaagcttttctgagcgggtgcgcaacatgagccccgatgaaattaagattccccctgagcctccaggtcgctgttccaatcacctgcaggacaagatccagaagctttacgaacggaagataaaggagggcatggatatgaattacattatccagagaaaaaaagagttccgcaatcccagcatttatgaaaaactgatacagttttgcgcaattgacgagctggggaccaattatccgaaggacatgttcgacccccacggctggtccgaagacagttattacgaagctctggcaaaagctcagaagatcgaaatggacaagctagagaaagccaaaaaggaacggacaaaaatagagtttgtgaccggcaccaaaaaggggaccacaacaaacgccacatccaccactactacaactgcctcgactgcagtggccgacgcacagaaacgcaaatccaagtgggactcggccattcccgtgactacaattgctcaacccacaatcttgactacaaccgccacactgcccgctgtagtcacagtgaccacttccgcatccggctccaaaaccacggtcataagcgctgtcggaaccatcgtgaagaaggccaaacagtag

SEQ ID NO: 175221 - DNA, 507 bp, Artificial Sequence
  derived and/or modified sequence
atggccggaaagaagaatgttctcagttcacttgcagtgtacgcagaagattcagagccggaatctgatggggaagcgggtattgaggctgtgggatctgccgctgaggagaagggaggcctggtaagcgacgcctatggtgaagacgacttttctaggttgggcggagatgaagatggttacgaggaagaggaggacgaaaactccaggcagagcgaggacgatgattccgaaacagaaaaacccgaggctgacgatccgaaggacaacacggaggctgaaaagagggaccctcaggaattggtggcatcttttagcgaacgtgtgcgaaatatgtcacctgacgagatcaaaatacctcccgagccccctggtcggtgctccaaccacctgcaggacaaaatccaaaagctttatgagcggaagattaaagaaggaatggacatgaactacatcattcagagaaaaaaagagtttcggaacccgtcccaggggccagagaactag

SEQ ID NO: 175222 - DNA, 927 bp, Artificial Sequence
  derived and/or modified sequence
atggccggaaagaagaatgttctcagcagcctcgcggtgtacgcagaggactccgagccggagtctgatggggaagccggaatagaggctgtcggctctgcagccgaagaaaagggtggactggtatctgatgcttatggcgaagacgatttctctaggttgggcggagatgaggatggttatgaagaggaagaagatgaaaactcgcggcagtccgaggacgacgattccgagactgaaaagccggaggccgatgaccctaaggacaatactgaagccgaaaagagagacccccaggaactggttgcctcgttcagtgaaagagtacgtaacatgtcccccgacgaaatcaaaattccccctgagcccccagggcgatgtagcaaccacctgcaggacaagatccagaagctttacgagcggaaaattaaggaagggatggacatgaattacatcatccagcgtaagaaggagttccgaaatccctcgatttatgaaaagcttattcaattctgtgcgattgatgagcttggtactaactatccaaaagatatgtttgacccccatggttggagtgaagactcatattatgaggctctggcgaaagcacagaagatagaaatggacaagctggaaaaggccaaaaaggagagaacaaaaatcgaatttgtaactggcactaagaagggcaccactaccaacgccactagcactacaactacaaccgcgagtacggctgtggccgacgctcagaagcggaagtctaaatgggactcggcgatccccgtaacaacaatcgctcagccgaccatattaacaactacggccaccctgcctgcggtagtgaccgtgactacatccgcatcgggatctaaaacaaccgtaatttccgcggtcggaacaatcgtgaaaaaggccaagcagtag

SEQ ID NO: 175223 - DNA, 1011 bp, Artificial Sequence
  derived and/or modified sequence
cgggctgtgggaataagatggcggggaagaagaatgttctgtcgtctctcgcagtttacgcggaagattcagagcccgagtctgatggcgaggctggaatcgaggcggtgggcagcgcggctgaggagaaaggcggattggtatctgatgcctatggggaggatgacttttctcgtctagggggtgatgaagatggttatgaagaagaagaagatgagaacagtagacagtcggaagatgacgattcagagactgaaaaacctgaggctgatgacccaaaggataatacagaagcagaaaagcgagacccccaggaactcgtggcctccttttctgaaagagttcggaacatgtcgcctgatgaaatcaagatcccgccagaaccccctggcagatgttcaaatcacttgcaagacaagatccagaagctttatgaacgaaagataaaggagggaatggatatgaactacattatccaaaggaagaaagaatttcggaaccctagccaaggcccagaaaattgagatggacaaattggaaaaggccaaaaaggagcgaacaaaaattgagtttgtgacgggcaccaaaaaaggcaccacgaccaacgccacgtccaccaccactaccactgccagcacagctgttgcagatgctcagaagagaaagagcaagtgggattcggctatcccagtgacaacgatagcccagcccaccatcctcaccaccacagccaccctgccagctgttgtcacggtcaccaccagcgccagcggctccaagaccaccgtcatctctgctgtgggcaccattgtgaagaaggccaagcagtgacctgaggggccaccctaggacttgaaaggaccgtgcagcccagtgaccactgcccagtgggaggcgccactttgtatatttcaggactgggacctactccccagatgccacctgagaggagcttctgtttggcattccagatggaaggacaggcagcacgggagccaggcgctgtggaca

SEQ ID NO: 175224 - DNA, 2722 bp, Artificial Sequence
  derived and/or modified sequence
cacaaccccaactcagagaagccaaagcgctgggaattcagctttaggcagaacccacgcaatcttatatccgtcgcgcagtgatgacgtagcgcgagcgctggcatgagggcggagccaggcgcaggaaactgccgttttgattggtttccagtgtggcgcgggggtctcctgggatccgaaagaacctgcctttccgcccggaagtcggcgtcttgagtcataggagtgagccacgcccgggctgtgggaataagatggcggggaagaagaatgttctgtcgtctctcgcagtttacgcggaagattcagagcccgagtctgatggcgaggctggaatcgaggcggtgggcagcgcggctgaggagaaaggcggattggtatctgatgcctatggggaggatgacttttctcgtctagggggtgatgaagatggttatgaagaagaagaagatgagaacagtagacagtcggaagatgacgattcagagactgaaaaacctgaggctgatgacccaaaggataatacagaagcagaaaagcgagacccccaggaactcgtggcctccttttctgaaagagttcggaacatgtcgcctgatgaaatcaagatcccgccagaaccccctggcagatgttcaaatcacttgcaagacaagatccagaagctttatgaacgaaagataaaggagggaatggatatgaactacattatccaaaggaagaaagaatttcggaaccctagcatctacgagaagctgatccagttctgtgccattgacgagcttggcaccaactacccaaaggatatgtttgatccccatggctggtctgaggactcctactatgaggcattagccaaggcccagaaaattgagatggacaaattggaaaaggccaaaaaggagcgaacaaaaattgagtttgtgacgggcaccaaaaaaggcaccacgaccaacgccacgtccaccaccactaccactgccagcacagctgttgcagatgctcagaagagaaagagcaagtgggattcggctatcccagtgacaacgatagcccagcccaccatcctcaccaccacagccaccctgccagctgttgtcacggtcaccaccagcgccagcggctccaagaccaccgtcatctctgctgtgggcaccattgtgaagaaggccaagcagtgacctgaggggccaccctaggacttgaaaggaccgtgcagcccagtgaccactgcccagtgggaggcgccactttgtatatttcaggactgggacctactccccagatgccacctgagaggagcttctgtttggcattccagatggaaggacaggcagcacgggagccaggcgctgtggacagggtctgtccacgcaccacctggggtctgccgcctattaaaagtgccgtattcttacctcttggcatctcagatgcactggcctctcctgcattctgtttgcaggcaaatgcttcagctcacatgtcccccaagactcaatagtcttggttgggactattgcctcagggttgacaacagggtgatggaggcctgggacgctgttcagaggggtgacccaagaagtcaccgttgttatccgtgtatgcctctgggcatggacaggcgggagtccccgagccccacgtatgccccatctgccgccttgatcccaaaacccagccagttctcgggtgatggtggagctgtgctcccttgagtgcacttgagcactccccagaccagatcactttttggacacacccaggaaggcttttgaagtcaagccagtttccagaagggctggggtgagatcctgacctgtgcagagagtggggaggcgtcagcgcctggccagggctgccccagtcctttggtgcccggtgagcgcagccagcaggagctgagcagcgggggagatgaatcacctcctgccttggcgaggcggcagctcattgtttacaggcaagccctgctcctgggagggctcctgccaccccacccttcctctgtgtgttatctctgccccacagcagcccctgggcagcaccagtggccactgggctccccccggggttgaaacgggtttcccagaccaggggttcagaggagactatttacccttcatgatctttggcgattctccactggagcggaagggctgtgtgtcaaaagaaggaagccaggctgtgaagggccgtgttgctttcagtgggtgggcagaggtttagaaaggtggttctgaaatggcacctggtactcttgtgggacctggggaatataaggaactctgtgcatgaggtttcaaaaataaaaattgagtccactctccccgtacacacacactcgggcacttcaggaggtcagttctcaccccttcctcgatggggctttaaagctctggggagaagagctgctccccactcatgccccagagggactgtgaaaaggcttcctgtgacctccgatggcggcccctcattggccaagggcactgtggatgttttgtgggaggcagcatggcaccgtggaaagggcagtagacgtggagccggcacctctggtctggattccacttaaaaccagttgagtggtctcaagcccttaacctctgtaagcctgtttcttctctgaaatcacagtaataaagcgtcgtaagatggttgggaagaaccagaggtgacttatgcaaaagctttataaactgtaaagttcctgcca

SEQ ID NO: 175225 - DNA, 927 bp, Artificial Sequence
  derived and/or modified sequence
atggccggcaagaagaacgtgctgagcagcctggccgtgtacgccgaggacagcgagcccgagagcgacggcgaggccggcatcgaggccgtgggcagcgccgccgaggagaagggcggcctggtgagcgacgcctacggcgaggacgacttcagcagactgggcggcgacgaggacggctacgaggaggaggaggacgagaacagcagacagagcgaggacgacgacagcgagaccgagaagcccgaggccgacgaccccaaggacaacaccgaggccgagaagagagacccccaggagctggtggccagcttcagcgagagagtgagaaacatgagccccgacgagatcaagatcccccccgagccccccggcagatgcagcaaccacctgcaggacaagatccagaagctgtacgagagaaagatcaaggagggcatggacatgaactacatcatccagagaaagaaggagttcagaaaccccagcatctacgagaagctgatccagttctgcgccatcgacgagctgggcaccaactaccccaaggacatgttcgacccccacggctggagcgaggacagctactacgaggccctggccaaggcccagaagatcgagatggacaagctggagaaggccaagaaggagagaaccaagatcgagttcgtgaccggcaccaagaagggcaccaccaccaacgccaccagcaccaccaccaccaccgccagcaccgccgtggccgacgcccagaagagaaagagcaagtgggacagcgccatccccgtgaccaccatcgcccagcccaccatcctgaccaccaccgccaccctgcccgccgtggtgaccgtgaccaccagcgccagcggcagcaagaccaccgtgatcagcgccgtgggcaccatcgtgaagaaggccaagcagtag

SEQ ID NO: 175226 - DNA, 507 bp, Artificial Sequence
  derived and/or modified sequence
atggccggcaagaagaacgtgctgagcagcctggccgtgtacgccgaggacagcgagcccgagagcgacggcgaggccggcatcgaggccgtgggcagcgccgccgaggagaagggcggcctggtgagcgacgcctacggcgaggacgacttcagcagactgggcggcgacgaggacggctacgaggaggaggaggacgagaacagcagacagagcgaggacgacgacagcgagaccgagaagcccgaggccgacgaccccaaggacaacaccgaggccgagaagagagacccccaggagctggtggccagcttcagcgagagagtgagaaacatgagccccgacgagatcaagatcccccccgagccccccggcagatgcagcaaccacctgcaggacaagatccagaagctgtacgagagaaagatcaaggagggcatggacatgaactacatcatccagagaaagaaggagttcagaaaccccagccagggccccgagaactag

SEQ ID NO: 175227 - protein, 798 aa, Artificial Sequence
  derived and/or modified sequence
MAWDMCNQDSESVWSDIECAALVGEDQPLCPDLPELDLSELDVNDLDTDSFLGGLKWCSDQSEIISNQYNNEPSNIFEKIDEENEANLLAVLTETLDSLPVDEDGLPSFDALTDGDVTTDNEASPSSMPDGTPPPQEAEEPSLLKKLLLAPANTQLSYNECSGLSTQNHANHNHRIRTNPAIVKTENSWSNKAKSICQQQKPQRRPCSELLKYLTTNDDPPHTKPTENRNSSRDKCTSKKKSHTQSQSQHLQAKPTTLSLPLTPESPNDPKGSPFENKTIERTLSVELSGTAGLTPPTTPPHKANQDNPFRASPKLKSSCKTVVPPPSKKPRYSESSGTQGNNSTKKGPEQSELYAQLSKSSVLTGGHEERKTKRPSLRLFGDHDYCQSINSKTEILINISQELQDSRQLENKDVSSDWQGQICSSTDSDQCYLRETLEASKQVSPCSTRKQLQDQEIRAELNKHFGHPSQAVFDDEADKTGELRDSDFSNEQFSKLPMFINSGLAMDGLFDDSEDESDKLSYPWDGTQSYSLFNVSPSCSSFNSPCRDSVSPPKSLFSQRPQRMRSRSRSFSRHRSCSRSPYSRSRSRSPGSRSSSRSCYYYESSHYRHRTHRNSPLYVRSRSRSPYSRRPRYDSYEEYQHERLKREEYRREYEKRESERAKQRERQRQKAIEERRVIYVGKIRPDTTRTELRDRFEVFGEIEECTVNLRDDGDSYGFITYRYTCDAFAALENGYTLRRSNETDFELYFCGRKQFFKSNYADLDSNSDDFDPASTKSKYDSLDFDSLLKEAQRSLRR

SEQ ID NO: 175228 - DNA, 6318 bp, Artificial Sequence
  derived and/or modified sequence
tagtaagacaggtgccttcagttcactctcagtaaggggctggttgcctgcatgagtgtgtgctctgtgtcactgtggattggagttgaaaaagcttgactggcgtcattcaggagctggatggcgtgggacatgtgcaaccaggactctgagtctgtatggagtgacatcgagtgtgctgctctggttggtgaagaccagcctctttgcccagatcttcctgaacttgatctttctgaactagatgtgaacgacttggatacagacagctttctgggtggactcaagtggtgcagtgaccaatcagaaataatatccaatcagtacaacaatgagccttcaaacatatttgagaagatagatgaagagaatgaggcaaacttgctagcagtcctcacagagacactagacagtctccctgtggatgaagacggattgccctcatttgatgcgctgacagatggagacgtgaccactgacaatgaggctagtccttcctccatgcctgacggcacccctccaccccaggaggcagaagagccgtctctacttaagaagctcttactggcaccagccaacactcagctaagttataatgaatgcagtggtctcagtacccagaaccatgcaaatcacaatcacaggatcagaacaaaccctgcaattgttaagactgagaattcatggagcaataaagcgaagagtatttgtcaacagcaaaagccacaaagacgtccctgctcggagcttctcaaatatctgaccacaaacgatgaccctcctcacaccaaacccacagagaacagaaacagcagcagagacaaatgcacctccaaaaagaagtcccacacacagtcgcagtcacaacacttacaagccaaaccaacaactttatctcttcctctgaccccagagtcaccaaatgaccccaagggttccccatttgagaacaagactattgaacgcaccttaagtgtggaactctctggaactgcaggcctaactccacccaccactcctcctcataaagccaaccaagataacccttttagggcttctccaaagctgaagtcctcttgcaagactgtggtgccaccaccatcaaagaagcccaggtacagtgagtcttctggtacacaaggcaataactccaccaagaaagggccggagcaatccgagttgtatgcacaactcagcaagtcctcagtcctcactggtggacacgaggaaaggaagaccaagcggcccagtctgcggctgtttggtgaccatgactattgccagtcaattaattccaaaacagaaatactcattaatatatcacaggagctccaagactctagacaactagaaaataaagatgtctcctctgattggcaggggcagatttgttcttccacagattcagaccagtgctacctgagagagactttggaggcaagcaagcaggtctctccttgcagcacaagaaaacagctccaagaccaggaaatccgagccgagctgaacaagcacttcggtcatcccagtcaagctgtttttgacgacgaagcagacaagaccggtgaactgagggacagtgatttcagtaatgaacaattctccaaactacctatgtttataaattcaggactagccatggatggcctgtttgatgacagcgaagatgaaagtgataaactgagctacccttgggatggcacgcaatcctattcattgttcaatgtgtctccttcttgttcttcttttaactctccatgtagagattctgtgtcaccacccaaatccttattttctcaaagaccccaaaggatgcgctctcgttcaaggtccttttctcgacacaggtcgtgttcccgatcaccatattccaggtcaagatcaaggtctccaggcagtagatcctcttcaagatcctgctattactatgagtcaagccactacagacaccgcacgcaccgaaattctcccttgtatgtgagatcacgttcaagatcgccctacagccgtcggcccaggtatgacagctacgaggaatatcagcacgagaggctgaagagggaagaatatcgcagagagtatgagaagcgagagtctgagagggccaagcaaagggagaggcagaggcagaaggcaattgaagagcgccgtgtgatttatgtcggtaaaatcagacctgacacaacacggacagaactgagggaccgttttgaagtttttggtgaaattgaggagtgcacagtaaatctgcgggatgatggagacagctatggtttcattacctaccgttatacctgtgatgcttttgctgctcttgaaaatggatacactttgcgcaggtcaaacgaaactgactttgagctgtacttttgtggacgcaagcaatttttcaagtctaactatgcagacctagattcaaactcagatgactttgaccctgcttccaccaagagcaagtatgactctctggattttgatagtttactgaaagaagctcagagaagcttgcgcaggtaacatgttccctagctgaggatgacagagggatggcgaatacctcatgggacagcgcgtccttccctaaagactattgcaagtcatacttaggaatttctcctactttacactctctgtacaaaaacaaaacaaaacaacaacaatacaacaagaacaacaacaacaataacaacaatggtttacatgaacacagctgctgaagaggcaagagacagaatgatatccagtaagcacatgtttattcatgggtgtcagctttgcttttcctggagtctcttggtgatggagtgtgcgtgtgtgcatgtatgtgtgtgtgtatgtatgtgtgtggtgtgtgtgcttggtttaggggaagtatgtgtgggtacatgtgaggactgggggcacctgaccagaatgcgcaagggcaaaccatttcaaatggcagcagttccatgaagacacgcttaaaacctagaacttcaaaatgttcgtattctattcaaaaggaaatatatatatatatatatatatatatatatatatatataaattaaaaaggaaagaaaactaacaaccaaccaaccaaccaaccaaccacaaaccaccctaaaatgacagccgctgatgtctgggcatcagcctttgtactctgtttttttaagaaagtgcagaatcaacttgaagcaagctttctctcataacgtaatgattatatgacaatcctgaagaaaccacaggttccatagaactaatatcctgtctctctctctctctctctctctctcttttttttttctttttccttttgccatggaatctgggtgggagaggatactgcgggcaccagaatgctaaagtttcctaacattttgaagtttctgtagttcatccttaatcctgacacccatgtaaatgtccaaaatgttgatcttccactgcaaatttcaaaagccttgtcaatggtcaagcgtgcagcttgttcagcggttctttctgaggagcggacaccgggttacattactaatgagagttgggtagaactctctgagatgtgttcagatagtgtaattgctacattctctgatgtagttaagtatttacagatgttaaatggagtatttttattttatgtatatactatacaacaatgttcttttttgttacagctatgcactgtaaatgcagccttcttttcaaaactgctaaatttttcttaatcaagaatattcaaatgtaattatgaggtgaaacaattattgtacactaacatatttagaagctgaacttactgcttatatatatttgattgtaaaaacaaaaagacagtgtgtgtgtctgttgagtgcaacaagagcaaaatgatgctttccgcacatccatcccttaggtgagcttcaatctaagcatcttgtcaagaaatatcctagtcccctaaaggtattaaccacttctgcgatatttttccacattttcttgtcgcttgtttttctttgaagttttatacactggatttgttaggggaatgaaattttctcatctaaaatttttctagaagatatcatgattttatgtaaagtctctcaatgggtaaccattaagaaatgtttttattttctctatcaacagtagttttgaaactagaagtcaaaaatctttttaaaatgctgttttgttttaatttttgtgattttaatttgatacaaaatgctgaggtaataattatagtatgatttttacaataattaatgtgtgtctgaagactatctttgaagccagtatttctttcccttggcagagtatgacgatggtatttatctgtattttttacagttatgcatcctgtataaatactgatatttcattcctttgtttactaaagagacatatttatcagttgcagatagcctatttattataaattatgagatgatgaaaataataaagccagtggaaattttctacctaggatgcatgacaattgtcaggttggagtgtaagtgcttcatttgggaaattcagcttttgcagaagcagtgtttctacttgcactagcatggcctctgacgtgaccatggtgttgttcttgatgacattgcttctgctaaatttaataaaaacttcagaaaaacctccattttgatcatcaggatttcatctgagtgtggagtccctggaatggaattcagtaacatttggagtgtgtattcaagtttctaaattgagattcgattactgtttggctgacatgacttttctggaagacatgatacacctactactcaattgttcttttcctttctctcgcccaacacgatcttgtaagatggatttcacccccaggccaatgcagctaattttgatagctgcattcatttatcaccagcatattgtgttctgagtgaatccactgtttgtcctgtcggatgcttgcttgattttttggcttcttatttctaagtagatagaaagcaataaaaatactatgaaatgaaagaacttgttcacaggttctgcgttacaacagtaacacatctttaatccgcctaattcttgttgttctgtaggttaaatgcaggtattttaactgtgtgaacgccaaactaaagtttacagtctttctttctgaattttgagtatcttctgttgtagaataataataaaaagactattaagagcaataaattatttttaagaaatcgagatttagtaaatcctattatgtgttcaaggaccacatgtgttctctattttgcctttaaatttttgtgaaccaattttaaatacattctcctttttgccctggattgttgacatgagtggaatacttggtttcttttcttacttatcaaaagacagcactacagatatcatattgaggattaatttatcccccctacccccagcctgacaaatattgttaccatgaagatagttttcctcaatggacttcaaattgcatctagaattagtggagcttttgtatcttctgcagacactgtgggtagcccatcaaaatgtaagctgtgctcctctcatttttatttttatttttttgggagagaatatttcaaatgaacacgtgcaccccatcatcactggaggcaaatttcagcatagatctgtaggatttttagaagaccgtgggccattgccttcatgccgtggtaagtaccacatctacaattttggtaaccgaactggtgctttagtaatgtggatttttttcttttttaaaagagatgtagcagaataattcttccagtgcaacaaaatcaattttttgctaaacgactccgagaacaacagttgggctgtcaacattcaaagcagcagagagggaactttgcactattggggtatgatgtttgggtcagttgataaaaggaaaccttttcatgcctttagatgtgagcttccagtaggtaatgattatgtgtcctttcttgatggctgtaatgagaacttcaatcactgtagtctaagacctgatctatagatgacctagaatagccatgtactataatgtgatgattctaaatttgtacctatgtgacagacattttcaataatgtgaactgctgatttgatggagctactttaagatttgtaggtgaaagtgtaatactgttggttgaactatgctgaagagggaaagtgagcgattagttgagcccttgccgggccttttttccacctgccaattctacatgtattgttgtggttttattcattgtatgaaaattcctgtgattttttttaaatgtgcagtacacatcagcctcactgagctaataaagggaaacgaatgtttcaaatcta

SEQ ID NO: 175229 - DNA, 2397 bp, Artificial Sequence
  derived and/or modified sequence
atggcctgggatatgtgcaatcaagattcagaatccgtgtggtccgatatcgagtgcgccgcattggtgggagaggatcagccactgtgtccagatctgcccgaattagatttgtccgaactcgacgtgaatgatttagataccgacagtttcctgggtggactgaaatggtgttcggatcagtccgagataatatcaaatcagtataataacgaacccagcaatatttttgagaagatcgatgaagagaacgaggccaatcttctagcagtccttactgagacacttgactctctcccagtcgacgaagacggtctcccctcatttgatgccttgactgacggagacgtcacaacagataacgaagcctctcctagctccatgccggatggcaccccaccacctcaagaggcagaggaaccatctctgctgaagaaactgctgctggctccagccaatactcagctgagttataatgagtgttcaggcctgtctactcaaaaccatgccaatcataaccatagaattaggaccaaccctgcgattgtcaagactgagaattcctggagcaacaaggcaaaatccatttgccagcagcagaagccccagaggcgcccgtgttctgagttgttaaagtaccttaccacaaacgatgacccgcctcacaccaagccaacggaaaataggaattcttccagagacaaatgtactagtaagaagaagtctcacactcagtcacagtctcaacatcttcaggccaagcccactaccctttccctgcctctcacccctgagagcccgaacgaccctaagggaagtccatttgaaaacaagaccattgaacgcaccctttccgtggaactctctggaacagccggcctgacgcctcctaccacaccaccacataaggccaaccaggacaatcctttcagagctagcccaaaactgaagtcaagttgcaagaccgtggtcccccccccgtctaaaaagccaaggtactctgagagctctggtacccagggaaacaactctacaaagaaaggtcccgaacaatccgaactctatgctcagttgagcaagtcttccgtcctaactggaggacacgaagagagaaaaaccaagaggccgagtctgaggctgtttggagatcatgactattgccaaagcatcaattctaagaccgaaattctgattaacataagtcaggagctgcaggactcccggcaactagagaacaaagacgtatcatccgactggcagggacaaatctgttcaagtacggactccgaccagtgttacctacgggaaactctggaagcatcaaaacaagtttccccttgcagcacccggaagcagctacaggaccaggaaatacgtgccgaactcaataaacatttcggacatccttcccaggctgtattcgatgacgaggcagacaagacaggcgagcttcgtgacagtgacttctctaacgaacaatttagtaaactgcctatgttcatcaatagcggactggccatggacggcttgtttgacgactccgaagatgaatccgataaactttcttacccttgggacgggacacagagttactccctctttaatgtgtctccctcctgcagttccttcaacagcccttgtcgggacagcgtaagccctcccaaaagcctcttcagccagagaccccagaggatgaggagcagatccagatccttcagcaggcaccgcagctgctccagatctccatacagtaggtccaggagccgcagccctggatcacgcagtagctcgagatcctgttattactacgagtctagccattatagacacaggactcatcgcaatagtccactttacgtgaggagccgttctcgtagcccttatagtcggcggccaaggtacgattcttacgaagagtaccagcacgagaggctcaagagggaggaataccgcagagagtatgagaaaagggagagtgagcgggccaagcagcgagaacgccagcggcagaaagccatcgaggagagaagagtgatttacgtcggcaaaattcggccagatacaacaagaacagagctccgagatcggttcgaagtattcggcgagattgaagagtgtacagtcaatctcagagacgatggcgactcctatggttttatcacttacaggtacacctgcgatgccttcgcggctctggaaaatggctacactttgcgcaggtctaatgaaactgatttcgaactgtatttttgcggtcgcaagcagtttttcaaaagtaattatgccgacctggatagcaattctgatgacttcgaccccgcatccaccaagtctaaatatgactcactggactttgattccctgctgaaggaagcacagcggtcgcttcgacgctag

SEQ ID NO: 175230 - DNA, 2397 bp, Artificial Sequence
  derived and/or modified sequence
atggcctgggacatgtgcaaccaggacagcgagagcgtgtggagcgacattgaatgtgccgccctggtgggggaggaccagcccctgtgcccagacctgcctgagctggacctgtctgagctggatgtgaatgacctggacacagacagcttcctgggcggcctgaagtggtgcagcgaccagagcgagatcatcagcaaccagtacaacaatgagcccagcaacatctttgagaagattgatgaagaaaatgaggccaacctgctggccgtgctgacagagaccctggacagcctgcctgtggatgaagatggcctgcccagctttgatgccctgacagatggagatgtgaccacagacaatgaggccagccccagctccatgccagatggcaccccaccaccccaggaggccgaggagcccagcctgctgaagaagctgctgctggccccagccaacacccagctgagctacaatgaatgttctggcctgagcacccagaaccacgccaaccacaaccaccgcatccgcaccaacccagccatcgtgaagacagagaacagctggagcaacaaggccaagagcatctgccagcagcagaagccccagaggcggccctgcagcgagctgctgaagtacctgaccaccaatgatgaccccccccacaccaagcccacagaaaatagaaacagcagccgggacaagtgcaccagcaagaagaagagccacacccagagccagagccagcacctgcaggccaagcccaccaccctgagcctgcccctgaccccagagagccccaatgaccccaagggcagcccctttgagaacaagaccatcgagaggaccctgtctgtggagctgtctggaacagctggcctgaccccacccaccaccccaccccacaaggccaaccaggacaaccccttccgggccagccccaagctgaagagcagctgcaagacagtggtgcccccacccagcaagaagccccgctacagcgagagcagcggcacccagggcaacaacagcaccaagaagggccctgagcagagcgagctgtatgcccagctgagcaagagctctgtgctgactggaggccacgaggagaggaagaccaagaggcccagcctgcggctgtttggagaccatgactactgccagagcatcaacagcaagacagagatcctgatcaacatcagccaggagctgcaggacagccggcagctggagaacaaggatgtgtccagtgactggcagggccagatctgcagcagcacagacagcgaccagtgctacctgcgggagaccctggaggccagcaagcaggtgagcccctgcagcaccaggaagcagctgcaggaccaggagatccgggcagagctgaacaagcacttcggccaccccagccaggccgtgtttgatgatgaggccgacaagacaggagagctgcgggacagcgacttcagcaatgagcagttcagcaagctgcccatgttcatcaacagcggcctggccatggatggcctgtttgatgacagtgaagatgaaagtgacaagctgagctacccctgggatggcacccagagctacagcctcttcaacgtgagccccagctgcagcagcttcaacagcccctgccgggacagcgtgtccccacccaagagcctcttcagccagaggccccagaggatgaggagccgcagccgctccttcagccgccacaggagctgcagccgcagcccctacagccgcagccgcagccgcagccctggcagccgcagcagcagccgcagctgctactactatgagagcagccactaccgccacaggacccacaggaacagccccctgtatgtgcgcagccgcagccgcagcccctacagccggcggcccaggtatgacagctatgaggagtaccagcacgagcggctgaagcgggaggagtacagaagagaatatgagaagcgggagagcgagcgggccaagcagcgggagcggcagaggcagaaggccatcgaggagcggcgggtcatctacgtgggcaagatccggccagacaccaccaggacagagctgcgggacagatttgaggtgtttggagaaattgaagaatgtactgtgaacctgagagatgatggagacagctatggcttcatcacctaccgctacacctgtgatgcctttgctgccctggagaatggctacaccctgcggcgcagcaatgaaacagactttgagctgtacttctgtggcaggaagcagttcttcaagagcaactatgctgacctggacagcaacagtgatgactttgatcctgccagcaccaagagcaaatatgacagcctggactttgacagcctgctgaaggaggcccagaggagcctgcggaggtag

SEQ ID NO: 175231 - DNA, 2397 bp, Artificial Sequence
  derived and/or modified sequence
atggcctgggacatgtgcaaccaggacagcgagagcgtgtggagcgacatcgagtgcgcagccctcgtcggggaggaccaacctctttgtccagatttacctgagttagacttgtctgagctggacgtcaatgaccttgataccgactcgttcttagggggacttaagtggtgtagtgatcagagcgagatcatttccaaccagtataataatgaaccatcgaacatatttgaaaaaatagacgaagaaaacgaggctaatttactggcagtgcttacagaaacactggacagtcttcctgtcgatgaggacggactgccttcttttgacgccttaacagacggtgatgtaacaaccgacaacgaagcgtccccaagctccatgcccgatggtacacctcctcctcaagaagccgaggagccttccctgcttaaaaagctacttttggctccagcaaacactcaactgtcttacaacgagtgcagcggattgtccactcagaatcacgcaaaccataatcatcgcatcagaactaacccagccattgtcaaaaccgaaaattcctggtctaacaaagccaagagcatctgtcagcagcagaaacctcagcgaagaccttgctccgaattgctgaagtatttgaccactaacgatgacccccctcatactaaacctaccgaaaaccggaactcctctcgcgataaatgcacgtctaagaagaaatcccacacacagtctcaaagccagcacctccaggccaagccaactacactaagtctacccctgaccccagagtccccaaacgatccaaagggtagtccgtttgagaacaagacaatcgaacgcacactcagcgtggaattaagcgggactgctggtcttacaccaccaacaacacctcctcataaagccaatcaggacaatccgtttagggctagccccaaactaaaaagctcttgtaaaaccgtagttcctcccccgtcaaagaagccgcgctacagtgaatcatcaggcacacaaggcaacaacagtaccaaaaagggtcccgagcagtcagaactctacgcacagctatcaaagagctccgtgttaaccggaggacacgaggagcgtaagaccaagcgtcctagcctccgcctcttcggggatcacgactattgtcagagtatcaattccaaaacggaaatcctgatcaatatttctcaggaattgcaggactctcgccagctggaaaataaggacgtctcctcagactggcagggacagatctgtagtagcaccgacagtgaccagtgttacctcagagagaccctggaggcctccaaacaggtgtctccctgttctacccgcaagcagctgcaggatcaggaaatcagggctgaactgaacaagcactttggccacccgagccaggccgtgttcgatgacgaggccgacaaaactggggaactgagagactccgatttcagtaacgaacagttcagtaagcttcccatgtttatcaactcaggtctcgccatggacggactgtttgatgattccgaagatgagtctgataaattatcttacccttgggatgggacccagtcctactccctctttaacgtgagccctagttgcagttcgtttaattccccctgtagagatagtgtgagcccccctaagtccctcttttcacagcgcccgcaaagaatgcggtcccgatcccggtctttctctcgtcataggtcctgcagtagaagcccttatagccggagcagatcaagaagccccgggtcccggagcagctcccggtcttgctattattatgagtctagtcactataggcatcgcactcatagaaatagccccctgtacgtcagaagccgcagccggtctccatactctcgccgtccccgctacgactcatatgaggagtaccagcacgaacgcctgaagcgggaagagtaccggcgagaatacgagaaaagggagagtgagcgtgccaaacagcgggagcggcaacggcagaaggcaatcgaggaaagacgggtgatttatgtaggaaaaatcagaccggatacaactaggacggagctgagggacaggttcgaggtgttcggtgagatcgaggagtgcaccgtgaatctgagagacgacggcgattcctatggttttattacttaccggtacacatgtgacgccttcgctgcgctggagaatggatacactctgcgcaggtcaaacgaaaccgacttcgaactgtatttctgcgggagaaaacagtttttcaagtcgaactacgccgaccttgattcaaacagtgatgacttcgaccccgcttccacaaagtctaaatatgattcattggacttcgactctctgcttaaagaggcacaacggtccctgcggaggtag

SEQ ID NO: 175232 - DNA, 2397 bp, Artificial Sequence
  derived and/or modified sequence
atggcatgggatatgtgcaaccaagatagtgaatcagtgtggtccgacatcgagtgcgctgcgttggtgggcgaggaccagccactgtgccccgacctgccagagctcgatctgtctgagctcgatgtgaacgatctggacaccgattctttcctcggagggctgaagtggtgtagcgatcagtctgagatcatcagtaaccaatataacaacgagccaagcaacatcttcgagaagatcgatgaggagaacgaggccaacctcctggcagtcctgacagaaactcttgattccctgcccgtcgatgaggacgggttgccatccttcgatgccctcaccgatggcgatgtcaccaccgacaacgaggccagcccatccagtatgccagacggcacaccgccaccgcaggaggctgaggaacctagcctgctaaagaaactgcttctggctcccgctaatacacagctgtcgtacaacgaatgcagcggcctgtcaactcagaaccacgctaatcacaaccaccgcatacggaccaacccagccatcgttaagaccgagaacagctggtctaacaaggcaaagtctatttgtcagcagcagaagccccagcgtcggccttgcagtgaattgttgaaatacctcaccactaacgatgatccaccccataccaagccgacagaaaatcggaacagttcgcgcgacaaatgtacctctaaaaagaaatcccatacgcagtctcagtcgcaacacctccaggccaagccaacaaccctgtctcttcctttgaccccagaatcccccaatgaccccaaagggtcccctttcgaaaacaagacaattgagcgcaccctttctgtggagctcagtggcactgccggtctgactccacccaccacaccccctcataaagctaatcaggataacccattccgggctagtccaaaattgaaatcaagctgcaagaccgtggtgccgcctccctccaaaaagccccgatacagcgaatctagtgggacccaggggaacaattccactaaaaagggccctgagcaaagcgagctgtatgctcagctgtctaagagttccgttctgactggcggacacgaggagcgaaagactaagcgcccttcactccggctgttcggggaccacgactattgtcagagcataaattctaagaccgaaattttaatcaatatcagccaggagctgcaagacagtcgtcagctggagaataaagacgtgagctccgactggcagggccagatatgcagttccactgatagcgatcagtgctatctgagagaaaccctcgaggccagcaagcaggtgtcgccatgttctacccggaaacaactgcaggatcaggagattcgggctgaattaaacaagcatttcgggcatccgtcccaggccgtatttgacgacgaggctgacaaaaccggggaactgcgtgacagtgatttctcaaatgaacagttcagcaagttaccaatgttcattaactctggactcgccatggacggactgtttgatgacagcgaggatgaatccgataaactctcttatccatgggatgggacgcagtcctattctttgttcaacgtttctccaagctgtagttcctttaactcaccatgccgcgattcagtatctcctcctaagagcctcttttcacagaggccacagaggatgcgctcccggtcaaggtcttttagcagacatcgctcttgttcaaggtctccctatagtagatctaggagtcgcagcccgggatcccgatcatcatcaaggtcgtgctattactatgagtcatctcactaccgacatcgcacacaccgaaactctccactatacgtgagatccaggagtcggtctccttactcaagaaggccaaggtacgactcatacgaggagtatcaacatgagagacttaaaagggaggagtaccggcgagagtacgaaaaacgtgaaagtgagagagccaagcaacgcgaaagacagcgtcagaaagcaattgaggagcgcagggttatatacgtgggaaaaattaggccagatactactagaacagaactgcgagacaggtttgaagtgttcggggagatagaggagtgcaccgttaatctgcgcgacgacggtgacagttacggtttcattacatatcgatacacgtgcgatgcttttgcagcgctcgagaacgggtatacactcaggaggagcaacgagaccgatttcgagctgtatttttgtgggcgaaagcagtttttcaaatcaaattacgcagacctggatagtaattctgatgactttgacccagcttcaactaagtcaaaatacgactccctggactttgactctctcctgaaggaggcccaacggtctctccgccgatag

SEQ ID NO: 175233 - DNA, 2397 bp, Artificial Sequence
  derived and/or modified sequence
atggcctgggacatgtgcaaccaggacagcgagagcgtgtggagcgacatcgagtgcgccgccctggtgggcgaggaccagcccctgtgccccgacctgcccgagctggacctgagcgagctggacgtgaacgacctggacaccgacagcttcctgggcggcctgaagtggtgcagcgaccagagcgagatcatcagcaaccagtacaacaacgagcccagcaacatcttcgagaagatcgacgaggagaacgaggccaacctgctggccgtgctgaccgagaccctggacagcctgcccgtggacgaggacggcctgcccagcttcgacgccctgaccgacggcgacgtgaccaccgacaacgaggccagccccagcagcatgcccgacggcaccccccccccccaggaggccgaggagcccagcctgctgaagaagctgctgctggcccccgccaacacccagctgagctacaacgagtgcagcggcctgagcacccagaaccacgccaaccacaaccacagaatcagaaccaaccccgccatcgtgaagaccgagaacagctggagcaacaaggccaagagcatctgccagcagcagaagccccagagaagaccctgcagcgagctgctgaagtacctgaccaccaacgacgaccccccccacaccaagcccaccgagaacagaaacagcagcagagacaagtgcaccagcaagaagaagagccacacccagagccagagccagcacctgcaggccaagcccaccaccctgagcctgcccctgacccccgagagccccaacgaccccaagggcagccccttcgagaacaagaccatcgagagaaccctgagcgtggagctgagcggcaccgccggcctgaccccccccaccacccccccccacaaggccaaccaggacaaccccttcagagccagccccaagctgaagagcagctgcaagaccgtggtgcccccccccagcaagaagcccagatacagcgagagcagcggcacccagggcaacaacagcaccaagaagggccccgagcagagcgagctgtacgcccagctgagcaagagcagcgtgctgaccggcggccacgaggagagaaagaccaagagacccagcctgagactgttcggcgaccacgactactgccagagcatcaacagcaagaccgagatcctgatcaacatcagccaggagctgcaggacagcagacagctggagaacaaggacgtgagcagcgactggcagggccagatctgcagcagcaccgacagcgaccagtgctacctgagagagaccctggaggccagcaagcaggtgagcccctgcagcaccagaaagcagctgcaggaccaggagatcagagccgagctgaacaagcacttcggccaccccagccaggccgtgttcgacgacgaggccgacaagaccggcgagctgagagacagcgacttcagcaacgagcagttcagcaagctgcccatgttcatcaacagcggcctggccatggacggcctgttcgacgacagcgaggacgagagcgacaagctgagctacccctgggacggcacccagagctacagcctgttcaacgtgagccccagctgcagcagcttcaacagcccctgcagagacagcgtgagcccccccaagagcctgttcagccagagaccccagagaatgagaagcagaagcagaagcttcagcagacacagaagctgcagcagaagcccctacagcagaagcagaagcagaagccccggcagcagaagcagcagcagaagctgctactactacgagagcagccactacagacacagaacccacagaaacagccccctgtacgtgagaagcagaagcagaagcccctacagcagaagacccagatacgacagctacgaggagtaccagcacgagagactgaagagagaggagtacagaagagagtacgagaagagagagagcgagagagccaagcagagagagagacagagacagaaggccatcgaggagagaagagtgatctacgtgggcaagatcagacccgacaccaccagaaccgagctgagagacagattcgaggtgttcggcgagatcgaggagtgcaccgtgaacctgagagacgacggcgacagctacggcttcatcacctacagatacacctgcgacgccttcgccgccctggagaacggctacaccctgagaagaagcaacgagaccgacttcgagctgtacttctgcggcagaaagcagttcttcaagagcaactacgccgacctggacagcaacagcgacgacttcgaccccgccagcaccaagagcaagtacgacagcctggacttcgacagcctgctgaaggaggcccagagaagcctgagaagatag

SEQ ID NO: 175234 - protein, 264 aa, Artificial Sequence
  derived and/or modified sequence
MENYGIEWHSVRDSEGQKLLIGVGPEGISICKDDFSPINRIAYPVVQMATQSGKNVYLTVTKESGNSIVLLFKMISTRAASGLYRAITETHAFYRCDTVTSAVMMQYSRDLKGHLASLFLNENINLGKKYVFDIKRTSKEVYDHARRALYNAGVVDLVSRNNQSPSHSPLKSSESSMNCSSCEGLSCQQTRVLQEKLRKLKEAMLCMVCCEEEINSTFCPCGHTVCCESCAAQLQSCPVCRSRVEHVQHVYLPTHTSLLNLTVI

SEQ ID NO: 175235 - protein, 445 aa, Artificial Sequence
  derived and/or modified sequence
MLCYVTRPDAVLMEVEVEAKANGEDCLNQVCRRLGIIEVDYFGLQFTGSKGESLWLNLRNRISQQMDGLAPYRLKLRVKFFVEPHLILQEQTRHIFFLHIKEALLAGHLLCSPEQAVELSALLAQTKFGDYNQNTAKYNYEELCAKELSSATLNSIVAKHKELEGTSQASAEYQVLQIVSAMENYGIEWHSVRDSEGQKLLIGVGPEGISICKDDFSPINRIAYPVVQMATQSGKNVYLTVTKESGNSIVLLFKMISTRAASGLYRAITETHAFYRCDTVTSAVMMQYSRDLKGHLASLFLNENINLGKKYVFDIKRTSKEVYDHARRALYNAGVVDLVSRNNQSPSHSPLKSSESSMNCSSCEGLSCQQTRVLQEKLRKLKEAMLCMVCCEEEINSTFCPCGHTVCCESCAAQLQSCPVCRSRVEHVQHVYLPTHTSLLNLTVI

SEQ ID NO: 175236 - DNA, 1338 bp, Artificial Sequence
  derived and/or modified sequence
atgctgtgctatgtgacacgacccgacgctgtcctcatggaggtggaggtggaggctaaagccaatggtgaggactgcctgaatcaggtgtgccggaggctgggaattatcgaagtggactacttcggactgcagttcaccgggtctaaaggagagagtctgtggctgaacttacgtaatagaattagccaacaaatggacgggcttgccccttacaggctgaaactgcgggtaaaatttttcgtagaaccacacttgatcctccaggaacaaactcgacatatctttttcctccacattaaagaggcgctccttgctggtcacttgctatgcagtcctgagcaagcagtcgagctgagcgcgttgttagcccagactaaattcggcgattataatcagaataccgctaaatacaattatgaggaactttgcgccaaagaactgagctccgctactctaaatagcatagtggccaagcacaaagaactagagggtactagccaggcatctgctgagtatcaggtcctgcagatcgtatccgccatggaaaactacggcatagagtggcattccgtccgagattcagaggggcagaagttattaattggagttggacctgagggcatttccatttgcaaggatgacttttcccccattaatcgcattgcataccccgtagttcagatggcaactcagtcaggcaaaaacgtgtatttgaccgttacgaaagagtcgggtaacagcattgtgctgttgtttaaaatgatcagtacaagagccgcgagcgggctctaccgagctataactgaaactcacgccttctataggtgcgacacagtgaccagcgcggtgatgatgcaatatagtcgagatttaaaaggccacttggcgagcctgttcctcaacgagaacattaatctcggtaaaaaatacgtctttgacattaagcgcaccagcaaggaggtatatgaccatgctagaagggcactctacaacgccggtgtggtggatctcgtgtccaggaacaaccaaagtcccagtcactctccactgaagagcagcgagagcagcatgaactgcagctcttgtgagggactgtcatgccagcaaacgcgcgtattacaagaaaagctgagaaagctgaaggaggcgatgttgtgtatggtgtgttgcgaagaggagataaactcaaccttttgtccatgtggccacactgtttgttgtgagagctgcgctgcccaactgcaatcctgcccggtatgccgctcccgggtcgagcacgtacagcatgtatacttgccaactcacacaagtcttttgaacctgacagttatttag

SEQ ID NO: 175237 - DNA, 1338 bp, Artificial Sequence
  derived and/or modified sequence
atgctgtgctacgtgaccaggccagatgctgtgctgatggaggtggaggtggaggccaaggccaacggggaggactgcctgaaccaggtgtgccggcggctgggcatcatcgaggtggactacttcggcctgcagttcaccggcagcaagggggagagcctgtggctgaacctgaggaaccgcatcagccagcagatggatggcctggccccctaccgcctgaagctgcgggtgaagttctttgtggagccccacctgatcctgcaggagcagaccaggcacatcttcttcctgcacatcaaggaggccctgctggccggccacctgctgtgcagccctgagcaggccgtggagctgagcgccctgctggcccagaccaagtttggagactacaaccagaacacagccaagtacaactatgaggagctgtgtgccaaggagctgagcagcgccaccctgaacagcatcgtggccaagcacaaggagctggagggcaccagccaggccagcgctgagtaccaggtgctgcagatcgtgtctgccatggagaactatggaattgagtggcacagcgtgcgggacagcgagggccagaagctgctgattggagtgggccctgagggcatcagcatctgcaaggatgacttcagccccatcaaccgcatcgcctaccctgtggtgcagatggccacccagagcggcaagaatgtgtacctgactgtgaccaaggagagcggcaacagcatcgtgctgctcttcaagatgatcagcacccgggccgccagcggcctgtaccgggccatcacagagacccacgccttctaccgctgtgacacagtgaccagcgctgtgatgatgcagtacagccgggacctgaagggccacctggccagcctcttcctgaatgaaaacatcaacctgggcaagaagtatgtgtttgacatcaagaggaccagcaaggaggtgtatgaccacgcccggcgggccctgtacaatgccggcgtggtggacctggtgtccaggaacaaccagagccccagccacagccccctgaagagcagcgagagctccatgaactgcagcagctgtgagggcctgagctgccagcagaccagggtgctgcaggagaagctgaggaagctgaaggaggccatgctgtgcatggtgtgctgtgaggaggagatcaacagcaccttctgcccctgtggccacacagtgtgctgtgagagctgtgccgcccagctgcagagctgccctgtgtgccgcagccgggtggagcacgtgcagcacgtgtacctgcccacccacaccagcctgctgaacctgaccgtcatctag

SEQ ID NO: 175238 - DNA, 2796 bp, Artificial Sequence
  derived and/or modified sequence
gcggccgcggggccccggacaagggtccgcagagctgcagccttcgagggccagccctctccgagtccggggctgggtcccaccagtgacaaggcggcagccccgcgcacaccaaagagaaggcggctgtggcggcagcggcagccccagccatgctgtgttatgtgacgaggccggacgcggtgctgatggaggtggaggtggaggcgaaagccaacggcgaggactgcctcaaccaggcatatctttttcttgcacatcaaggaggccctcttggcaggccacctcttgtgttccccagagcaggcagtggaactcagtgccctcctggcccagaccaagtttggagactacaaccagaacactgccaagtataactatgaggagctctgtgccaaggagctctcctctgccaccttgaacagcattgttgcaaaacataaggagttggaggggaccagccaggcttcagctgaataccaagttttgcagattgtgtcggcaatggaaaactatggcatagaatggcattctgtgcgggatagcgaagggcagaaactgctcattggggttggacctgaaggaatctcaatttgtaaagatgactttagcccaattaataggatagcttatcctgtggtgcagatggccacccagtcaggaaagaatgtatatttgacggtcaccaaggaatctgggaacagcatcgtgctcttgtttaaaatgatcagcaccagggcggccagcgggctctaccgagcgataacagagacgcacgcattctacaggtgtgacacagtgaccagcgccgtgatgatgcagtatagccgtgacttgaagggccacttggcatctctgtttctgaatgaaaacattaaccttggcaagaaatatgtctttgatattaaaagaacatcaaaggaggtgtatgaccatgccaggagggctctgtacaatgctggcgttgtggacctcgtttcaagaaacaaccagagcccttcacactcgcctctgaagtcctcagaaagcagcatgaactgcagcagctgcgagggcctcagctgccagcagacccgggtgctgcaggagaagctacgcaagctgaaggaagccatgctgtgcatggtgtgctgcgaggaggagatcaactccaccttctgtccctgtggccacactgtgtgctgtgagagctgcgccgcccagctacagtcatgtcccgtctgcaggtcgcgtgtggagcatgtccagcacgtctatctgccaacgcacaccagtcttctcaatctgactgtaatctaatctgttgtgcttttgttggacttggcatgtttccatgaactgcactattataaactattaaaatgatagattgtggagaaagtaattattccaacacccatctgccatgcgatgttaaaaaaaaaaaaaaggaagaaaaataacacagctactcctcactgcaaaaacatatccatgcgtagaatcaacaactccagtcatgggaccaggaggagctctgggacgcagacacattccttggatgttgattttttttatgatctagtaaaggaataggtaaagtctttgatgtcagtgaagtggcaacatagccaaaaagttgggtaccttttaggaaatgatgttgtaagtctccttaatgtatcctgaggtaagtttcctactggcagcagattttgtaagaattacttttaagaatttcattctttttgtatggtcatggagctccaaccatttttaataggaaagtcttttgtaaattgttgtcgttttaatgtcatttctgtctttataacttgatcaagaatgattggaaggcaaacaggtttacaaatcaattctgtgacttttaaaaagttgacaatgttgtcagatttaaaccagtgtggctagtaaaaagcagctcactcaatgtgggtggctccctattcctttacgctccccctatccctaccccacaagcctttcgattataaaatactaccaatcttgttataagattactgtggagtagtcaagtactccccgggccttctgagctggtggaatattttatttcagactgaaaacagagagcactctccttgggaagggaaagcggagcttgctgagtgagagatggagcctcatggtgtacaactgagggtagttaactcatcacttctcccaagcactcgatcccagcttcacccactggtgttgctttgcttgaactgttcaagccttttatagccttaccataagtatttagatatggtgtccttttctgtttttggggggggagttttgttgtgtttttttaaagtaagtgcttaagtattaactttgggttgtcccctctgtatgtttcgaaggggttttggttctttttgcttctgttttcttaaacatgttttccactcccacttgggcattttggaagctggtcagctagcaggttttctgggatgtcgggagacctagatgaccttatcgggtgcaatactagctaaggtaaagctagaaacctacactgtcactttactgagatttctgagtatacttttcatattgccttaatgtagcagtaatgtgtttatgcatttgtttctttgcacagacattttgtcaaatattaaaactctacttttttatggcacatattagcatataagcctttattccaagaggtatttattttttcacttgtaaaaaaataatgtttccacgtaaagaactctgttatatcctagaggactctgtcttttatattcgggataataaagactttaaagcaaa

SEQ ID NO: 175239 - DNA, 1666 bp, Artificial Sequence
  derived and/or modified sequence
gggcagctggcgggcagcgggtgagggggtggcggggacgcgagtggcggccgcggggccccggacaagggtccgcagagctgcagccttcgagggccagccctctccgagtccggggctgggtcccaccagtgacaaggcggcagccccgcgcacaccaaagagaaggcggctgtggcggcagcggcagccccagccatgctgtgttatgtgacgaggccggacgcggtgctgatggaggtggaggtggaggcgaaagccaacggcgaggactgcctcaaccaggtgtgcaggcgactgggaatcatagaagttgactattttggactgcagtttacgggtagcaaaggtgaaagtttatggctaaacctgagaaaccggatctcccagcagatggatgggctagccccttacaggcttaaacttagagtcaagttcttcgtggagcctcatctcatcttacaggagcagactaggcatatctttttcttgcacatcaaggaggccctcttggcaggccacctcttgtgttccccagagcaggcagtggaactcagtgccctcctggcccagaccaagtttggagactacaaccagaacactgccaagtataactatgaggagctctgtgccaaggagctctcctctgccaccttgaacagcattgttgcaaaacataaggagttggaggggaccagccaggcttcagctgaataccaagttttgcagattgtgtcggcaatggaaaactatggcatagaatggcattctgtgcgggatagcgaagggcagaaactgctcattggggttggacctgaaggaatctcaatttgtaaagatgactttagcccaattaataggatagcttatcctgtggtgcagatggccacccagtcaggaaagaatgtatatttgacggtcaccaaggaatctgggaacagcatcgtgctcttgtttaaaatgatcagcaccagggcggccagcgggctctaccgagcgataacagagacgcacgcattctacaggtgtgacacagtgaccagcgccgtgatgatgcagtatagccgtgacttgaagggccacttggcatctctgtttctgaatgaaaacattaaccttggcaagaaatatgtctttgatattaaaagaacatcaaaggaggtgtatgaccatgccaggagggctctgtacaatgctggcgttgtggacctcgtttcaagaaacaaccagagcccttcacactcgcctctgaagtcctcagaaagcagcatgaactgcagcagctgcgagggcctcagctgccagcagacccgggtgctgcaggagaagctacgcaagctgaaggaagccatgctgtgcatggtgtgctgcgaggaggagatcaactccaccttctgtccctgtggccacactgtgtgctgtgagagctgcgccgcccagctacagtcatgtcccgtctgcaggtcgcgtgtggagcatgtccagcacgtctatctgccaacgcacaccagtcttctcaatctgactgtaatctaatctgttgtgcttttgttggacttggcatgtttccatgaactgcactattataaactattaaaatgatagattgtggagaaagtaattattccaacacccatctgccatgcgatgttaaaaaaaaaaaaaa

SEQ ID NO: 175240 - DNA, 1338 bp, Artificial Sequence
  derived and/or modified sequence
atgctgtgctacgtgacccggcccgacgccgtgctgatggaggtggaagtagaagccaaggcaaacggtgaggactgcctgaaccaagtttgccgtcgccttgggatcatcgaggtggattactttggcctgcagtttacaggctctaagggggagtccctgtggctgaacttgaggaatcgtatttctcaacaaatggatgggctggcaccatataggctcaagttgcgagtaaagttttttgtcgaaccacacctaatccttcaggagcagacaaggcatatattcttcctgcacatcaaggaggctttgttggcaggccatctattgtgctccccagagcaggccgtcgagctctccgcgctcctcgcccagaccaaatttggagactataatcagaacacagcgaagtacaactatgaggaactctgcgctaaggagctgagcagcgcgactttaaattctatcgtggccaagcacaaggagttggagggaacctctcaagcatcagcggaataccaggtcctccaaatcgtttcagccatggaaaactatggaatagaatggcactccgtgcgtgactcagagggccaaaagctattgatcggcgtcgggccggaaggtatttccatttgcaaggatgatttttcccccattaaccggatagcttaccctgtcgtgcagatggcaactcagtctggcaagaatgtgtacctcaccgttacgaaagagagtggtaactccatcgtactgctgttcaagatgatcagcacacgcgccgcgtcggggttgtatcgggctattaccgagactcatgcgttctaccggtgcgacacagttacttctgccgtcatgatgcagtacagcagagatctaaagggccacctggcttctctgtttctcaatgagaatataaacctgggtaagaagtacgtctttgatatcaagcggacttctaaggaggtgtacgatcatgcccgtagagccctctacaacgcaggggtagtggaccttgtgagccgcaacaaccagtcccctagccattccccattaaagagctctgagtccagcatgaactgttcaagctgcgagggattatcttgccagcagacacgagttctccaagagaagctgcgaaagctcaaggaggcgatgctgtgtatggtttgctgtgaagaagaaattaactcgacattttgcccttgtggacacaccgtctgttgtgagagctgcgctgctcaattgcaatcttgtccagtttgccgctcgcgtgtcgagcacgttcagcacgtgtacttgccaacgcacactagccttctcaacctgaccgtgatctag

SEQ ID NO: 175241 - DNA, 1338 bp, Artificial Sequence
  derived and/or modified sequence
atgctctgctacgtaacgagaccagacgccgtgcttatggaggtggaggtcgaagctaaagcaaatggcgaagactgcctgaaccaagtgtgtcggagactggggataatagaggtcgactatttcggactacaattcactgggagcaaaggagagagtctgtggcttaacttacggaatcgcatctctcagcagatggacggcctggccccatatcgcctgaagctgcgggtgaagtttttcgtggagccacatcttattctccaagagcagactagacatatcttcttcttgcacataaaagaagctctcctggccggacacttgctatgctcccctgaacaggccgttgagctgtctgctttgctagcgcagaccaaatttggggattataaccagaacacagccaagtataattacgaggaactgtgcgccaaggaactgtcatccgcaaccctgaatagcattgtcgccaagcacaaagagttggaagggaccagccaggctagcgccgagtatcaggtccttcagatagtgagcgccatggagaattacggcattgaatggcacagcgtaagagactctgagggacagaagcttctaatcggagtggggccagagggtatttcaatctgtaaggatgacttctctccaattaacaggatagcctacccagtagttcaaatggcaacgcaatcaggaaagaatgtgtatctgactgttaccaaagaatctgggaattcaatcgtgttactgtttaaaatgattagcactcgtgctgcaagtggtttataccgcgcaatcacagaaacccacgccttctatcgctgcgataccgttacaagcgctgtgatgatgcagtatagtagggacttgaaaggacatctggccagcttgttcctaaatgaaaacatcaacctgggcaagaagtacgtgtttgacatcaagaggacttccaaggaagtgtatgatcacgctagacgggctttatataacgcaggtgtcgtggacctggtctccagaaataaccagtcaccatcccattcaccgcttaaatcatctgagtcaagcatgaactgctcttcctgtgaaggcctgtcttgccagcagacacgggtactacaggagaaactcaggaagctcaaagaagcaatgctgtgtatggtgtgctgcgaagaggagatcaacagcacgttctgcccctgtggtcacacagtgtgctgcgagagctgtgccgcacagttgcagtcttgtcccgtgtgccgtagcagagttgagcatgtgcaacacgtctacctccctacacatacctctctgctgaatctcacagtgatctag

SEQ ID NO: 175242 - DNA, 1338 bp, Artificial Sequence
  derived and/or modified sequence
atgctgtgctacgtgaccagacccgacgccgtgctgatggaggtggaggtggaggccaaggccaacggcgaggactgcctgaaccaggtgtgcagaagactgggcatcatcgaggtggactacttcggcctgcagttcaccggcagcaagggcgagagcctgtggctgaacctgagaaacagaatcagccagcagatggacggcctggccccctacagactgaagctgagagtgaagttcttcgtggagccccacctgatcctgcaggagcagaccagacacatcttcttcctgcacatcaaggaggccctgctggccggccacctgctgtgcagccccgagcaggccgtggagctgagcgccctgctggcccagaccaagttcggcgactacaaccagaacaccgccaagtacaactacgaggagctgtgcgccaaggagctgagcagcgccaccctgaacagcatcgtggccaagcacaaggagctggagggcaccagccaggccagcgccgagtaccaggtgctgcagatcgtgagcgccatggagaactacggcatcgagtggcacagcgtgagagacagcgagggccagaagctgctgatcggcgtgggccccgagggcatcagcatctgcaaggacgacttcagccccatcaacagaatcgcctaccccgtggtgcagatggccacccagagcggcaagaacgtgtacctgaccgtgaccaaggagagcggcaacagcatcgtgctgctgttcaagatgatcagcaccagagccgccagcggcctgtacagagccatcaccgagacccacgccttctacagatgcgacaccgtgaccagcgccgtgatgatgcagtacagcagagacctgaagggccacctggccagcctgttcctgaacgagaacatcaacctgggcaagaagtacgtgttcgacatcaagagaaccagcaaggaggtgtacgaccacgccagaagagccctgtacaacgccggcgtggtggacctggtgagcagaaacaaccagagccccagccacagccccctgaagagcagcgagagcagcatgaactgcagcagctgcgagggcctgagctgccagcagaccagagtgctgcaggagaagctgagaaagctgaaggaggccatgctgtgcatggtgtgctgcgaggaggagatcaacagcaccttctgcccctgcggccacaccgtgtgctgcgagagctgcgccgcccagctgcagagctgccccgtgtgcagaagcagagtggagcacgtgcagcacgtgtacctgcccacccacaccagcctgctgaacctgaccgtgatctag

SEQ ID NO: 175243 - DNA, 1507 bp, Artificial Sequence
  derived and/or modified sequence
gggaaataagagagaaaagaagagtaagaagaaatataagagccaccatgctctgttacgtgactagacccgatgctgtgctcatggaagtggaagtcgaagccaaggccaacggagaggactgcctcaaccaagtctgccgccgcctggggatcattgaagtcgactacttcggactgcagtttaccgggtccaagggcgaaagcttgtggctcaatctgaggaacagaatcagccagcagatggatggcctggcgccttatcggctcaagctgagagtgaaattcttcgtcgaaccgcacctgattttgcaagagcagactcgacacatcttcttccttcatatcaaggagagcctgcttgcgggacatcttcagtgttcgccggaacaggcggtcgagctgtccgccctgctggcccagactaagttcggcgactacaatcagaacacggctcagtacagctacgaggacctgtgcgagaaggagctgtcctcctcgaccctgaactccatcgtggcaaagcacaaggagctggaaggcatctcgcaagcctcagccgaataccaagtgctgcagatcgtgtcggccatggaaaactacggcattgagtggcacgccgtgcgggactcagaaggtcaaaagctcctgatcggagtgggccctgaaggaatctccatctgcaaagaggacttctcgcccatcaaccgcattgcatacccggtggtgcaaatggccacccagtccggaaagaacgtgtacctgaccgtgacaaaggaatccgggaacagcatcgtgctgctgtttaagatgatctcgacccgggccgcttctgggctgtaccgggccatcactgaaacccatgcgttctatcgctgcgacaccgtcacctccgccgtgatgatgcagtacagcagagatctgaagggccacctcgcatccctgttcctgaacgagaacattaacctcggaaagaaatacgtgttcgacattaagcggacctcaaaggaggtgtacgatcacgcgcggagggccttgtacaacgccggagtcgtggacctggtgtcccgctccgaccagtcccctccatcgagccccctgaagtcctccgattcctcgatgtcatgcagctcctgcgagggtttgagctgtcagcagacccgggtgctgcaggagaagctgaggaagctgaaggaggctatgctctgcatggcctgttgcgaggaggaaatcaattccaccttctgcccttgcggtcataccgtgtgctgcgaaagctgcgccgcccagctccagtcctgtccggtctgccggtcccgcgtggaacacgtgcagcacgtgtacttgcccacccacacttcactgctcaaccttactgtgatttgataataggctggagcctcggtggccatgcttcttgccccttgggcctccccccagcccctcctccccttcctgcacccgtacccccgtggtctttgaataaagtctgagtgggcggctctaga

SEQ ID NO: 175244 - protein, 651 aa, Artificial Sequence
  derived and/or modified sequence
MGKKHKKHKSDKHLYEEYVEKPLKLVLKVGGNEVTELSTGSSGHDSSLFEDKNDHDKHKDRKRKKRKKGEKQIPGEEKGRKRRRVKEDKKKRDRDRVENEAEKDLQCHAPVRLDLPPEKPLTSSLAKQEEVEQTPLQEALNQLMRQLQRKDPSAFFSFPVTDFIAPGYSMIIKHPMDFSTMKEKIKNNDYQSIEELKDNFKLMCTNAMIYNKPETIYYKAAKKLLHSGMKILSQERIQSLKQSIDFMADLQKTRKQKDGTDTSQSGEDGGCWQREREDSGDAEAHAFKSPSKENKKKDKDMLEDKFKSNNLEREQEQLDRIVKESGGKLTRRLVNSQCEFERRKPDGTTTLGLLHPVDPIVGEPGYCPVRLGMTTGRLQSGVNTLQGFKEDKRNKVTPVLYLNYGPYSSYAPHYDSTFANISKDDSDLIYSTYGEDSDLPSDFSIHEFLATCQDYPYVMADSLLDVLTKGGHSRTLQEMEMSLPEDEGHTRTLDTAKEMEITEVEPPGRLDSSTQDRLIALKAVTNFGVPVEVFDSEEAEIFQKKLDETTRLLRELQEAQNERLSTRPPPNMICLLGPSYREMHLAEQVTNNLKELAQQVTPGDIVSTYGVRKAMGISIPSPVMENNFVDLTEDTEEPKKTDVAECGPGGS

SEQ ID NO: 175245 - DNA, 2227 bp, Artificial Sequence
  derived and/or modified sequence
gaagcggcgccgcacggcctgggcctggcgcggggggcgggcaccggggcccggtcggacatgggcaagaagcacaagaagcacaagtcggacaaacacctctacgaggagtatgtagagaagcccttgaagctggtcctcaaagtaggagggaacgaagtcaccgaactctccacgggcagctcggggcacgactccagcctcttcgaagacaaaaacgatcatgacaaacacaaggacagaaagcggaaaaagagaaagaaaggagagaagcagattccaggggaagaaaaggggagaaaacggagaagagttaaggaggataaaaagaagcgagatcgagaccgggtggagaatgaggcagaaaaagatctccagtgtcacgcccctgtgagattagacttgcctcctgagaagcctctcacaagctctttagccaaacaagaagaagtagaacagacaccccttcaagaagctttgaatcaactgatgagacaattgcagagaaaagatccaagtgctttcttttcatttcctgtgactgattttattgctcctggctactccatgatcattaaacacccaatggattttagtaccatgaaagaaaagatcaagaacaatgactatcagtccatagaagaactaaaggataacttcaaactaatgtgtactaatgccatgatttacaataaaccagagaccatttattataaagctgcaaagaagctgttgcactcaggaatgaaaattcttagccaggaaagaattcagagcctgaagcagagcatagacttcatggctgacttgcagaaaactcgaaagcagaaagatggaacagacacctcacagagtggggaggacggaggctgctggcagagagagagagaggactctggagatgccgaagcacacgccttcaagagtcccagcaaagaaaataaaaagaaagacaaagatatgcttgaagataagtttaaaagcaataatttagagagagagcaggagcagcttgaccgcatcgtgaaggaatctggaggaaagctgaccaggcggcttgtgaacagtcagtgcgaatttgaaagaagaaaaccagatggaacaacgacgttgggacttctccatcctgtggatcccattgtaggagagccaggctactgccctgtgagactgggaatgacaactggaagacttcagtctggagtgaatactttgcaggggttcaaagaggataaaaggaacaaagtcactccagtgttatatttgaattatgggccctacagttcttatgcaccgcattatgactccacatttgcaaatatcagcaaggatgattctgatttaatctattcaacctatggggaagactctgatcttccaagtgatttcagcatccatgagtttttggccacgtgccaagattatccgtatgtcatggcagatagtttactggatgttttaacaaaaggagggcattccaggaccctacaagagatggagatgtcattgcctgaagatgaaggccatactaggacacttgacacagcaaaagaaatggagattacagaagtagagccaccagggcgtttggactccagtactcaagacaggctcatagcgctgaaagcagtaacaaattttggcgttccagttgaagtttttgactctgaagaagctgaaatattccagaagaaacttgatgagaccaccagattgctcagggaactccaggaagcccagaatgaacgtttgagcaccagaccccctccgaacatgatctgtctcttgggtccctcatacagagaaatgcatcttgctgaacaagtgaccaataatcttaaagaacttgcacagcaagtaactccaggtgatatcgtaagcacgtatggagttcgaaaagcaatggggatttccattccttcccccgtcatggaaaacaactttgtggatttgacagaagacactgaagaacctaaaaagacggatgttgctgagtgtggacctggtggaagttgaggctgcctggtatttgattatatattatgtacatactttttcattcttaacttagaaatgcttttcagaagatattaaatatttgtaaattgtgtttttaattaaactttggaacagcgaatttggatgttccagaggttggacttgtattaggtaataaagctggacctgggactcgtgaggaaggaatgtgaaaaaaaaaaaaaaaaaa

SEQ ID NO: 175246 - DNA, 1956 bp, Artificial Sequence
  derived and/or modified sequence
atgggaaaaaagcataagaagcacaaaagtgataagcacctctatgaagaatatgtagagaagccgctgaagctggtgttgaaggtcggtgggaacgaggttacggagctaagcaccggaagctctggccacgactctagtctgttcgaggataaaaacgaccatgataaacacaaggacaggaaacgcaaaaagagaaaaaagggggaaaagcagattccaggcgaggaaaaagggagaaagcgtcgtagagtgaaagaagacaagaagaagagagacagagacagggttgaaaatgaagctgagaaagacttgcaatgccatgctcctgttcggttggacctgccaccggaaaaaccgctgactagtagccttgcaaaacaagaggaagtcgagcagacacctctgcaagaggctcttaatcagctaatgagacaattgcagcgcaaagatcctagtgccttctttagttttcccgtcacagacttcatcgcccctggttacagcatgatcattaaacatcccatggatttctccaccatgaaagaaaaaattaagaacaacgactaccagtccatcgaggaactcaaggacaatttcaagctgatgtgcactaatgctatgatctacaataagccagagaccatctactataaggctgccaagaagctgttgcatagtgggatgaaaatactcagtcaggaacgaatccagtctctcaagcaaagcattgacttcatggccgatcttcagaagacccgcaaacagaaggacggaaccgacaccagccagtcaggagaagatgggggctgttggcagagggagcgggaggatagcggggacgctgaggcacatgccttcaaaagcccatctaaggaaaataaaaaaaaggataaagatatgctcgaagacaaattcaaaagcaataatctggagcgcgagcaggaacagttggataggatagtgaaagaatctggcggcaaactgacaagacggctcgtgaattcgcaatgcgagttcgagaggcgcaaaccagatggtacaaccactttgggcctgctgcacccggtcgaccctatcgtaggagagcccggatattgtcctgtaagactgggaatgacaacggggagacttcagtcaggtgtgaacacacttcagggatttaaggaggataaacgaaacaaggtcacccctgtactttacctgaattatggcccgtactcctcttacgctcctcactacgattccacgttcgccaatattagcaaagatgactcagaccttatttactccacatacggcgaggatagcgacctacccagcgacttctctattcatgagttcctcgctacatgccaggactacccctacgtcatggctgactctctcctggacgtgctcaccaagggcgggcattctagaactctgcaggagatggagatgtctctccccgaggacgaggggcacacccgcaccctcgacactgctaaagaaatggagattaccgaagttgaaccgccaggtcgcctggactcttcaacccaggataggttgatagctctgaaagccgtcacaaacttcggcgttccagtagaggtattcgattctgaagaagctgagatcttccagaaaaaactggatgagacaacccggctgctgcgggagcttcaggaggcacaaaacgagaggctcagcactagaccgccacccaatatgatctgcttgctcgggccatcttatcgggaaatgcatcttgcagagcaagtgacaaacaatctgaaggagcttgcacagcaggttacccccggtgatatagttagtacttacggagttcgaaaggccatgggaatcagcattccttcaccagtgatggagaataacttcgtggatctgacagaagatactgaggagcccaagaagacagatgtggctgagtgcggcccgggaggctcttag

SEQ ID NO: 175247 - DNA, 1956 bp, Artificial Sequence
  derived and/or modified sequence
atgggcaagaagcacaagaagcacaagagtgacaagcacctgtatgaggagtatgtggagaagcccctgaagctggtgctgaaggtgggcggcaatgaggtgacagagctgagcacaggcagcagcggccatgacagcagcctgtttgaggacaagaatgaccatgacaagcacaaggacaggaagaggaagaagaggaagaagggggagaagcagatccctggagaggagaagggcaggaagagaagaagagtgaaggaggacaagaagaagagggaccgggacagagtggagaatgaagctgagaaggacctgcagtgccacgcccctgtgcggctggacctgcccccagagaagcccctgaccagcagcctggccaagcaggaggaggtggagcagacccccctgcaggaggccctgaaccagctgatgaggcagctgcagaggaaggaccccagcgccttcttctccttccctgtgacagacttcatcgcccctggctacagcatgatcatcaagcaccccatggacttcagcaccatgaaggagaagatcaagaacaatgactaccagagcattgaggagctgaaggacaacttcaagctgatgtgcaccaatgccatgatctacaacaagccagagaccatctactacaaggccgccaagaagctgctgcacagcggcatgaagatcctgagccaggagcgcatccagagcctgaagcagagcattgacttcatggctgacctgcagaagaccaggaagcagaaggatggaacagacaccagccagagcggagaagatggcggctgctggcagcgggagagagaagattctggagatgctgaggcccacgccttcaagagccccagcaaagaaaacaagaagaaggacaaggacatgctggaggacaagttcaagagcaacaacctggagcgggagcaggagcagctggacagaattgtgaaggagagcggcggcaagctgacccggcggctggtgaacagccagtgtgaatttgagaggaggaagccagatggcaccaccaccctgggcctgctgcaccctgtggaccccatcgtgggggagcccggctactgccctgtgcggctgggcatgaccaccggccgcctgcagagcggcgtgaacaccctgcagggcttcaaggaggacaagaggaacaaggtgacccctgtgctgtacctgaactacggcccctacagcagctatgccccccactatgacagcacctttgccaacatcagcaaggatgacagcgacctgatctacagcacctatggagaagattctgacctgcccagcgacttcagcatccacgagttcctggccacctgccaggactacccctacgtgatggctgacagcctgctggatgtgctgaccaagggcggccacagcaggaccctgcaggagatggagatgagcctgcctgaagatgagggccacaccaggaccctggacacagccaaggagatggagatcacagaggtggagcccccaggccgcctggacagcagcacccaggaccggctgattgccctgaaggctgtgaccaactttggagtgcctgtggaggtgtttgacagcgaggaggccgagatcttccagaagaagctggatgagaccacccggctgctgcgggagctgcaggaggcccagaatgaaaggctgagcacccggcccccacccaacatgatctgcctgctgggccccagctaccgggagatgcacctggccgagcaggtgaccaacaacctgaaggagctggcccagcaggtgacccctggggacatcgtgtccacctatggagtgaggaaggccatgggcatcagcatccccagccctgtgatggagaacaactttgtggacctgacagaggacacagaggagcccaagaagacagatgtggctgaatgtggccctgggggcagctag

SEQ ID NO: 175248 - DNA, 1956 bp, Artificial Sequence
  derived and/or modified sequence
atgggcaagaagcacaagaagcacaagagcgacaagcacctgtacgaagaatacgttgagaaacctctgaaactggtgctgaaagtcggcggcaatgaggtcacggagttgagcactgggtccagcgggcacgacagcagccttttcgaggataagaacgaccatgataaacataaggaccgtaagagaaaaaagagaaagaaaggagaaaaacagataccaggtgaggaaaagggtagaaaacggcgtcgtgtgaaagaagataagaagaagagagatcgggatcgggtggagaatgaggcggagaaggacctgcagtgtcacgcacctgtgaggttggacctgccccccgagaaacctcttaccagctcactagccaagcaggaagaagtggaacaaacccccctgcaagaggcccttaatcagttgatgcgtcagctgcagagaaaggatccctctgcctttttctcctttccagtcacagacttcatagcgccgggatattctatgataataaaacaccccatggattttagtacaatgaaagaaaagattaagaataatgactatcagtctattgaggaactcaaagacaactttaagctaatgtgtactaatgccatgatatataataagcctgaaacaatttactacaaggccgcaaaaaagcttctgcatagcgggatgaaaatcctgtctcaggagagaatccagagtctgaagcagtctatagactttatggccgatctgcaaaagaccagaaagcagaaagacggaactgatactagccagagcggggaagatggagggtgctggcagagggaacgcgaagactccggagatgctgaggctcacgcctttaaaagtccctcaaaggaaaataaaaaaaaagataaggatatgctcgaagacaaatttaaatcaaataacctggaacgtgagcaggaacagcttgacaggattgtgaaagagagtggaggcaagctcactaggaggttggttaatagccaatgcgagttcgagaggagaaagccagacgggacaaccaccctcgggttgctccatccagttgacccaatcgtaggcgagccgggttactgtcctgtcagactgggcatgacaaccggaagactgcagtcaggggtgaacactcttcaggggtttaaggaggataaaaggaataaggtcacacccgtcctctatctgaattatggcccttactccagttacgctccccactatgactcgacctttgcaaacatttctaaggacgatagcgacttgatatatagtacgtacggcgaggactcagacctcccttctgacttttctatccacgagtttctcgcgacttgccaggactacccgtatgtcatggcggacagcctcttagacgtgctgacaaaaggtggacattcaagaacccttcaggagatggagatgagtctgcctgaggacgagggccatacaagaaccctcgataccgctaaagagatggaaataaccgaggtggagccacctgggaggctggactctagcacccaggatcggctgatcgctctaaaggctgtgactaattttggagtgccagtagaagtgttcgacagtgaagaggccgagatattccagaaaaagctcgacgaaaccacccggctgctgagagaacttcaggaagctcaaaatgaacgactgtctactaggcccccacccaatatgatctgcctgctgggcccttcctaccgcgagatgcacctggctgagcaagtcacgaataatctgaaggaactggctcagcaggtgacgccaggggatattgtatccacgtatggagttcgaaaagccatgggaattagtatcccgagccccgttatggagaacaactttgtcgacttaaccgaggacacagaagaacccaagaagacagacgttgcggagtgcggtcccggaggatcgtag

SEQ ID NO: 175249 - DNA, 1956 bp, Artificial Sequence
  derived and/or modified sequence
atggggaaaaagcacaaaaaacacaagagtgacaagcacctgtacgaagagtacgtggagaagccactgaaactggtccttaaagttggtggtaacgaggttacagaactgagcacaggaagttctgggcatgatagcagccttttcgaagataagaacgaccatgataagcacaaagatagaaagcgcaagaagcggaagaaaggagagaagcaaatccccggagaagaaaagggtcggaaacgaaggagagttaaagaggacaaaaagaagagggaccgtgatagagtggagaatgaggctgagaaagatctgcagtgtcatgcgcctgtccgactggatctgccacccgagaagcccctgactagctctctagcgaagcaggaagaggttgaacagacacccctccaggaagccctgaaccaactgatgcgacagctacagcggaaagatccgagcgcctttttttcatttcctgtaactgattttatcgcgcctggttatagtatgatcataaaacatcctatggatttctcaacaatgaaggagaagattaaaaataacgactaccagagcatagaggagcttaaagataactttaaactcatgtgtaccaatgcaatgatttacaacaagccggaaacgatctactacaaagcagcaaagaaacttttgcactcagggatgaaaattcttagccaggagcgaatccaaagcttgaaacagtctatcgattttatggcggacctgcagaaaaccagaaaacaaaaggacggaacagacaccagccagagcggcgaggatggtgggtgctggcaaagggaaagagaagactccggagatgccgaagcgcacgcctttaagtcacccagcaaggagaacaagaagaaggacaaggacatgctcgaggacaagtttaagagtaacaatctggagagagagcaggaacagctggatcgcatcgttaaagaatcgggcggaaagttgaccagaaggctagtgaattcccagtgtgaatttgaaaggcgtaagcccgatgggaccaccacactggggctgctgcaccccgtggatcccatcgtaggggagcccggatactgcccagtacggctagggatgaccaccggacgcttgcagtccggagtgaatacactacaggggttcaaagaggacaaacggaacaaggtaacacctgtcctctacttgaactatgggccatactctagctacgcccctcactacgactctacattcgcgaatatctccaaggacgactccgacttaatctattcaacctatggggaggactctgacctgccgtccgactttagcattcacgaattcctcgccacttgtcaggactacccatacgtcatggccgatagtttgttagatgtactgactaagggtggccacagccgcaccctccaggaaatggagatgagcttgcccgaagatgaaggccatacaagaactctggacaccgcgaaggagatggaaatcactgaggttgaaccgccagggaggctggatagcagcacacaggatagactcattgccctgaaagcagtcaccaatttcggggtgccggtcgaagtcttcgatagcgaagaggcggaaatcttccagaaaaagctggacgaaaccacacggctgctgcgagagctgcaggaagcccagaacgagagacttagcactcgaccacctccaaacatgatctgtcttctgggcccatcctaccgcgaaatgcatctggcagaacaagtaacaaacaacctcaaagaacttgcccaacaggtgacacctggcgacatcgtatccacttatggcgtgcggaaggctatgggtatatcaatcccatctcccgtgatggaaaacaactttgtcgacctgactgaggacaccgaggagcctaagaaaacagacgtggctgagtgcgggccaggcggatcctag

SEQ ID NO: 175250 - DNA, 2297 bp, Artificial Sequence
  derived and/or modified sequence
gagaggggcatcgcgccgcccggcgcgcgccgcccccctgcctcgcggcgcggggtctcgcgggccccgctcccgccctccgctcgcctggcccggaccggaagcggcgccgcacggcctgggcctggcgcggggggcgggcaccggggcccggtcggacatgggcaagaagcacaagaagcacaagtcggacaaacacctctacgaggagtatgtagagaagcccttgaagctggtcctcaaagtaggagggaacgaagtcaccgaactctccacgggcagctcggggcacgactccagcctcttcgaagacaaaaacgatcatgacaaacacaaggacagaaagcggaaaaagagaaagaaaggagagaagcagattccaggggaagaaaaggggagaaaacggagaagagttaaggaggataaaaagaagcgagatcgagaccgggtggagaatgaggcagaaaaagatctccagtgtcacgcccctgtgagattagacttgcctcctgagaagcctctcacaagctctttagccaaacaagaagaagtagaacagacaccccttcaagaagctttgaatcaactgatgagacaattgcagagaaaagatccaagtgctttcttttcatttcctgtgactgattttattgctcctggctactccatgatcattaaacacccaatggattttagtaccatgaaagaaaagatcaagaacaatgactatcagtccatagaagaactaaaggataacttcaaactaatgtgtactaatgccatgatttacaataaaccagagaccatttattataaagctgcaaagaagctgttgcactcaggaatgaaaattcttagccaggaaagaattcagagcctgaagcagagcatagacttcatggctgacttgcagaaaactcgaaagcagaaagatggaacagacacctcacagagtggggaggacggaggctgctggcagagagagagagaggactctggagatgccgaagcacacgccttcaagagtcccagcaaagaaaataaaaagaaagacaaagatatgcttgaagataagtttaaaagcaataatttagagagagagcaggagcagcttgaccgcatcgtgaaggaatctggaggaaagctgaccaggcggcttgtgaacagtcagtgcgaatttgaaagaagaaaaccagatggaacaacgacgttgggacttctccatcctgtggatcccattgtaggagagccaggctactgccctgtgagactgggaatgacaactggaagacttcagtctggagtgaatactttgcaggggttcaaagaggataaaaggaacaaagtcactccagtgttatatttgaattatgggccctacagttcttatgcaccgcattatgactccacatttgcaaatatcagcaaggatgattctgatttaatctattcaacctatggggaagactctgatcttccaagtgatttcagcatccatgagtttttggccacgtgccaagattatccgtatgtcatggcagatagtttactggatgttttaacaaaaggagggcattccaggaccctacaagagatggagatgtcattgcctgaagatgaaggccatactaggacacttgacacagcaaaagaaatggagattacagaagtagagccaccagggcgtttggactccagtactcaagacaggctcatagcgctgaaagcagtaacaaattttggcgttccagttgaagtttttgactctgaagaagctgaaatattccagaagaaacttgatgagaccaccagattgctcagggaactccaggaagcccagaatgaacgtttgagcaccagaccccctccgaacatgatctgtctcttgggtccctcatacagagaaatgcatcttgctgaacaagtgaccaataatcttaaagaacttgcacagcaagtaactccaggtgatatcgtaagcacgtatggagttcgaaaagcaatggggatttccattccttcccccgtcatggaaaacaactttgtggatttgacagaagacactgaagaacctaaaaagacggatgttgctgagtgtggacctggtggaagttgaggctgcctggtatttgattatatattatgtacatactttttcattcttaacttagaaatgcttttcagaagatattaaatatttgtaaattgtgtttttaattaaactttggaacagcgaatttggatgttccagaggttggacttgtattaggtaataaagctggacctgggactcgtga

SEQ ID NO: 175251 - DNA, 1956 bp, Artificial Sequence
  derived and/or modified sequence
atgggcaagaagcacaagaagcacaagagcgacaagcacctgtacgaggagtacgtggagaagcccctgaagctggtgctgaaggtgggcggcaacgaggtgaccgagctgagcaccggcagcagcggccacgacagcagcctgttcgaggacaagaacgaccacgacaagcacaaggacagaaagagaaagaagagaaagaagggcgagaagcagatccccggcgaggagaagggcagaaagagaagaagagtgaaggaggacaagaagaagagagacagagacagagtggagaacgaggccgagaaggacctgcagtgccacgcccccgtgagactggacctgccccccgagaagcccctgaccagcagcctggccaagcaggaggaggtggagcagacccccctgcaggaggccctgaaccagctgatgagacagctgcagagaaaggaccccagcgccttcttcagcttccccgtgaccgacttcatcgcccccggctacagcatgatcatcaagcaccccatggacttcagcaccatgaaggagaagatcaagaacaacgactaccagagcatcgaggagctgaaggacaacttcaagctgatgtgcaccaacgccatgatctacaacaagcccgagaccatctactacaaggccgccaagaagctgctgcacagcggcatgaagatcctgagccaggagagaatccagagcctgaagcagagcatcgacttcatggccgacctgcagaagaccagaaagcagaaggacggcaccgacaccagccagagcggcgaggacggcggctgctggcagagagagagagaggacagcggcgacgccgaggcccacgccttcaagagccccagcaaggagaacaagaagaaggacaaggacatgctggaggacaagttcaagagcaacaacctggagagagagcaggagcagctggacagaatcgtgaaggagagcggcggcaagctgaccagaagactggtgaacagccagtgcgagttcgagagaagaaagcccgacggcaccaccaccctgggcctgctgcaccccgtggaccccatcgtgggcgagcccggctactgccccgtgagactgggcatgaccaccggcagactgcagagcggcgtgaacaccctgcagggcttcaaggaggacaagagaaacaaggtgacccccgtgctgtacctgaactacggcccctacagcagctacgccccccactacgacagcaccttcgccaacatcagcaaggacgacagcgacctgatctacagcacctacggcgaggacagcgacctgcccagcgacttcagcatccacgagttcctggccacctgccaggactacccctacgtgatggccgacagcctgctggacgtgctgaccaagggcggccacagcagaaccctgcaggagatggagatgagcctgcccgaggacgagggccacaccagaaccctggacaccgccaaggagatggagatcaccgaggtggagccccccggcagactggacagcagcacccaggacagactgatcgccctgaaggccgtgaccaacttcggcgtgcccgtggaggtgttcgacagcgaggaggccgagatcttccagaagaagctggacgagaccaccagactgctgagagagctgcaggaggcccagaacgagagactgagcaccagacccccccccaacatgatctgcctgctgggccccagctacagagagatgcacctggccgagcaggtgaccaacaacctgaaggagctggcccagcaggtgacccccggcgacatcgtgagcacctacggcgtgagaaaggccatgggcatcagcatccccagccccgtgatggagaacaacttcgtggacctgaccgaggacaccgaggagcccaagaagaccgacgtggccgagtgcggccccggcggcagctag

SEQ ID NO: 175252 - protein, 483 aa, Artificial Sequence
  derived and/or modified sequence
MASLLWGGDAGAAESERLNSHFSNLSQPRKNLWGIKSTAVRNIDGSINNINEDDEEDVVDLAANSLLNKLIHQSLVESSHRVEVLQKDPSSPLYSVKTFEELRLKEELLKGIYAMGFNRPSKIQEMALPMMLAHPPQNLIAQSQSGTGKTAAFVLAMLSRVNALELFPQCLCLAPTYELALQTGRVVEQMGKFCVDVQVMYAIRGNRIPRGTDITKQIIIGTPGTVLDWCFKLKLIDLTKIRVFVLDEADVMIDTQGFSDHSIRIQRALPSECQMLLFSATFEDSVWHFAERIIPDPNVIKLRKEELTLNNIRQYYVLCEHRKDKYQALCNIYGSITIGQAIIFCQTRRNAKWLTVEMIQDGHQVSLLSGELTVEQRASIIQRFRDGKEKVLITTNVCARGIDVKQVTIVVNFDLPVKQGEEPDYETYLHRIGRTGRFGKKGLAFNMIEVDELPSLMKIQDHFNSSIKQLNAEDMDEIEKIDY

SEQ ID NO: 175253 - DNA, 1452 bp, Artificial Sequence
  derived and/or modified sequence
atggcttccttactttggggtggagatgccggcgcagcagagtccgagcgcttgaatagtcatttcagtaatctgagtcaacctcggaagaacctgtggggtatcaaaagcactgccgttaggaatattgatggatccatcaataacatcaatgaagacgatgaggaggatgtagtagaccttgcagcgaacagcctgttgaacaagctaattcatcagtctttagtggagagctcccatcgtgtggaggtgcttcaaaaagatccttcaagcccattatattctgttaagaccttcgaggagctaagactgaaagaagaactcctcaaagggatctacgccatgggctttaatcgcccatcaaagattcaggaaatggccttgcccatgatgctggcgcaccctccacaaaacctcattgctcagtcccagagcggaacgggcaagactgccgccttcgtgttggctatgctgagcagagtcaatgccctggagctctttccccagtgcctctgtcttgctccaacctacgaactggctctacagactggcagggtcgtggagcagatggggaaattctgtgtcgacgtccaggttatgtacgcgatcagagggaatagaataccccgcggcactgatataaccaaacagataataatcggcacacccgggactgtgctggactggtgttttaaactcaagctgatcgacctgacaaagatccgggtctttgtactcgacgaggctgatgtaatgattgacacccaggggttctctgatcatagcatcagaatccagcgtgcccttccttcagagtgccaaatgttattgttctctgctacttttgaggattctgtgtggcacttcgccgagcgcatcattcccgaccccaatgtgataaaacttagaaaagaggagctgactctcaacaacatcaggcagtattatgttctctgcgagcaccggaaggacaaataccaggcactgtgcaatatttacggctccattacaatcggccaggccattatcttttgccagactaggaggaatgccaagtggctgaccgtcgagatgatccaggacggacaccaggtttctctgctgtcaggcgaactaacagtggaacaaagggctagtattatccaaagatttcgagatgggaaggagaaggtgctgataaccactaacgtctgtgcccgcgggatcgacgtcaagcaggtaaccatagtcgtgaatttcgacctccccgtgaagcaaggggaggagcccgactatgagacctatctacatagaataggccgaaccgggcgcttcggtaaaaaaggcctggcgttcaacatgatcgaggtggatgaactccccagtcttatgaagatccaggaccactttaactcttctatcaaacagctgaatgctgaagatatggatgaaatcgaaaagatcgactactag

SEQ ID NO: 175254 - DNA, 1452 bp, Artificial Sequence
  derived and/or modified sequence
atggccagcctgctgtggggcggagatgctggagctgctgagagcgagcggctgaacagccacttcagcaacctgagccagcccaggaagaacctgtggggcatcaagagcacagctgtgagaaatattgatggcagcatcaacaacatcaatgaagatgatgaggaggatgtggtggacctggccgccaacagcctgctgaacaagctgatccaccagagcctggtggagagcagccaccgggtggaggtgctgcagaaggaccccagcagccccctgtacagcgtgaagacctttgaggagctgcggctgaaggaggagctgctgaagggcatctatgccatgggcttcaaccggcccagcaagatccaggagatggccctgcccatgatgctggcccaccccccccagaacctgattgcccagagccagagcggcaccgggaagacagctgcctttgtgctggccatgctgagccgggtgaatgccctggagctgttcccccagtgcctgtgcctggcccccacctatgagctggccctgcagacaggccgggtggtggagcagatgggcaagttctgtgtggatgtgcaggtgatgtatgccatccggggcaaccgcatcccccggggcacagacatcaccaagcagatcatcatcggcaccccaggcaccgtgctggactggtgcttcaagctgaagctgattgacctgaccaagatccgggtgtttgtgctggatgaagcagatgtgatgattgacacccagggcttcagtgaccacagcatccgcatccagagggccctgcccagcgagtgccagatgctgctcttcagcgccacctttgaagattctgtgtggcactttgctgagcgcatcatcccagaccccaacgtcatcaagctgaggaaggaggagctgaccctgaacaacatccggcagtactacgtgctgtgtgagcacaggaaggacaagtaccaggccctgtgcaacatctacggcagcatcaccatcggccaggccatcatcttctgccagaccaggagaaatgccaagtggctgactgtggagatgatccaggacggccaccaggtgtccctgctgtctggagagctgactgtggagcagagggccagcatcatccagcgcttcagagatggcaaggagaaggtgctgatcaccaccaacgtgtgtgcccggggcattgatgtgaagcaggtgaccatcgtggtgaactttgacctgcctgtgaagcagggcgaggagccagactatgagacctacctgcaccgcatcggccgcacaggccgctttgggaagaagggcctggccttcaacatgattgaggtggatgagctgcccagcctgatgaagatccaggaccacttcaacagcagcatcaagcagctgaatgctgaggacatggatgaaattgagaagattgactactag

SEQ ID NO: 175255 - DNA, 1452 bp, Artificial Sequence
  derived and/or modified sequence
atggccagcctgctgtggggcggcgacgccggcgccgccgagagcgagcgcctaaacagccactttagcaacctttcacagcctcggaagaacctatggggcatcaaatctactgccgtccgtaacattgacgggagcatcaataacataaacgaggatgacgaggaagacgtggtggaccttgcagccaacagtttgttgaataagctcattcaccagtccctcgtggagagctctcacagagtagaggttctgcagaaagacccctcgtcacccttgtacagcgtaaaaacctttgaagagctgagactgaaggaggagttactaaagggaatttatgcaatgggcttcaataggccgtctaaaatccaggagatggcacttcctatgatgcttgcccacccacctcagaatctcatcgcacagtcacagtctggaacaggaaagaccgctgcgttcgtgttggctatgctctccagagtgaacgctcttgaacttttccctcagtgtttatgcctcgcacccacctatgagcttgcactgcaaaccggtcgcgtggtcgagcagatgggtaagttttgcgtggacgtgcaggttatgtatgccataagaggaaaccgtatacccagagggacagatataaccaagcagattataatcggtacaccaggcacggtcttggattggtgttttaagctaaagctgatcgacttgactaagatccgtgtcttcgtcctcgatgaggcagacgtgatgattgatacccaaggattctccgatcattctatcaggatccagagggccctgcctagcgagtgccagatgctgcttttttctgccacatttgaagacagtgtttggcatttcgccgaaaggatcattcccgatccaaatgtgataaagcttcggaaggaggaactgactctcaataacattcggcaatactacgtgctttgcgagcatcgcaaggacaagtaccaggccctatgcaatatctatgggagtatcactattggacaggcgatcatattctgtcaaactagacgcaatgccaagtggttaacagtggagatgattcaggacggacaccaggtgagcttgctcagcggtgagctcactgtagagcaacgggcaagcatcatacagcggtttagagatggaaaagaaaaagtgctgattacgaccaatgtctgcgcacgtgggatagacgtgaagcaagtgacaattgtcgtgaatttcgacttgcctgtcaagcaaggcgaggaacctgattacgagacctacttgcatagaattggtaggactggaagattcggaaagaaaggcttggcattcaacatgatagaagtggatgaactgccctctctcatgaaaatccaggaccactttaatagctccatcaagcagctgaatgcagaggatatggatgaaatagagaagattgactattag

SEQ ID NO: 175256 - DNA, 1452 bp, Artificial Sequence
  derived and/or modified sequence
atggcgtccttgctctggggcggagacgcaggtgcagcagagtccgagcgactcaacagtcatttctcaaacctctctcaacctaggaaaaacctttgggggatcaagtctactgccgtgcgtaacattgatggcagtattaataacattaacgaggatgacgaggaagatgttgtcgatctggccgctaatagtctcctgaacaagctgattcatcagtctctcgtggagtcgagtcaccgcgtggaagtgttacaaaaagatccatcatcgccgctctactccgtgaaaacctttgaggagctgaggctgaaagaggagctgctcaaaggcatctacgctatgggatttaatcgcccaagcaaaatccaggaaatggctctgcccatgatgctggctcacccccctcagaatctgattgcacaatctcagtctgggaccgggaagaccgctgccttcgtgttggcgatgctttcccgggtgaacgcccttgaactttttccccagtgcctgtgccttgcccctacatacgagttggcattgcaaactggacgggtggtcgagcagatgggaaagttttgtgtggatgtccaggtaatgtacgccatcagaggcaacagaatcccgagagggacagacatcactaaacagatcattattgggactccaggcaccgtgttggactggtgttttaaactgaaactgatcgatctgacgaagatccgcgtttttgtcctggacgaggccgacgtgatgattgatacccaaggattcagtgatcacagtattcggatacagagggctctgccatcagagtgtcagatgctcctgttctcggccaccttcgaggacagcgtctggcacttcgcagagaggatcatccctgaccctaacgtgattaagttacgaaaggaggaacttaccttgaataatatacgccagtattatgtgttgtgcgagcaccggaaggataaataccaggccctgtgtaacatctatggctcgatcacaatcggccaggctatcatattctgccagaccaggcgcaacgcgaagtggctcactgtcgagatgattcaggacggccatcaggtgtctctgctgtctggagagttgactgtggagcaaagagcgagtatcattcagaggttccgagacgggaaggaaaaggtcctcatcaccaccaacgtatgcgctagaggtatcgatgtcaagcaagtcacaatagtcgtgaatttcgatcttccggtgaagcagggcgaggagcccgactatgagacatatctccatcgaattggacggacaggtcgttttggaaagaagggtctggccttcaatatgatcgaggttgacgaattgccatccttgatgaaaattcaggatcattttaacagcagcattaaacaactcaatgcagaagacatggacgaaatcgaaaagatagactattag

SEQ ID NO: 175257 - DNA, 1836 bp, Artificial Sequence
  derived and/or modified sequence
agccttccagcgcctgcgcgccgcaccgcggtggtcgcgggcgcggacgcggacgcctgccccctaaggaagcccattggccagcggatggggccagcaccgcctcgcgccggtggtggaagcacgtgctgggggcgggagcagcaatcgcagccatggcgtcgttactgtggggaggcgacgcaggggcggcggagagcgagcggctgaacagccacttttcaaacctcagccaaccccggaagaacctttggggtattaagagtactgcagtccgaaacatagatggttctattaataacatcaatgaagatgatgaagaagatgtagtggatttggcagctaattcactcttaaacaagttaatccatcaatccttagtagaatccagtcaccgtgtggaagttttacagaaggatcccagctctccactttactcagtaaagacatttgaagagctgcggctaaaggaagagttactaaaaggaatctatgcaatgggatttaataggccatctaaaatccaagagatggctctccctatgatgctggcacatccaccccagaacctcatagcacagagccagtctggaacaggaaagacagcggcatttgtgttggcaatgttaagcagagttaatgccttggaattgttcccacagtgcctctgcctagctcctacttatgaattggctctgcaaactggccgtgtggttgagcagatgggaaaattctgtgtggatgttcaagtgatgtatgccattcgagggaatcgaattcccagaggcaccgacatcactaaacagattataattggcactcctgggactgtcctagattggtgttttaaactaaaattgattgatttgactaagattcgtgtgtttgtcctggatgaagcagatgtgatgattgacactcaaggattctcagatcatagtattcgtattcaaagagctctaccctccgaatgccaaatgctcctcttttcagcaacctttgaggactctgtgtggcactttgctgagcgaatcatccctgaccctaatgttatcaagttacgcaaagaggagctcacactgaacaacatccggcaatattacgtgctgtgtgagcacaggaaagacaaataccaagctctgtgcaacatttatggcagcatcaccattggtcaggccatcatcttctgccagactcgtcgaaacgctaagtggttgaccgtggagatgatacaggatggccaccaggtgtctttgttaagcggggagctgaccgtggagcagcgagcttccatcattcagaggtttcgggatgggaaagagaaggttctcataacaactaatgtttgtgcccgagggattgatgtgaagcaggtcacaattgttgtgaactttgatctccctgtaaaacaaggagaggagccggactatgagacctacctccaccgcatagggcggacggggcgctttgggaaaaaaggccttgccttcaacatgattgaagtagatgagctgccctcgctcatgaaaatccaggaccactttaacagcagtattaagcaactcaacgctgaagacatggatgaaattgaaaagattgactattgaagaaagaactttattgtttgtgcagtatcctagtttatgtgagaatgtctcagtgggttttgaaggtaatttttttatgttgaggctttttcgacgtgaaactgtcacagatggcaaaataaatgtcacggtacttagttttaagacatgaggtctttttgaagccaaattgatgtgaagcttgtgatccttttgaataaaaaaaaggcaagattatttcttattctaa

SEQ ID NO: 175258 - DNA, 1452 bp, Artificial Sequence
  derived and/or modified sequence
atggccagcctgctgtggggcggcgacgccggcgccgccgagagcgagagactgaacagccacttcagcaacctgagccagcccagaaagaacctgtggggcatcaagagcaccgccgtgagaaacatcgacggcagcatcaacaacatcaacgaggacgacgaggaggacgtggtggacctggccgccaacagcctgctgaacaagctgatccaccagagcctggtggagagcagccacagagtggaggtgctgcagaaggaccccagcagccccctgtacagcgtgaagaccttcgaggagctgagactgaaggaggagctgctgaagggcatctacgccatgggcttcaacagacccagcaagatccaggagatggccctgcccatgatgctggcccaccccccccagaacctgatcgcccagagccagagcggcaccggcaagaccgccgccttcgtgctggccatgctgagcagagtgaacgccctggagctgttcccccagtgcctgtgcctggcccccacctacgagctggccctgcagaccggcagagtggtggagcagatgggcaagttctgcgtggacgtgcaggtgatgtacgccatcagaggcaacagaatccccagaggcaccgacatcaccaagcagatcatcatcggcacccccggcaccgtgctggactggtgcttcaagctgaagctgatcgacctgaccaagatcagagtgttcgtgctggacgaggccgacgtgatgatcgacacccagggcttcagcgaccacagcatcagaatccagagagccctgcccagcgagtgccagatgctgctgttcagcgccaccttcgaggacagcgtgtggcacttcgccgagagaatcatccccgaccccaacgtgatcaagctgagaaaggaggagctgaccctgaacaacatcagacagtactacgtgctgtgcgagcacagaaaggacaagtaccaggccctgtgcaacatctacggcagcatcaccatcggccaggccatcatcttctgccagaccagaagaaacgccaagtggctgaccgtggagatgatccaggacggccaccaggtgagcctgctgagcggcgagctgaccgtggagcagagagccagcatcatccagagattcagagacggcaaggagaaggtgctgatcaccaccaacgtgtgcgccagaggcatcgacgtgaagcaggtgaccatcgtggtgaacttcgacctgcccgtgaagcagggcgaggagcccgactacgagacctacctgcacagaatcggcagaaccggcagattcggcaagaagggcctggccttcaacatgatcgaggtggacgagctgcccagcctgatgaagatccaggaccacttcaacagcagcatcaagcagctgaacgccgaggacatggacgagatcgagaagatcgactactag

SEQ ID NO: 175259 - protein, 782 aa, Artificial Sequence
  derived and/or modified sequence
MAAAAAAGPSPGSGPGDSPEGPEGEAPERRRKAHGMLKLYYGLSEGEAAGRPAGPDPLDPTDLNGAHFDPEVYLDKLRRECPLAQLMDSETDMVRQIRALDSDMQTLVYENYNKFISATDTIRKMKNDFRKMEDEMDRLATNMAVITDFSARISATLQDRHERITKLAGVHALLRKLQFLFELPSRLTKCVELGAYGQAVRYQGRAQAVLQQYQHLPSFRAIQDDCQVITARLAQQLRQRFREGGSGAPEQAECVELLLALGEPAEELCEEFLAHARGRLEKELRNLEAELGPSPPAPDVLEFTDHGGSGFVGGLCQVAAAYQELFAAQGPAGAEKLAAFARQLGSRYFALVERRLAQEQGGGDNSLLVRALDRFHRRLRAPGALLAAAGLADAATEIVERVARERLGHHLQGLRAAFLGCLTDVRQALAAPRVAGKEGPGLAELLANVASSILSHIKASLAAVHLFTAKEVSFSNKPYFRGEFCSQGVREGLIVGFVHSMCQTAQSFCDSPGEKGGATPPALLLLLSRLCLDYETATISYILTLTDEQFLVQDQFPVTPVSTLCAEARETARRLLTHYVKVQGLVISQMLRKSVETRDWLSTLEPRNVRAVMKRVVEDTTAIDVQVGLLYEEGVRKAQSSDSSKRTFSVYSSSRQQGRYAPSYTPSAPMDTNLLSNIQKLFSERIDVFSPVEFNKVSVLTGIIKISLKTLLECVRLRTFGRFGLQQVQVDCHFLQLYLWRFVADEELVHLLLDEVVASAALRCPDPVPMEPSVVEVICERG

SEQ ID NO: 175260 - DNA, 2714 bp, Artificial Sequence
  derived and/or modified sequence
ctcgtttcaacaacaactttatggctcccggaagtgcctcctccccgtccccttcctttccagcctcacgcccgtgggctgcagttggaacgatggcggcggcagctgccgccgggcctagcccggggtctggacctggggactccccagaagggcccgagggggaggctccggagcgtcggcggaaggcgcacgggatgctgaagctttactacggcctctcggaaggggaggcggcgggacgccccgcggggcccgaccccctggacccgactgatctgaacggggcgcacttcgacccggaagtttacctagacaagctgcgtagagagtgccctctggcccagttgatggacagtgagacggacatggtgcggcagatccgggctctagacagcgacatgcagaccctggtctatgagaactacaacaagttcatctcagccacagacaccatccggaagatgaagaacgatttccggaagatggaggatgagatggaccggctggccaccaacatggcagtgatcaccgacttcagcgctcgcatcagcgccacgctgcaggaccgccacgagcgcatcaccaagctggcaggggtccacgcgctgctgcggaagctgcagttcctctttgagctgccctcgcgcctcaccaagtgcgtggaactgggcgcctatgggcaggcggtgcgctaccagggccgcgcgcaggccgtgctgcagcagtaccaacacctgccctcgttccgcgccatccaggacgactgccaggtcatcacggcccgcctggcccagcagctgcggcagcgctttagggagggcggctcaggcgccccggagcaggcagagtgcgtggagctgctgctggccctgggcgagcctgcggaggagctgtgcgaggagttcctggcgcacgcccgcggccggctggagaaggagctgagaaacctggaggccgagctggggccctcacctccggctcccgacgtgttagagttcaccgaccatggaggcagtggcttcgtgggcggcctctgccaggtggcggcggcctaccaggagctgtttgcggcccagggcccagcaggtgccgagaagctggcggccttcgcccggcagctgggcagccgctattttgcgctggtggagcggcggctggcgcaggagcagggtggtggtgacaactcactgctggtgcgggcgctggaccgcttccaccggcgcttgcgggctcccggggccctgctggccgctgccgggctcgcagacgctgccacggagatcgtggaacgagtggcccgcgagcgcctgggccaccacctgcagggtctccgggcggccttcctgggctgcctgacagacgtccgccaggcgctggcagcacctcgcgtggctgggaaggagggccctggcctggccgagttgctggccaatgtggccagctccatcctgagccacattaaggcctctctggcagcagtgcaccttttcaccgccaaagaggtgtccttctccaacaagccctacttccggggtgagttctgcagtcagggtgtccgtgagggcctcatcgtgggcttcgtccactctatgtgccagacggctcagagcttctgcgacagccctggggagaaggggggtgccacaccacctgccctgctcctgctgctctcccgcctctgcctggactacgagacggccaccatctcctacatcctcactctcactgatgaacagtttctggtgcaggatcagttcccagtgacgcccgtgagcacgctgtgtgcagaggccagggaaacggcgcggcggctgctgacccactacgtgaaggtgcagggcctggtcatatcacagatgctgcgcaagagcgtggagactcgcgactggctcagcactctggagccccggaatgtgcgggccgtcatgaagcgggtggtggaggataccaccgccatcgacgtgcaggtggggctcctgtacgaagagggtgttcgcaaggcccagagcagcgactccagcaagaggactttctccgtgtacagcagctctcggcagcagggccgctacgcccccagctatacccccagtgccccgatggacaccaacctcttgagcaatatccagaagctattctctgaacgtattgatgtgttcagccctgtggagttcaacaaggtgtcggtgctgaccggcatcatcaagatcagcctgaagacgctgctggagtgtgtgcggctgcgcacctttgggcgcttcgggctgcagcaggtgcaagtggactgccactttctgcagctctacctgtggcgttttgtggccgacgaagaactcgtgcacttgctgctggacgaagtggtggcctctgctgccctgcgctgcccagaccctgtgcccatggagcccagtgtggttgaggtcatctgcgagcgcggctaggcgcagccgctgccatgcaccggtctgtccctgcaccccatggcacccaggatctggtctcggtggtccttccccgcaggcaggtgtcaggaccggcctaataaacatgtgtggcctcctcctctcgcttgctgggcgggcctttccgggggcggggttttgaagctgaggcttctgaggcgcccgcgtcgggtccgcccccgagcgccgattggctggtgtgctgggcccagcatgggcagggggcggttccacttaaaaaccctgggacga

SEQ ID NO: 175261 - DNA, 2349 bp, Artificial Sequence
  derived and/or modified sequence
atggccgccgccgccgccgccggccccagccccggcagcggccccggcgacagccccgagggccccgagggcgaggcccccgagagaagaagaaaggcccacggcatgctgaagctgtactacggcctgagcgagggcgaggccgccggcagacccgccggccccgaccccctggaccccaccgacctgaacggcgcccacttcgaccccgaggtgtacctggacaagctgagaagagagtgccccctggcccagctgatggacagcgagaccgacatggtgagacagatcagagccctggacagcgacatgcagaccctggtgtacgagaactacaacaagttcatcagcgccaccgacaccatcagaaagatgaagaacgacttcagaaagatggaggacgagatggacagactggccaccaacatggccgtgatcaccgacttcagcgccagaatcagcgccaccctgcaggacagacacgagagaatcaccaagctggccggcgtgcacgccctgctgagaaagctgcagttcctgttcgagctgcccagcagactgaccaagtgcgtggagctgggcgcctacggccaggccgtgagataccagggcagagcccaggccgtgctgcagcagtaccagcacctgcccagcttcagagccatccaggacgactgccaggtgatcaccgccagactggcccagcagctgagacagagattcagagagggcggcagcggcgcccccgagcaggccgagtgcgtggagctgctgctggccctgggcgagcccgccgaggagctgtgcgaggagttcctggcccacgccagaggcagactggagaaggagctgagaaacctggaggccgagctgggccccagcccccccgcccccgacgtgctggagttcaccgaccacggcggcagcggcttcgtgggcggcctgtgccaggtggccgccgcctaccaggagctgttcgccgcccagggccccgccggcgccgagaagctggccgccttcgccagacagctgggcagcagatacttcgccctggtggagagaagactggcccaggagcagggcggcggcgacaacagcctgctggtgagagccctggacagattccacagaagactgagagcccccggcgccctgctggccgccgccggcctggccgacgccgccaccgagatcgtggagagagtggccagagagagactgggccaccacctgcagggcctgagagccgccttcctgggctgcctgaccgacgtgagacaggccctggccgcccccagagtggccggcaaggagggccccggcctggccgagctgctggccaacgtggccagcagcatcctgagccacatcaaggccagcctggccgccgtgcacctgttcaccgccaaggaggtgagcttcagcaacaagccctacttcagaggcgagttctgcagccagggcgtgagagagggcctgatcgtgggcttcgtgcacagcatgtgccagaccgcccagagcttctgcgacagccccggcgagaagggcggcgccaccccccccgccctgctgctgctgctgagcagactgtgcctggactacgagaccgccaccatcagctacatcctgaccctgaccgacgagcagttcctggtgcaggaccagttccccgtgacccccgtgagcaccctgtgcgccgaggccagagagaccgccagaagactgctgacccactacgtgaaggtgcagggcctggtgatcagccagatgctgagaaagagcgtggagaccagagactggctgagcaccctggagcccagaaacgtgagagccgtgatgaagagagtggtggaggacaccaccgccatcgacgtgcaggtgggcctgctgtacgaggagggcgtgagaaaggcccagagcagcgacagcagcaagagaaccttcagcgtgtacagcagcagcagacagcagggcagatacgcccccagctacacccccagcgcccccatggacaccaacctgctgagcaacatccagaagctgttcagcgagagaatcgacgtgttcagccccgtggagttcaacaaggtgagcgtgctgaccggcatcatcaagatcagcctgaagaccctgctggagtgcgtgagactgagaaccttcggcagattcggcctgcagcaggtgcaggtggactgccacttcctgcagctgtacctgtggagattcgtggccgacgaggagctggtgcacctgctgctggacgaggtggtggccagcgccgccctgagatgccccgaccccgtgcccatggagcccagcgtggtggaggtgatctgcgagagaggctag

SEQ ID NO: 175262 - DNA, 2349 bp, Artificial Sequence
  derived and/or modified sequence
atggctgctgcggcagcagctgggcctagcccaggcagcgggccaggcgactccccggagggacccgagggcgaggcccctgagaggaggcgaaaagcacacgggatgttaaaattgtactatggtttaagtgaaggggaagcagctgggcgccccgctgggcccgaccctctcgatccaactgatctgaacggagcacattttgatccggaggtttacctagataagctgcgtcgggaatgcccgctagcacagctcatggacagtgagaccgacatggtgagacagattcgggccctggactcagatatgcagacactggtttatgagaactataacaaattcatctctgcgacagatactatacgaaagatgaagaatgactttcgcaaaatggaggatgaaatggacaggctcgctacgaacatggctgtgatcaccgatttcagtgccaggatttccgccactcttcaagataggcatgagagaattaccaagctcgctggagttcacgccttactcaggaaactccaattcctgtttgagcttccctctaggctgaccaaatgcgtcgagctgggggcttacggccaggccgtgagataccagggccgcgcccaggccgtgttacaacagtaccagcacctgccctcatttagagccattcaggatgattgccaggtgattacagcccggctagcacagcagctgcgacagcggtttcgagagggaggctccggggcccctgagcaggctgagtgcgtagaacttttgctcgccctgggcgagccagcggaagaattatgcgaggagtttctggcacatgctagagggcgcctggagaaggaactgaggaacctggaggccgagctggggccatccccaccagctccagatgtgctagagttcacagaccacggtgggtcgggcttcgtgggaggcctttgccaggtcgcggccgcttaccaggagttgtttgccgcacagggtccagccggggcagagaagctggccgctttcgcccgtcagctgggtagccgctactttgccctagtggagcgcaggctggcccaggaacagggcggaggggacaactctctactggttcgagctctcgatcgatttcataggaggcttcgcgcccccggcgcgctgctagccgccgccggcctggcggatgctgctacagagatcgttgagagagttgcccgtgagcggttgggacaccacttacaaggactcagagctgcattccttggatgtctaaccgacgttcgccaggctctggctgcccccagagtagccggaaaggagggccccgggctcgccgaactgctcgctaatgtcgcaagttcaattcttagccatataaaagcgagccttgccgcagtccatctgtttaccgccaaggaagtgtctttttcaaacaagccgtacttcaggggcgaattctgcagtcagggggtacgggaggggttaattgtgggtttcgtccactcaatgtgccagacagcccagagcttttgcgatagcccgggagagaaagggggcgcaacccccccggcattactcctccttctctcaaggctctgcctggattacgaaactgctacgatatcttacattctcacactcacggatgaacaatttctagtgcaggatcagtttcccgtaacaccagtgagcactttgtgcgccgaggcccgagagaccgcccggagactgttaacacactacgtgaaggtccagggcctggttatctctcagatgttgcggaaatctgtggaaacaagagactggctcagcacgcttgaaccaaggaatgtgagagcagtgatgaagagggtggtggaggatacaaccgcaattgatgtccaggtcggactactatacgaggaaggagtgcgcaaggcccaatccagtgactcctctaagcgcacattttctgtgtacagcagcagcaggcagcaggggcgctatgcccctagctataccccatctgcgccaatggacacaaatcttctcagcaatatccagaaacttttctctgagcggatagacgttttttctcctgtggagttcaataaagtaagcgtgctcactggcattatcaagatctcacttaaaacactactggagtgtgtcagactccggacattcggtcgtttcgggcttcagcaggttcaggtcgattgtcatttcctgcagctatacttgtggcgcttcgtagccgacgaagagttggtgcacctcttgctggatgaagtagtggcctctgctgccctaaggtgccccgaccctgttcctatggagccctcggtggtcgaagtgatttgtgagcgcgggtag

SEQ ID NO: 175263 - DNA, 2349 bp, Artificial Sequence
  derived and/or modified sequence
atggctgctgctgctgctgctggccccagccctggcagcggccctggggacagccctgagggccctgagggggaggcccctgagaggaggaggaaggcccacggcatgctgaagctgtactacggcctgtctgagggggaggccgccggccggcctgctggccctgaccccctggaccccacagacctgaatggagcccactttgatcctgaggtgtacctggacaagctgcggcgggagtgccccctggcccagctgatggattctgaaacagacatggtgcggcagatccgggccctggacagcgacatgcagaccctggtgtatgagaactacaacaagttcatcagcgccacagacaccatcaggaagatgaagaatgacttcaggaagatggaggatgagatggaccggctggccaccaacatggccgtcatcacagacttcagcgcccgcatcagcgccaccctgcaggacagacatgagcgcatcaccaagctggccggcgtgcacgccctgctgaggaagctgcagttcctgtttgagctgcccagccggctgaccaagtgtgtggagctgggcgcctacggccaggccgtgcgctaccagggccgggcccaggccgtgctgcagcagtaccagcacctgcccagcttccgggccatccaggatgactgccaggtgatcacagcccggctggcccagcagctgcggcagcgcttccgggagggcggcagcggggcccctgagcaggctgaatgtgtggagctgctgctggccctgggggagcctgctgaggagctgtgtgaggagttcctggcccacgcccggggccgcctggagaaggagctgaggaacctggaggccgagctgggccccagccccccagccccagatgtgctggagttcacagaccacggcggcagcggctttgtgggcggcctgtgccaggtggccgccgcctaccaggagctgtttgctgcccagggccctgctggagctgagaagctggccgcctttgcccggcagctgggcagccgctactttgccctggtggagcggcggctggcccaggagcagggcggcggggacaacagcctgctggtgcgggccctggaccgcttccaccggcggctgcgggcccctggggccctgctggccgctgctggcctggctgatgctgccacagagatcgtggagcgggtggcccgggagcggctgggccaccacctgcagggcctgcgggccgccttcctgggctgcctgacagatgtgcggcaggccctggccgccccccgggtggccggcaaggagggccctggcctggccgagctgctggccaacgtggccagcagcatcctgagccacatcaaggccagcctggccgctgtgcacctgttcaccgccaaggaggtgtccttcagcaacaagccctacttccggggggagttctgcagccagggcgtgcgggagggcctcatcgtgggctttgtgcacagcatgtgccagacagcccagagcttctgtgacagccctggagagaagggcggggccaccccaccagccctgctgctgctgctgagccggctgtgcctggactatgaaacagccaccatctcctacatcctgaccctgacagatgagcagttcctggtgcaggaccagtttcctgtgacccctgtgtccaccctgtgtgccgaggcccgggagacagcccggcggctgctgacccactacgtgaaggtgcagggcctggtgatcagccagatgctgaggaagtctgtggagacccgggactggctgagcaccctggagcccagaaatgtgcgggctgtgatgaagagggtggtggaggacaccacagccattgatgtgcaggtgggcctgctgtatgaggagggcgtgaggaaggcccagagcagtgacagcagcaagaggaccttctctgtgtacagcagcagccggcagcagggccgctatgcccccagctacaccccatctgcccccatggacaccaacctgctgagcaacatccagaagctgttcagcgagagaattgatgtgttcagccctgtggagttcaacaaggtgtctgtgctgaccggcatcatcaagatcagcctgaagaccctgctggagtgtgtgcggctgcggaccttcggccgcttcggcctgcagcaggtgcaggtggactgccacttcctgcagctgtacctgtggaggtttgtggctgatgaggagctggtgcacctgctgctggatgaggtggtggccagcgctgccctgcgctgcccagaccctgtgcccatggagcccagcgtggtggaggtgatctgtgagcggggctag

SEQ ID NO: 175264 - DNA, 2349 bp, Artificial Sequence
  derived and/or modified sequence
atggccgccgccgccgccgccggccccagccccggcagcggccccggcgatagccctgaggggcccgagggagaggccccggaacggcgacgcaaggcgcatggtatgctcaagctgtactacgggctgtcagagggagaagccgccggtaggccagccggccctgacccacttgacccaactgatctcaacggggcacatttcgacccagaagtgtatctcgacaaactgaggcgcgaatgtccactggcccagctgatggacagcgagaccgatatggtgagacagattcgggccttggatagcgacatgcaaacactggtctatgaaaattacaataagtttatcagcgctacagacaccatacgaaagatgaagaacgacttccgaaagatggaggatgaaatggatcgccttgccacaaatatggccgttattaccgatttctcagctaggatttccgcaactctccaagacaggcatgagagaatcacaaagctggccggcgttcacgccttgttgcggaaactgcaatttcttttcgagctgccaagcagattgaccaagtgcgtagaactcggggcctatggccaggccgttcgctaccaagggcgggcgcaggctgtgctgcaacagtatcagcatctgcccagtttcagggcaattcaggacgattgccaggtgatcacagctaggctggctcagcagcttcggcagcgctttcgggagggaggcagcggagctcctgagcaggcagagtgcgtggagctccttctcgctcttggggagcctgccgaagaactgtgcgaggagttcctggcccacgcccgggggcggctggagaaggagcttcgtaatctggaagccgaactcggccccagcccaccagctccagacgtcttagagtttactgatcatgggggatcaggattcgtgggcggtctgtgtcaggttgctgccgcctaccaggagctttttgcagcccaggggccagccggcgctgagaaactggcagcatttgcccggcagctggggtctcgctatttcgccctcgtcgagcgcagattggcccaggagcaggggggcggagataattctctacttgtgagagccctcgacaggttccacaggcggctgcgggcccccggtgctcttctcgccgcagccggtctggctgacgcagccactgagatcgtagaaagagtcgctagggagagactaggtcatcatctccaggggctccgagctgcttttctagggtgcctgacagatgtcagacaagcattggctgcacctcgcgtggccggtaaggaaggccctgggcttgccgaacttctggcaaatgtcgccagcagcattctgtctcacattaaagctagcctggctgccgtgcacttattcaccgctaaggaagtgagttttagtaataaaccttacttccgcggcgagttttgtagccagggagtcagagaggggcttatcgtaggcttcgtccattccatgtgtcagaccgcccagtcgttctgtgattcaccaggagaaaaaggtggagccaccccccccgccttactgctgctgctgagtcgactctgcttagattatgaaaccgccacaatctcatacatcctgacactcactgacgagcaattcctggtccaagaccaatttccggttactccagtgagcacactatgcgcagaagcccgggagacggccaggaggctgctgactcactacgtcaaagttcaagggctggtgatctctcagatgctacggaaatctgtggagactcgggattggctcagcacgttggagcctcggaacgtgagagctgtcatgaaaagggtcgtagaagatacaactgctattgacgtccaggtcggcctgctgtatgaggaaggagtcaggaaagcccagtcttccgatagcagcaagagaacattctctgtgtactcttctagccgccagcagggcaggtatgcaccgtcctacacgccttccgcccccatggataccaacctgttatccaatattcagaagttgttttctgaaagaatcgacgtattctctcctgtcgaattcaacaaagtgtccgtgctgaccgggatcataaagataagccttaagactctccttgagtgtgtgaggttaaggacgttcggcaggtttggcctccaacaggtgcaagtagactgccactttctccagttgtacctctggcggtttgtcgccgatgaagaactcgtgcacctgctccttgatgaggtcgtcgcatccgccgcactgcgatgccctgaccccgtacccatggagcctagtgtggttgaggtgatttgtgagcgcgggtag

SEQ ID NO: 175265 - DNA, 2349 bp, Artificial Sequence
  derived and/or modified sequence
atggcagcagcagctgctgcgggtccttcaccaggttccggccctggcgattcccctgaggggcctgaaggggaggctcccgagcggaggcgcaaggcacatggaatgctgaagttatactatggtctgtccgagggggaggcagccggacggccagccggaccagaccccttggaccctacagatctgaacggggctcactttgaccctgaggtgtatctcgataaactgaggagggagtgcccacttgcccaattaatggattccgagacagacatggtccgtcagatcagagcactagattctgacatgcaaacactcgtgtatgagaactacaacaagttcataagcgctacggatacgatcagaaagatgaagaacgacttccgaaagatggaggacgagatggaccgcctggctaccaatatggcagttattactgatttctctgccagaatctctgccacattacaggaccgccacgaacgaattacgaagctcgcaggagtccatgcactgcttcgtaaactccaattcttgtttgaactgccctctcgacttacaaagtgcgttgagctgggggcatatggacaggccgtccgctaccagggacgggctcaggcagttctccagcaataccagcacctgccgtcctttcgggctattcaggatgactgtcaggtgataacagctcgtctcgcacaacagttaagacagcgattcagagagggaggctccggggctccagagcaggctgaatgcgtcgagctgctgcttgccttaggggaaccagcggaggaattgtgtgaagaatttctcgcacacgccagagggaggctcgagaaagaactgcggaatcttgaagcggagctggggccttcaccacccgcaccagacgttctggagttcacagatcacggcggatccgggttcgttggcggactgtgccaggttgccgcagcatatcaggagctatttgccgctcagggccctgcaggtgctgagaagttagcagcgtttgccagacaactgggaagccgctactttgccctcgtcgaacgtcgactggcccaggaacagggaggcggagataacagtctgctggtgcgggcactggatcgctttcaccgacgactgagggccccaggggctttgcttgctgctgccggattggcagatgctgctaccgagatcgtggagcgtgtagccagagagaggcttggacatcatctgcagggccttagagccgcttttctcggatgtctgactgacgtgaggcaggctctggccgctccccgagtagccggaaaggaggggccaggccttgctgagctgttggctaacgttgcaagctcaattctgtcacacatcaaggcatctctcgcggcagtgcatctttttaccgcaaaagaggtgtcattttcaaacaaaccttacttccgcggagagttttgtagccagggcgtgagggagggtctcatcgtggggttcgtccacagtatgtgccaaaccgctcagtccttttgtgactcccctggcgagaagggtggggcaacaccccctgccttactcctcttactcagcaggctctgcctcgactacgaaacagccaccatctcgtatatcctgacattgacagacgagcagttcctagtccaggaccaatttccagtaacccccgtcagcactctttgtgccgaggcccgtgagaccgcacggagactgctgacacattatgtgaaggtacagggactagttatttcgcagatgttaaggaaaagcgtggagaccagggactggttgagcactctggagccgagaaacgtgagagctgtgatgaagagggttgtggaggatacaacagctatcgatgtgcaagtcgggctcttgtatgaagaaggagtgcgtaaagctcagagctccgatagcagcaagcgcacattctccgtatactcctcctctcgccagcagggtcgatacgccccatcatacacacctagcgcgcctatggatactaaccttctgtccaatatccaaaagttgttcagtgaacgtattgacgtgttctcccctgtcgaatttaataaagtctcggtgctaaccgggattattaaaatcagcctcaaaactctcttggaatgcgtgcgacttcgcactttcgggagattcgggttacagcaggtgcaagtcgactgtcactttttgcagttatacctgtggcggttcgtagccgacgaagagttagtgcacctcttactggacgaagtggtggcaagcgccgcattacgttgcccggaccctgtccctatggaaccctccgtcgtcgaggttatatgtgagagagggtag

SEQ ID NO: 175266 - DNA, 705 bp, Artificial Sequence
  derived and/or modified sequence
atgacccagttgccagaggcagaaaaagagaaaatcgctgaacaggtggctgactttaaaaaagtcaaatctaagctagacgcagagatcgagatttgggacgacacctccaatgacataattgtgcttgcaaagaatatgtgtatgatcatgatggaaatgaccgactttacccgaggaaagggtcctctgaagcacactacagacgtaatctacgcggctaaaatgatctctgaatcagggagccgcatggacgtactggctcggcagatcgctaatcagtgtcccgatccttcctgcaaacaggatttactggcctacttggagcagattaaattctattcgcaccagctcaaaatttgtagtcaagtaaaggccgaaatccagaatctaggcggcgaactcattatgagcgcacttgatagtgtgacctccttaatccaagccgctaaaaatctcatgaacgccgtggttcagacagtgaagatgagttacatcgcatccaccaaaattatcagaattcagtctccggccggcccccgccatcctgtggtgatgtggagaatgaaggcaccagccaaaaaaccactgataaagcgggaaaagccagaggagacatgtgcagccgttagacgcggaagtgctaagaaaaagattcaccccctgcaggttatgtctgagttccggggaagacaaatatactag

SEQ ID NO: 175267 - DNA, 2688 bp, Artificial Sequence
  derived and/or modified sequence
atgtcggccgagacccccatcacccttaatatcgatccgcaagatctgcaagtgcaaacatttacagtggagaagctgctcgagcctttaatcattcaggtgacgaccctagtgaattgtccccagaaccccagcagtcgtaaaaagggccgctccaagcgtgcttctgtactgctggcgagcgtcgaagaagcgacctggaacctgctcgataaaggtgagaagatagctcaagaagccacggtgctaaaagatgaactgactgcaagcttggaggaagtgcggaaggagagcgaggcactgaaggtctctgcggagcggttcacagatgatccatgcttccttcccaaacgagaggccgtggtgcaagccgcacgggctctcctcgcagcagtcacacggctgcttatcttggccgatatgattgacgttatgtgtctacttcagcatgtctcagcatttcagcgcacatttgagagccttaaaaacgtggccaataagagcgatctgcaaaaaacgtaccagaagctgggcaaagaactggagaatttggattacctggctttcaagagacaacaggatctgaagtccccaaatcagcgggacgaaattgccggagctcgcgcaagtctgaaggagaattcgcctttactgcactcaatctgctcagcttgcctggaacactcggatgttgcatccctaaaagctagcaaggatactgtgtgtgaggaaattcagaacgcccttaacgtgatcagcaatgcctctcaggggatacagaacatgacgaccccaccagagcctcaagcagctactctgggtagcgcactggacgaactggagaacctcattgtattgaaccccctgacagtaacggaggaagagatcagacccagtctcgagaaacgcctcgaggccattatatcaggggcagcattgttggctgattcgagctgtacccgggatctgcacagagaacgcattatcgccgaatgtaatgcaattagacaggccctccaggatcttctgtctgagtatatgaacaacgccggcaagaaggagagaagcaataccctgaatattgccctggataacatgtgtaaaaagactcgggatcttaggagacaactccgaaaggcaattatcgaccatgtttctgattcattcctggacacaactgttcccctgttagtcttaatagaggctgccaaaaacggccgtgagaaagaaataaaggagtacgccgctatattccacgaacacacgagtaggctggttgaagtcgctaatctggcgtgcagcatgtctaccaacgaagacgggatcaaaatagtgaagatcgctgccaaccacctcgagactttatgcccacagatcatcaatgccgctctggctctcgcagctcgacctaaatcccaggccgtgaaaaatacaatggaaatgtacaagagaacgtgggaaaaccatattcacgtcctcactgaagctgtggacgatataacctctatcgacgatttcttagccgtgtcggagtcccacattctggaggacgtcaacaagtgcatcattgcattaagggatcaggacgcagacaacctggatcgagccgctggcgcgatacggggtcgcgcggcccgcgttgcccatatcgttactggagagatggatagttatgagccaggggcgtatacagaaggcgtgatgcggaatgtgaatttcctgacatcaactgtcatcccagagttcgtgacgcaggttaatgtcgccctcgaagcactgtccaagtcatcattaaacgtgctggacgataatcagttcgtggacatctccaaaaaaatttatgacacaatacatgacattcggtgttctgtgatgatgatccggaccccggaagagctcgaagacgtttccgaccttgaggaagagcacgaggttcgcagtcacaccagtatccagacagaaggaaaaacagacagagcaaagatgacgcagttgccagaggcagagaaggagaagattgcagaacaagtggcagacttcaagaaggtgaaaagcaagctcgacgctgaaatagagatatgggacgatacatccaacgatataatagtgctcgcgaagaatatgtgtatgatcatgatggagatgacagacttcacccgcggcaagggcccactgaaacacaccacagacgtgatctatgcagctaaaatgatttccgaatcaggcagccgcatggatgtacttgcgaggcaaattgcaaaccagtgccccgacccctcttgtaaacaggacctgctcgcataccttgagcagatcaagttttacagccatcaactgaagatttgtagccaggtcaaggctgagatccagaacttgggcggcgagctgataatgtccgcactggattcagtgaccagtctgatccaggcggcaaaaaatttgatgaatgcagttgtgcaaactgtcaagatgtcatatattgctagtacaaagatcatccggatccagtctcctgccggacctaggcatccagtcgtaatgtggagaatgaaggccccagcgaaaaagcctctgatcaagcgcgaaaaaccggaggagacatgcgcggctgtacgcagggggagtgccaagaagaagatccatcccctgcaggtgatgtctgaatttagaggacgacagatttattag

SEQ ID NO: 175268 - DNA, 2688 bp, Artificial Sequence
  derived and/or modified sequence
atgtcggccgagacacctataacactcaatatcgacccccaagatctgcaggtgcagaccttcacagtggaaaagttacttgagccgctcatcatccaggtgacaacattggtaaactgcccgcagaatccaagtagccgtaagaagggccggtccaagcgagccagcgtgctccttgcttcagtagaagaagctacgtggaaccttttagataaaggtgagaagattgcacaggaggcgaccgtgctgaaagacgagctaacggcctcactcgaggaagttcgcaaggaaagcgaggccttgaaggtgagtgcagagaggtttacggacgacccttgtttccttcccaagcgggaagccgtggtacaggccgctcgagccctcctggccgcagtgacaaggctgctgatcctggctgacatgatcgatgtgatgtgtctgctgcaacatgtgagtgccttccaaaggacgtttgagtctctcaaaaacgtagcaaacaagtctgacttgcagaagacctatcagaaactcggaaaagaactggaaaacctggactacctagctttcaagcgccagcaagacctgaaatctcccaaccaacgggatgagatcgccggcgcccgggcctccttgaaagagaatagcccgctgctgcattccatctgcagtgcatgtctcgagcactccgacgtggcatccctaaaggcatccaaagacactgtctgcgaagagatccagaatgccttaaatgtgatatccaacgctagccaaggtatccagaacatgacgacaccacccgagccacaagccgctaccctcggaagtgccttagatgaacttgaaaatcttatagtactgaatccactcactgtgacagaagaagaaattcggcctagcctggagaaaaggctcgaggcgatcatctcaggcgcggcccttctcgccgattcttcttgcactcgggacttgcacagggagcgtattatcgccgaatgtaacgcaattcggcaggcgctgcaggatctcctgagcgaatacatgaacaacgccgggaaaaaggagcggtcaaacacactaaacattgcactggacaatatgtgtaagaaaacaagggacctgcgaaggcagctgaggaaagctatcatagaccacgttagcgactcgtttctcgatacgacagttccattactggtgcttatcgaggcggccaagaacggaagagaaaaagaaatcaaggagtatgccgcaatattccatgaacacaccagcaggctcgtagaggtggctaatctcgcttgcagcatgtcaaccaacgaggatggtattaaaatcgtgaagatcgcagcaaatcacctggaaaccctgtgcccacagatcataaacgccgccctcgctcttgccgcacggcccaaatctcaggccgtgaaaaacactatggagatgtacaagagaacgtgggagaatcatatacatgtgttaacggaggctgtggatgatatcacctccatagatgattttctggctgtatctgagtcccatattctggaagacgtgaacaagtgcattatcgcgctgcgggatcaggacgccgataatcttgacagggcagccggcgccatccgcgggcgcgccgctcgggtggcgcacatcgtgaccggagagatggattcctacgagcctggagcgtacacagagggggtgatgcggaacgtcaactttctgaccagtactgtcatcccagaatttgtgacacaagttaatgtggctctcgaggccctgtccaaatcctcgctgaacgtgcttgatgacaaccagtttgtcgatatcagcaagaaaatatacgatactatacacgacatccgctgcagcgtgatgatgatcagaacaccagaggaacttgaagacgtgagtgacttggaggaggagcacgaagtgcgaagtcatacttcaatccaaaccgaggggaagactgatagggcaaagatgacccagctaccagaggcagagaaggaaaaaatcgccgaacaggtcgcagattttaagaaagtcaaatccaaactcgatgctgagatagagatctgggatgacacctcaaacgacataattgtactcgctaaaaatatgtgtatgatcatgatggagatgacagatttcacaagaggcaaggggcccctgaagcacaccacggacgtaatttatgctgcgaagatgatctccgaatccggcagtaggatggacgtgcttgcaagacagatagcaaaccagtgcccggacccgtcttgcaaacaggacctacttgcctacctcgagcaaatcaaattttatagtcaccagttgaagatctgtagccaggtgaaagccgagattcagaatcttggcggagagctgatcatgtccgccctggacagcgtgactagcctcatccaggctgccaagaaccttatgaatgcagtggtgcagaccgtgaagatgagctacattgcgtcaacaaagatcatcaggattcagtcccccgccggtcctcgacaccccgtggttatgtggcggatgaaagcgcccgcgaagaagccattaattaaacgggagaagcccgaagagacctgtgctgcagtccgtaggggatcagcaaagaagaagatccatccactgcaggttatgtctgaatttaggggccgccagatttactag

SEQ ID NO: 175269 - DNA, 705 bp, Artificial Sequence
  derived and/or modified sequence
atgacccagctgcctgaggccgagaaggagaagattgctgagcaggtggccgacttcaagaaggtgaagagcaagctggatgctgagattgagatctgggatgacaccagcaatgacatcatcgtgctggccaagaacatgtgcatgatcatgatggagatgacagacttcacccggggcaagggccccctgaagcacaccacagatgtgatctatgctgccaagatgatcagcgagagcggcagcaggatggatgtgctggcccggcagatcgccaaccagtgcccagaccccagctgcaagcaggacctgctggcctacctggagcagatcaagttctacagccaccagctgaagatctgcagccaggtgaaggccgagatccagaacctgggcggggagctgatcatgtctgccctggacagcgtgaccagcctcatccaggccgccaagaacctgatgaatgctgtggtgcagacagtgaagatgagctacatcgccagcaccaagatcatccgcatccagagccctgctggccccaggcaccctgtggtgatgtggaggatgaaggccccagccaagaagcccctcatcaagcgggagaagccagaggagacctgtgccgctgtgagaagaggcagcgccaagaagaagatccaccccctgcaggtgatgtctgagttccggggccggcagatctactag

SEQ ID NO: 175270 - DNA, 2688 bp, Artificial Sequence
  derived and/or modified sequence
atgtctgctgagacccccatcaccctgaacatcgacccccaggacctgcaggtgcagaccttcaccgtggagaagctgctggagcccctcatcatccaggtgaccaccctggtgaactgcccccagaaccccagcagcaggaagaagggccgcagcaagagggcctctgtgctgctggcctctgtggaggaggccacctggaacctgctggacaagggggagaagatcgcccaggaggccaccgtgctgaaggatgagctgacagccagcctggaggaggtgaggaaggagagcgaggccctgaaggtgtctgctgagcgcttcacagatgacccctgcttcctgcccaagcgggaggccgtggtgcaggccgcccgggccctgctggccgctgtgacccggctgctgatcctggccgacatgattgatgtgatgtgcctgctgcagcacgtgtctgccttccagaggacctttgagagcctgaagaatgtggccaacaagagtgacctgcagaagacctaccagaagctgggcaaggagctggagaacctggactacctggccttcaagaggcagcaggacctgaagagccccaaccagagagatgaaattgctggggcccgggccagcctgaaggagaacagccccctgctgcacagcatctgcagcgcctgcctggagcacagtgatgtggccagcctgaaggccagcaaggacacagtgtgtgaggagatccagaatgccctgaatgtcatcagcaatgccagccagggcatccagaacatgaccaccccacctgagccccaggccgccaccctgggcagcgccctggatgagctggagaacctgattgtgctgaaccccctgactgtgacagaggaggagatccggcccagcctggagaagaggctggaggccatcatctctggagctgccctgctggccgacagcagctgcacccgggacctgcaccgggagcgcatcatcgcagaatgtaatgccatccggcaggccctgcaggacctgctgtctgagtacatgaacaatgctgggaagaaggagaggagcaacaccctgaacatcgccctggacaacatgtgcaagaagacccgggacctgcggcggcagctgaggaaggccatcatcgaccacgtgtctgacagcttcctggacaccaccgtgcccctgctggtgctgattgaggccgccaagaatggccgggagaaggagatcaaggagtatgctgccatcttccacgagcacaccagccggctggtggaggtggccaacctggcctgcagcatgagcaccaatgaagatggcatcaagatcgtgaagattgctgccaaccacctggagaccctgtgcccccagatcatcaatgctgccctggccctggccgcccggcccaagagccaggccgtgaagaacaccatggagatgtacaagaggacctgggagaaccacatccacgtgctgacagaggccgtggatgacatcaccagcattgatgacttcctggccgtgtctgagagccacatcctggaggatgtgaacaagtgcatcatcgccctgcgggaccaggatgctgacaacctggacagagctgctggggccatccggggccgggccgcccgggtggcccacatcgtgactggagagatggacagctatgagcccggggcctacacagagggcgtgatgagaaatgtgaacttcctgaccagcaccgtcatccctgagtttgtgacccaggtgaatgtggccctggaggccctgagcaagagcagcctgaatgtgctggatgacaaccagtttgtggacatcagcaagaagatctatgacaccatccatgacatccgctgcagcgtgatgatgatccgcaccccagaggagctggaggatgtgtctgacctggaggaggagcacgaggtgcgcagccacaccagcatccagacagagggcaagacagaccgggccaagatgacccagctgcctgaggccgagaaggagaagattgctgagcaggtggccgacttcaagaaggtgaagagcaagctggatgctgagattgagatctgggatgacaccagcaatgacatcatcgtgctggccaagaacatgtgcatgatcatgatggagatgacagacttcacccggggcaagggccccctgaagcacaccacagatgtgatctatgctgccaagatgatcagcgagagcggcagcaggatggatgtgctggcccggcagatcgccaaccagtgcccagaccccagctgcaagcaggacctgctggcctacctggagcagatcaagttctacagccaccagctgaagatctgcagccaggtgaaggccgagatccagaacctgggcggggagctgatcatgtctgccctggacagcgtgaccagcctcatccaggccgccaagaacctgatgaatgctgtggtgcagacagtgaagatgagctacatcgccagcaccaagatcatccgcatccagagccctgctggccccaggcaccctgtggtgatgtggaggatgaaggccccagccaagaagcccctcatcaagcgggagaagccagaggagacctgtgccgctgtgcggcggggcagcgccaagaagaagatccaccccctgcaggtgatgtctgagttccggggccggcagatctactag

SEQ ID NO: 175271 - DNA, 705 bp, Artificial Sequence
  derived and/or modified sequence
atgacccagctgcccgaggccgagaaggagaagatcgccgagcaggttgctgactttaaaaaagttaagtcaaaattggacgctgaaattgagatctgggacgacacctccaatgatattattgtgctggcaaaaaacatgtgcatgattatgatggaaatgaccgattttactagaggcaagggccccctcaaacacacaaccgacgtgatctatgcggccaaaatgatttctgagagtggaagcagaatggacgtcctcgcccgccagattgctaatcaatgtcctgacccgtcatgtaaacaggacttgctggcatatttggagcagattaaattttactcccatcagttaaaaatttgcagccaagtcaaggctgagattcaaaatctgggaggcgagctcataatgagcgccctggatagcgtgactagtctaatccaggcggccaaaaacctcatgaatgccgtcgtgcagacagtgaagatgagctatattgcatctacaaagattattcggatccaatccccagccggccccagacatccagtggtgatgtggaggatgaaagccccagccaagaagccattaataaagcgcgaaaagcccgaagagacctgcgcagcagttcggcgtgggagcgcaaaaaagaaaattcaccctttacaggtgatgtccgaattccggggacggcagatatattag

SEQ ID NO: 175272 - DNA, 2688 bp, Artificial Sequence
  derived and/or modified sequence
atgagcgccgagacccccatcaccctgaacatcgacccccaggacctgcaggtgcagactttcaccgtggagaagttacttgaaccactcataattcaggtgaccacactggtgaattgtccacagaaccccagctccaggaagaagggccgctcaaaacgagcatctgtcctgcttgcgtccgtcgaggaggcaacatggaatctactggacaaaggcgagaagattgcccaggaggcaacagttctgaaggacgaattgaccgcctctctcgaggaggtgcgcaaggagtctgaagctctgaaagtcagcgctgaacgtttcaccgatgatccctgcttccttccaaaacgggaagccgtcgtccaggctgcacgggctctcctggcagccgtgactcggttgttaattttggccgatatgatcgacgtgatgtgcctcttgcagcacgtgtccgctttccagcgaacctttgagagcttgaaaaacgtagctaacaagagcgacttacagaagacctaccagaaactgggtaaagagttagagaaccttgactacctggctttcaaacgacagcaggacctgaaatcacctaatcaaagagacgagattgccggtgccagagctagcctgaaggagaactccccactgctacacagcatttgcagtgcctgcctcgagcactctgacgtcgcttctctgaaggcctcgaaggacacagtgtgcgaggaaatccagaatgccctaaatgttatttctaacgcatcgcaagggatccagaatatgacaaccccacctgagccgcaggcggccactctgggcagcgcccttgacgaacttgagaatctcattgtcctgaatccattaaccgttacagaagaggagatacggccatcccttgaaaagagactggaagccatcatctcaggagctgcccttttggcagactcgtcctgcacgcgagacttacacagggagcgcattatagccgaatgtaatgcgattaggcaggcactgcaggatctcctttcagaatacatgaataacgcagggaagaaggagcgctcaaacaccttgaacatcgcactcgacaacatgtgtaagaagacacgtgacctgaggagacagcttcggaaagccattattgatcatgtgagtgactcttttctagacaccaccgtaccactgctggttctaatcgaggcagccaaaaacggtagagaaaaggagattaaggagtatgcagcaatttttcacgaacatacctctaggctggtagaagtggctaacctcgcttgctcaatgtccacgaacgaagatgggattaagatcgtaaaaattgcagccaaccaccttgagacattgtgcccacagatcattaacgccgcccttgcactcgcggcccgacctaagagtcaggcggtgaagaataccatggagatgtataagcgcacctgggaaaaccacattcatgttctcacagaagccgttgatgatattacatccatagacgacttcctcgcagtgtcagaaagtcacatcctggaagatgtgaataagtgcataatcgctttacgggaccaggatgcggacaatttagacagagctgccggtgcaattcgggggcgcgccgcccgcgtggcccacatcgtgacaggagagatggacagttacgagccaggagcctacacggaaggcgtgatgagaaatgtcaactttctgactagtaccgtaattcctgagttcgtcactcaagttaatgtcgccttggaggcgctctcaaagagcagcttgaacgtgctcgacgataaccagtttgtggacatttcaaagaagatatacgacactatccacgacataaggtgtagcgttatgatgataaggactccagaggaactggaagacgtgtccgacctggaagaagagcacgaagtacggagtcacactagtattcaaacggaaggcaagacagatcgtgcgaagatgacacagctacccgaggcagagaaagaaaaaattgccgagcaggtcgcagactttaagaaggtcaagagcaagctagacgctgagatagagatctgggatgacacctctaatgatataatcgtgctcgccaaaaacatgtgcatgatcatgatggagatgactgacttcacacgcggcaaaggacccctgaaacacaccactgacgtgatctacgctgcgaagatgattagcgagtctggatccagaatggatgtcttagccaggcagattgccaaccagtgccccgacccgagttgcaagcaagaccttctagcatacctcgagcagatcaaattttattcccaccaactcaagatatgcagtcaagtgaaggccgagatacagaacctcggcggcgagctcataatgtccgctttggacagcgttactagcctgatccaggccgcaaagaatctgatgaacgccgtggttcagactgtgaagatgtcttacatcgccagcactaagataattaggattcagagccctgctggtcccaggcacccagtcgtcatgtggaggatgaaagcgcctgccaagaagcctctgataaagagggagaaacccgaggaaacatgcgcagcagtccgacggggatccgccaaaaagaagatacatcccctgcaggtaatgagtgagtttaggggccgtcagatctactag

SEQ ID NO: 175273 - DNA, 2688 bp, Artificial Sequence
  derived and/or modified sequence
atgagcgccgagacccccatcaccctgaacatcgacccccaggacctccaggtccaaacgttcacagtcgagaagctgttagagccgttgataatccaggtgacgacactggtgaactgcccgcagaaccccagctctcggaagaaaggcaggagcaaacgggcttctgtgctactagcttcagtcgaggaagcgacttggaacctgctggataaaggggagaaaattgcccaagaagcaactgtcttaaaggacgagcttacagctagcctggaggaggtacggaaagagtccgaggcactgaaggtttctgctgaacggttcacggacgatccatgttttctaccaaaacgcgaggctgtcgtccaagccgcccgggctcttctggctgcagtcacacggttgctcatcctggcagacatgatcgacgtaatgtgcctactgcagcatgtgagcgccttccagagaaccttcgagtccctgaaaaatgtggcaaataaatcagatctgcaaaaaacctaccaaaagctcggtaaggagcttgaaaacctagactatttggcattcaaacggcagcaggaccttaagtctcccaatcaaagggatgaaatagccggggcccgtgccagcctgaaggagaatagcccgctgttgcactcgatctgtagtgcatgcctcgaacatagcgatgtggcgtctctgaaggcctcaaaagacaccgtatgtgaagagatccaaaacgcccttaatgtgattagtaacgcttctcaagggatacagaacatgacaaccccacctgagccccaggccgcaacgctcggttctgccttggatgaactggaaaatctcatcgtacttaatcccttgactgtgacagaggaagagatacgcccctccctggaaaagcggctcgaggcaataatctccggtgccgctcttttggccgattcgtcgtgtacacgcgacctgcatagggagagaatcattgccgagtgcaatgccattcgacaggccctgcaggaccttttatcagagtacatgaacaatgccgggaaaaaggaacggagtaatactctgaacatcgctctggacaacatgtgcaagaagacgcgcgatctccgccgccagctgaggaaagcaatcatagatcatgtatccgacagtttccttgatacaacagttccattgcttgtcctcatcgaagccgccaaaaacgggagagagaaggagatcaaggagtacgctgcaatcttccacgaacacacaagtcggctcgtggaggtagcgaacctggcatgttccatgtcgacgaatgaggacggaattaagattgtgaagatcgccgccaatcacctcgagaccttatgtccccagattattaacgccgccctcgctttggctgcgcgacccaaaagccaggccgtcaagaatactatggaaatgtacaagaggacatgggaaaatcatatccacgtcttgacagaggctgtagacgatattacgtccatcgacgactttctggctgtttcggaatcccatattctggaagatgtaaataagtgtataattgcgctgcgggaccaggacgctgataatttagatcgcgctgccggggccatcaggggccgcgccgccagagttgcgcacattgtgacaggcgagatggactcttacgaacccggggcttacacggaaggcgtgatgcgaaacgtaaacttcctgacttcaacagtcatccccgagtttgtgacccaagttaatgtggccttagaggccttgagcaagtcttctctgaacgttttagatgacaaccagtttgttgacatatctaagaagatttatgataccatacacgacattcgctgctctgtgatgatgatccgcacccccgaggaattggaggatgtaagcgatctcgaggaggaacatgaagtcagatcccacacttccatacaaactgaaggcaaaacagatcgtgcaaaaatgactcaactgccagaagctgagaaggagaagatcgccgagcaggtggccgattttaagaaagtaaagtccaaactggacgctgaaattgagatctgggatgacaccagcaatgacatcatcgtgctggccaagaatatgtgcatgatcatgatggagatgaccgacttcacaagaggcaagggcccgctgaagcatactacagatgtgatctacgccgcgaagatgatctccgaatcgggttctaggatggacgtgctggctcggcagattgccaaccagtgtccagatccaagctgcaagcaggatctgctcgcgtatctcgagcagattaagttctactcacaccagctgaagatttgttctcaagttaaggccgaaatccagaatttagggggggaactcataatgagtgcgctggactcagtaacgtccctgattcaggccgccaagaatctgatgaatgccgtggtccaaactgtgaaaatgagttatatagcatccaccaaaatcataaggatccaatcccccgctggtccccgacatccagtggtgatgtggcggatgaaagcccctgccaagaaacctcttattaagagagagaagcccgaggaaacctgcgctgccgtgagacgaggaagcgcgaagaagaaaattcatcccctgcaggtgatgtccgagtttcgcggacgacaaatctattag

SEQ ID NO: 175274 - DNA, 705 bp, Artificial Sequence
  derived and/or modified sequence
atgacgcagctgccggaagccgagaaagaaaagattgctgaacaggtcgccgatttcaaaaaagtaaagagcaaacttgatgccgaaatcgaaatttgggacgatactagtaatgatataatagtgcttgccaaaaacatgtgcatgattatgatggagatgacagatttcactagaggcaagggccctttgaaacatactaccgatgttatttatgccgctaaaatgatcagtgagtccggctcacgaatggacgtactcgctagacaaattgctaatcagtgccccgacccatcctgtaaacaggacctgttagcctacttggaacaaattaaattctatagtcatcaacttaaaatttgcagccaggtcaaggcagaaattcagaatctgggcggtgagctcattatgtcagccctggactctgtaacaagccttatccaggctgctaaaaatcttatgaatgccgttgtccagaccgttaaaatgagctatattgcctctaccaagatcatcaggattcagtccccagctgggccaagacaccctgtcgtcatgtggaggatgaaagccccagccaaaaaacccctcatcaagcgggagaaacctgaagagacatgcgctgctgtgcgcagaggcagcgcgaaaaaaaaaattcatcctctgcaggttatgtcggaatttaggggaaggcagatctattag

SEQ ID NO: 175275 - DNA, 2688 bp, Artificial Sequence
  derived and/or modified sequence
atgagcgccgagacgcccatcaccctcaatattgatccacaagacctgcaagtgcagacattcaccgttgagaagttactggagcccttgatcatccaggtgacaactctggtgaactgtccccaaaatcccagctccagaaaaaaaggaaggtctaagcgcgcatcagtgctcctggcctctgtggaggaagccacgtggaacctattggataagggtgaaaaaatagcccaggaagccactgtgctgaaggatgagcttactgctagtctggaagaggtaaggaaggaatctgaggccctcaaagtgtcagcagagcgctttaccgatgacccttgcttcctgcctaagagggaggcagtcgtccaagcggcaagggcgctcctggcagcagtgacgaggctactgatcttagcagacatgatcgacgtcatgtgtctactccagcacgtgagtgcctttcaacgcacttttgagtctctgaaaaacgtggccaacaaatcagacctgcagaagacttaccagaagctgggaaaagaactagagaacctggattatctcgcctttaagcgccagcaggacctgaaaagccctaatcaaagggacgaaatcgctggggcacgagcgtctctcaaggaaaacagtcctctgctgcatagcatttgcagcgcctgtctggagcactctgacgttgcaagtttgaaggcgagcaaggataccgtctgtgaagaaattcagaatgctctcaatgttattagcaatgcttcccagggaattcagaacatgacaactcctccagaaccacaggcggcaacactcggatccgccttggatgagctggaaaacctaatcgttctgaacccattgacggtcacagaagaggaaatacgcccttcccttgagaaacgtctcgaagccatcatctctggcgcagctcttctggctgactcgtcgtgcaccagggacctgcaccgcgaacgcattatcgcagaatgcaacgcaatccgccaggctttgcaggatcttctgtcggaatacatgaacaatgctgggaaaaaagaacggtccaacacactcaacattgccttggacaacatgtgcaagaaaacacgcgaccttcgcagacaattacgcaaagctatcattgaccacgtgtctgattcatttctcgatacaactgttcccctgttggtgttgatagaagcagccaagaacgggagggaaaaagaaattaaagagtacgcagccatcttccatgaacatacaagccgactggtggaggtggctaacctggcgtgctctatgtccaccaacgaggacggcatcaagatcgttaagatagctgccaaccatctcgagaccttatgccctcagatcataaatgctgccctcgccctcgccgctcggccaaagtcacaggccgtcaaaaacactatggagatgtacaagaggacttgggaaaatcatatacacgtgctgacagaagccgtggatgatattacctcaatcgatgattttctcgccgtttcagaatcccatattttggaagatgtgaataagtgcattatcgccctcagagaccaggatgcagataaccttgacagagctgccggtgccatacgcggaagggccgcacgtgtggcccacatcgtgacaggcgagatggactcgtacgagccaggggcatatacagagggtgtcatgcgcaacgtcaactttctcactagcactgtaatcccggaatttgtgacccaggtgaatgtggcccttgaagccctgtcaaaatcctccctgaatgtgctcgatgataaccagtttgtggatattagtaagaagatatatgatacgatccatgatatacgctgttcagtcatgatgattaggacccccgaagaactggaagatgtatcggacctcgaggaagagcacgaggtccgctcccacacttctatccagaccgagggcaagacggaccgagctaaaatgacgcaactgccagaagcagaaaaagaaaagattgccgagcaggtggccgatttcaagaaggtgaagtccaagttggacgctgagatcgaaatttgggatgatacgtcaaatgacatcatcgtgctggctaagaatatgtgtatgatcatgatggagatgaccgacttcaccaggggtaagggacccctcaagcatacaaccgatgtcatttacgccgcaaaaatgatttccgaaagtgggtctcggatggacgtgctagctaggcagatcgccaaccagtgccctgaccccagctgcaaacaggacttgctcgcctacttggagcaaatcaaattttatagccatcagttaaaaatctgctcccaggtgaaagccgaaattcagaatctcggcggtgagttaatcatgtccgcgctagattccgtaacatcgctgatccaggctgcaaagaacctaatgaacgcggttgtgcagactgtgaagatgagttacattgcttcaaccaagattatccggatccaatcgccagcagggccaagacaccctgtggtaatgtggcggatgaaggctcctgctaaaaagccactgatcaaaagggagaagcccgaggaaacctgtgccgcagtccggaggggcagtgccaaaaaaaaaatccacccccttcaggtgatgtctgaatttagaggacgtcagatttattag

SEQ ID NO: 175276 - DNA, 2688 bp, Artificial Sequence
  derived and/or modified sequence
atgtcagctgaaacccctattaccctgaatatagacccacaggacctgcaggttcagaccttcacggtggaaaaacttcttgagcctcttataatacaggtgacaacactcgtcaactgtccgcaaaacccctcctccaggaaaaaaggccgttccaaacgcgcaagcgtcctgctggcctctgtggaggaggccacctggaatctactcgataagggcgagaagattgcccaggaggccaccgtcctgaaggacgaactgaccgctagcctcgaagaagtgcgcaaggaatcagaagcactcaaagtgtccgccgagcgcttcaccgatgatccttgctttctgcccaagcgggaggccgtggtgcaggccgcacgcgctctgctcgccgcagttacccgtctcctgatcctagctgatatgatcgacgtcatgtgcctcttgcagcatgtttcagcgtttcagcgtacctttgaaagcctgaaaaatgttgccaataagagcgacctgcagaaaacatatcagaaactgggtaaagaactcgaaaacctggattatctcgcgtttaaacgtcagcaagacctgaaatctcctaatcagagagatgaaatagcaggcgctagggctagtctgaaggaaaatagcccactcctgcattccatttgcagcgcctgcctggaacattccgatgtggcctcccttaaagcctccaaagacactgtttgtgaggagatccagaatgcgcttaacgtaattagcaacgcttctcagggcatccagaatatgacaacacccccagagccgcaggctgcgaccctggggtcagccctggatgagctcgaaaacttgattgtgctgaacccactcaccgtcactgaagaggagattagaccatcattggaaaagcgcctcgaagcaattatcagcggggcagcgcttctagctgatagttcctgtacacgggatcttcatagagagagaatcattgcggaatgcaatgccatccggcaggcgctgcaggatctccttagtgagtacatgaacaatgcgggaaagaaagaaagatctaataccttgaacattgcactggacaatatgtgcaagaagacacgcgatttacgccgacagttgcggaaggctattatagaccacgttagcgatagctttctggataccaccgttccccttctggtgctaatcgaagccgctaagaacgggcgagaaaaagaaataaaagaatacgctgctatttttcacgagcacacctcccggcttgtagaagtggccaacctagcttgcagtatgagtactaatgaggacgggatcaagattgtcaaaatcgctgctaaccatctagaaactctgtgccctcagatcatcaatgccgctctcgctttggctgccagacccaagagccaggccgtaaagaatactatggaaatgtacaagagaacatgggaaaaccacatccacgttctcacagaagccgtagacgatataacaagtattgatgactttctcgctgtctctgaaagccacatcctggaggatgtgaataaatgcatcattgcactgagagatcaggacgcagacaacttggatcgcgcagcaggcgctataagaggtcgtgctgctagggtggcacacatagtgaccggcgaaatggatagttatgaacccggagcctacactgagggcgttatgaggaacgtgaatttcctcactagcacggttatcccagagtttgtgacgcaggtgaacgtagcattagaggctctgtcaaaaagctctctcaatgttctggatgataaccaatttgtcgatatttctaagaaaatttatgacaccatacatgatattcggtgctcagtaatgatgattcggactcctgaagagctggaagatgtatctgaccttgaggaagagcatgaagtgcgtagtcatactagcatccaaacggagggcaagactgacagagcaaagatgactcagctccccgaagcggagaaagaaaaaatagctgaacaggttgccgactttaaaaaagtgaagtcaaaactggatgccgagatcgaaatctgggatgacacctccaacgacataatcgtcctggctaagaacatgtgcatgatcatgatggaaatgactgacttcactagaggcaagggtccacttaaacacacgacagatgtgatctacgctgcgaagatgattagtgagtccggatcgcgtatggacgtacttgcgagacagatagcgaaccagtgtccagacccatcctgtaagcaggatctcctggcatacctggagcagatcaagttttatagccatcaacttaaaatttgtagtcaggtcaaggccgagatccaaaatctgggcggagagctgattatgtctgccctggacagtgtgacatccttgatccaggcagcaaagaaccttatgaatgcggtcgtgcaaacggtcaagatgagctacattgcctctactaagatcatccgcattcagtcccctgccggaccccgacacccagtagtcatgtggaggatgaaagcccctgccaaaaagccattgatcaagagagaaaagccagaagaaacctgcgccgcagtgcgcaggggctcagccaagaagaaaattcaccccctgcaagttatgagcgagttcagaggccgtcaaatttactag

SEQ ID NO: 175277 - DNA, 1083 bp, Artificial Sequence
  derived and/or modified sequence
aagcaggaaagcttatttataacttgaagggcctcattatctgactgagtagtctgtctcttttttgatagattttcttttccatctttgtggtcagactaatacaccttctgtctacttccaatttactgtaaactgggtcatggaattcaggctaagatgactcaactgcctgaggcagaaaaagaaaagattgctgagcaagttgctgatttcaagaaagtaaagagtaagctggatgctgagattgagatatgggatgatacaagcaacgacatcattgttctggccaagaacatgtgtatgatcatgatggagatgacagacttcactaggggcaaaggaccactaaagcatacaactgatgtgatctatgcagcgaaaatgatatcagaatcaggatcaaggatggatgtccttgctcggcagattgctaatcagtgcccagatccatcttgtaaacaggacttgttggcctacctggaacagattaagttctactcccaccaactgaaaatctgcagtcaagttaaagctgagatccagaacctgggaggagagctcatcatgtcagctttggacagtgtcacatccctgatccaagcagccaaaaatttaatgaatgctgtagtgcaaacagtgaaaatgtcttacattgcctcaaccaagatcatccgaatccagagtcctgctgggccccggcacccagttgtgatgtggagaatgaaggctcctgcaaaaaaacccttgattaaaagagagaagccagaggaaacgtgtgcagctgtcagacgaggctcagcaaagaaaaaaatccatccattgcaagtcatgagtgaatttagaggaagacaaatctactgaaaccactattctacatatagtgcctatatgacaaaatcctgcctaaccacactgctttattttacacttaagaagttctgtaatttcactaagttttggtgtttaactcacaaataacataaaatattgggcgctaaatcaacaaaagcaatatatatttgggatcatatcactgtcatttctgtatggtcagcacctaatagttaaggaatatttgct

SEQ ID NO: 175278 - DNA, 2999 bp, Artificial Sequence
  derived and/or modified sequence
atgtcagctgaaacaccaatcacattgaatatcgatcctcaggatctgcaggtccaaacattcaccgtggagaagctactggagcctctcataatccaggttaccacacttgtaaactgtccccagaacccttccagcaggaaaaaaggacgttcgaaaagagccagtgtccttctagcttctgtggaggaagcaacttggaatttattagacaagggagagaagattgcccaggaagctacagttttaaaggatgagcttacggcttcacttgaggaagttcgcaaagaaagtgaagctctgaaagtatcagctgagagatttacagatgacccctgttttctcccaaaaagggaggctgtggttcaagctgcccgtgccttgctggctgcggtgacgagactccttatccttgcggacatgattgatgtcatgtgcctcttgcaacatgtgtcagcttttcaaaggacatttgagtctctcaaaaatgttgccaacaaatctgacctccagaaaacctaccagaagcttgggaaggagctggaaaatttggattatttagccttcaaacgtcagcaggacttaaaatctccaaatcagagagatgaaattgcaggagcccgagcttcactgaaggagaactctcccctcttgcattcaatttgttcagcttgtttggagcattctgatgttgcttccctcaaagcaagcaaggacacagtttgtgaagaaattcagaatgctctcaatgtaatttcaaatgcttcacaagggatccagaatatgacaaccccaccagaacctcaggcagcaaccctgggaagtgcccttgatgagctggagaatttaattgtcctgaatccactcacagtaactgaggaggaaatacgaccatcactagagaaacgccttgaagccattatcagtggggctgctctgctggcggattcttcatgtacgagggacttacaccgagagcggattatcgcagaatgcaacgccattcgccaggctcttcaggatctgctttcagagtacatgaacaacgctggaaaaaaagaaaggagtaataccctgaatattgctttagacaacatgtgtaagaagacaagagaccttcgcagacagctccgcaaggctattatagatcatgtgtcagactctttcctggatacgacagtccctcttttggttctcattgaagctgctaagaatggccgggaaaaggaaataaaagaatatgctgcgatatttcatgaacacaccagcaggcttgtagaggtggcaaatcttgcttgttccatgtcaacaaatgaagatggaattaaaattgtcaaaattgcagccaatcatttggaaaccttgtgtccacagattattaatgctgcacttgctttggctgcaagacccaaaagtcaagcggtcaaaaacaccatggaaatgtacaagcgtacatgggagaatcatatacatgtcctcactgaagccgtagatgacattacaagcattgatgacttccttgctgtatctgaaagccatatcttggaagatgtcaacaagtgtatcatagccttaagagaccaggatgctgataatttagaccgtgctgcgggtgctatcagaggccgggcagcaagagttgctcacatcgtcacgggtgaaatggacagttacgagccaggggcttacacggaaggtgtaatgagaaatgttaacttccttacaagtactgtaattcctgaatttgtaacacaagtgaatgttgccttggaagccttaagcaaaagctcattgaatgtgttggatgataatcaatttgtggacatctcaaagaagatctatgatacaattcatgatatcagatgttcagtcatgatgattcggaccccagaggaactggaggatgtttctgaccttgaagaggaacacgaggtccgcagtcacaccagcattcagaccgaagggaaaactgatagggctaagatgactcaactgcctgaggcagaaaaagaaaagattgctgagcaagttgctgatttcaagaaagtaaagagtaagctggatgctgagattgagatatgggatgatacaagcaacgacatcattgttctggccaagaacatgtgtatgatcatgatggagatgacagacttcactaggggcaaaggaccactaaagcatacaactgatgtgatctatgcagcgaaaatgatatcagaatcaggatcaaggatggatgtccttgctcggcagattgctaatcagtgcccagatccatcttgtaaacaggacttgttggcctacctggaacagattaagttctactcccaccaactgaaaatctgcagtcaagttaaagctgagatccagaacctgggaggagagctcatcatgtcagctttggacagtgtcacatccctgatccaagcagccaaaaatttaatgaatgctgtagtgcaaacagtgaaaatgtcttacattgcctcaaccaagatcatccgaatccagagtcctgctgggccccggcacccagttgtgatgtggagaatgaaggctcctgcaaaaaaacccttgattaaaagagagaagccagaggaaacgtgtgcagctgtcagacgaggctcagcaaagaaaaaaatccatccattgcaagtcatgagtgaatttagaggaagacaaatctactgaaaccactattctacatatagtgcctatatgacaaaatcctgcctaaccacactgctttattttacacttaagaagttctgtaatttcactaagttttggtgtttaactcacaaataacataaaatattgggcgctaaatcaacaaaagcaatatatatttgggatcatatcactgtcatttctgtatggtcagcacctaatagttaaggaatatttgcttgttgaatgaatgaaattatcacgtgtcattcagcgtttcccatcatagagattatctactattcgttaccaaataaacacaggagaggcca

SEQ ID NO: 175279 - DNA, 705 bp, Artificial Sequence
  derived and/or modified sequence
atgacccagctgcccgaggccgagaaggagaagatcgccgagcaggtggccgacttcaagaaggtgaagagcaagctggacgccgagatcgagatctgggacgacaccagcaacgacatcatcgtgctggccaagaacatgtgcatgatcatgatggagatgaccgacttcaccagaggcaagggccccctgaagcacaccaccgacgtgatctacgccgccaagatgatcagcgagagcggcagcagaatggacgtgctggccagacagatcgccaaccagtgccccgaccccagctgcaagcaggacctgctggcctacctggagcagatcaagttctacagccaccagctgaagatctgcagccaggtgaaggccgagatccagaacctgggcggcgagctgatcatgagcgccctggacagcgtgaccagcctgatccaggccgccaagaacctgatgaacgccgtggtgcagaccgtgaagatgagctacatcgccagcaccaagatcatcagaatccagagccccgccggccccagacaccccgtggtgatgtggagaatgaaggcccccgccaagaagcccctgatcaagagagagaagcccgaggagacctgcgccgccgtgagaagaggcagcgccaagaagaagatccaccccctgcaggtgatgagcgagttcagaggcagacagatctactag

SEQ ID NO: 175280 - DNA, 2688 bp, Artificial Sequence
  derived and/or modified sequence
atgagcgccgagacccccatcaccctgaacatcgacccccaggacctgcaggtgcagaccttcaccgtggagaagctgctggagcccctgatcatccaggtgaccaccctggtgaactgcccccagaaccccagcagcagaaagaagggcagaagcaagagagccagcgtgctgctggccagcgtggaggaggccacctggaacctgctggacaagggcgagaagatcgcccaggaggccaccgtgctgaaggacgagctgaccgccagcctggaggaggtgagaaaggagagcgaggccctgaaggtgagcgccgagagattcaccgacgacccctgcttcctgcccaagagagaggccgtggtgcaggccgccagagccctgctggccgccgtgaccagactgctgatcctggccgacatgatcgacgtgatgtgcctgctgcagcacgtgagcgccttccagagaaccttcgagagcctgaagaacgtggccaacaagagcgacctgcagaagacctaccagaagctgggcaaggagctggagaacctggactacctggccttcaagagacagcaggacctgaagagccccaaccagagagacgagatcgccggcgccagagccagcctgaaggagaacagccccctgctgcacagcatctgcagcgcctgcctggagcacagcgacgtggccagcctgaaggccagcaaggacaccgtgtgcgaggagatccagaacgccctgaacgtgatcagcaacgccagccagggcatccagaacatgaccaccccccccgagccccaggccgccaccctgggcagcgccctggacgagctggagaacctgatcgtgctgaaccccctgaccgtgaccgaggaggagatcagacccagcctggagaagagactggaggccatcatcagcggcgccgccctgctggccgacagcagctgcaccagagacctgcacagagagagaatcatcgccgagtgcaacgccatcagacaggccctgcaggacctgctgagcgagtacatgaacaacgccggcaagaaggagagaagcaacaccctgaacatcgccctggacaacatgtgcaagaagaccagagacctgagaagacagctgagaaaggccatcatcgaccacgtgagcgacagcttcctggacaccaccgtgcccctgctggtgctgatcgaggccgccaagaacggcagagagaaggagatcaaggagtacgccgccatcttccacgagcacaccagcagactggtggaggtggccaacctggcctgcagcatgagcaccaacgaggacggcatcaagatcgtgaagatcgccgccaaccacctggagaccctgtgcccccagatcatcaacgccgccctggccctggccgccagacccaagagccaggccgtgaagaacaccatggagatgtacaagagaacctgggagaaccacatccacgtgctgaccgaggccgtggacgacatcaccagcatcgacgacttcctggccgtgagcgagagccacatcctggaggacgtgaacaagtgcatcatcgccctgagagaccaggacgccgacaacctggacagagccgccggcgccatcagaggcagagccgccagagtggcccacatcgtgaccggcgagatggacagctacgagcccggcgcctacaccgagggcgtgatgagaaacgtgaacttcctgaccagcaccgtgatccccgagttcgtgacccaggtgaacgtggccctggaggccctgagcaagagcagcctgaacgtgctggacgacaaccagttcgtggacatcagcaagaagatctacgacaccatccacgacatcagatgcagcgtgatgatgatcagaacccccgaggagctggaggacgtgagcgacctggaggaggagcacgaggtgagaagccacaccagcatccagaccgagggcaagaccgacagagccaagatgacccagctgcccgaggccgagaaggagaagatcgccgagcaggtggccgacttcaagaaggtgaagagcaagctggacgccgagatcgagatctgggacgacaccagcaacgacatcatcgtgctggccaagaacatgtgcatgatcatgatggagatgaccgacttcaccagaggcaagggccccctgaagcacaccaccgacgtgatctacgccgccaagatgatcagcgagagcggcagcagaatggacgtgctggccagacagatcgccaaccagtgccccgaccccagctgcaagcaggacctgctggcctacctggagcagatcaagttctacagccaccagctgaagatctgcagccaggtgaaggccgagatccagaacctgggcggcgagctgatcatgagcgccctggacagcgtgaccagcctgatccaggccgccaagaacctgatgaacgccgtggtgcagaccgtgaagatgagctacatcgccagcaccaagatcatcagaatccagagccccgccggccccagacaccccgtggtgatgtggagaatgaaggcccccgccaagaagcccctgatcaagagagagaagcccgaggagacctgcgccgccgtgagaagaggcagcgccaagaagaagatccaccccctgcaggtgatgagcgagttcagaggcagacagatctactag

SEQ ID NO: 175281 - protein, 602 aa, Artificial Sequence
  derived and/or modified sequence
MRSMKALQKALSRAGSHCGRGGWGHPSRSPLLGGGVRHHLSEAAAQGRETPHSHQPQHQDHDSSESGMLSRLGDLLFYTIAEGQERIPIHKFTTALKATGLQTSDPRLRDCMSEMHRVVQESSSGGLLDRDLFRKCVSSNIVLLTQAFRKKFVIPDFEEFTGHVDRIFEDVKELTGGKVAAYIPQLAKSNPDLWGVSLCTVDGQRHSVGHTKIPFCLQSCVKPLTYAISISTLGTDYVHKFVGKEPSGLRYNKLSLNEEGIPHNPMVNAGAIVVSSLIKMDCNKAEKFDFVLQYLNKMAGNEYMGFSNATFQSEKETGDRNYAIGYYLKEKKCFPKGVDMMAALDLYFQLCSVEVTCESGSVMAATLANGGICPITGESVLSAEAVRNTLSLMHSCGMYDFSGQFAFHVGLPAKSAVSGAILLVVPNVMGMMCLSPPLDKLGNSHRGTSFCQKLVSLFNFHNYDNLRHCARKLDPRREGAEIRNKTVVNLLFAAYSGDVSALRRFALSAMDMEQKDYDSRTALHVAAAEGHIEVVKFLIEACKVNPFAKDRWGNIPLDDAVQFNHLEVVKLLQDYQDSYTLSETQAEAAAEALSKENLESMV

SEQ ID NO: 175282 - protein, 177 aa, Artificial Sequence
  derived and/or modified sequence
MRSMKALQKALSRAGSHCGRGGWGHPSRSPLLGGGVRHHLSEAAAQGRETPHSHQPQHQDHDSSESGMLSRLGDLLFYTIAEGQERIPIHKFTTALKATGLQTSDPRLRDCMSEMHRVVQESSSGGLLDRDLFRKWQPTSLSWPSQTQTCGVSPCALWMVNGTLWATQRSPSACSPV

SEQ ID NO: 175283 - DNA, 1809 bp, Artificial Sequence
  derived and/or modified sequence
atgagaagtatgaaagctttgcagaaagctctgagccgggcgggcagtcattgcggaagaggaggctgggggcaccctagcagaagccccctcttgggtggtggcgtgcgccaccaccttagcgaggcggcagcccaaggacgtgaaacgccccactctcatcagccccaacatcaggatcatgactcttcagaatcggggatgttgagtcgactcggcgatctgctattttataccattgcagaagggcaggaaaggatacctattcacaaattcacaacagctctcaaggctaccggccttcagacctccgacccacgcctcagagattgcatgtcagaaatgcaccgagtggtgcaagagagttcctctggcggattacttgatcgcgatctgtttagaaagtgtgttagctcgaacattgtcctgctgacccaggccttccgaaagaaatttgtgatcccagatttcgaggagtttaccgggcacgtggaccggatcttcgaggacgtgaaagaattgacaggagggaaggtagcggcttacattccacagctggccaagtcaaacccagacttgtggggtgtctcactctgcaccgtcgatggacaacggcacagcgtgggccatacaaagatacctttttgtctgcagagttgcgtaaagcccctgacctatgcgataagcatctcgacgctgggaaccgactacgtgcacaaatttgtcggaaaagaacctagcggactgagatacaacaaattaagccttaacgaggaggggatccctcacaacccaatggtcaatgccggggccatcgtcgtgagctctctgattaagatggattgtaacaaagccgagaaattcgattttgttttgcaatatttaaacaaaatggctggaaacgaatatatgggatttagcaatgcaacattccagagtgaaaaggaaactggagatcgcaattatgccataggttactaccttaaagagaaaaagtgtttccccaaaggggtcgacatgatggccgccttggatctttattttcaactctgcagcgtggaagtgacttgcgagagcggttccgtgatggctgcgaccctagctaatggaggcatctgcccgatcacaggcgaatctgttttgtccgccgaggccgtccggaacaccctgagcctcatgcacagctgtgggatgtatgacttcagcgggcagtttgcttttcacgtgggtcttccagccaagagtgccgtgagcggggctattctgctcgtggtgccaaacgtgatggggatgatgtgcttaagcccccctctggacaagctgggtaatagtcaccggggaacttctttttgccagaagttggtctcactgtttaattttcacaattatgacaatctgaggcactgcgctagaaaactcgatcctcggcgggagggagccgagatccgcaataagaccgtagtgaaccttctctttgccgcgtatagcggcgacgtctctgccctgagaaggttcgcactgtctgcaatggatatggagcagaaggactacgattcgcggacagcactgcatgtagcggccgctgaagggcatatagaagtagtgaagtttctgatcgaggcgtgtaaggtgaacccttttgcaaaggataggtgggggaacataccacttgatgacgccgtgcaattcaatcacctagaagtggtgaagctgttgcaggattaccaggactcatacactcttagcgagactcaagctgaggctgcagctgaagcccttagtaaagaaaatctcgaaagcatggtctag

SEQ ID NO: 175284 - DNA, 534 bp, Artificial Sequence
  derived and/or modified sequence
atgagaagcatgaaggcccttcagaaagcactgagcagagcaggttcacattgtggtcggggaggatgggggcatccttcacgtagccccctgctaggaggcggagtgcgtcatcacctgagcgaggccgccgcccaagggagagagacaccacactctcatcagccacaacatcaggaccacgactcttccgaatccggtatgctctcccgcctcggggaccttttgttttacaccattgccgaaggtcaagagaggatacccatccacaaattcacgacagcactgaaagcaacgggcctgcagactagcgatcctaggttaagagattgcatgtccgagatgcaccgggtggtccaggagagctcttccggggggctgctggatagagacctgttcaggaaatggcagccaacatctctcagctggccctcacaaacacagacgtgtggagtgagcccttgcgctctatggatggtgaacggaaccctgtgggctacacagaggagtccttctgcatgctctccggtgtag

SEQ ID NO: 175285 - DNA, 2623 bp, Artificial Sequence
  derived and/or modified sequence
cacccactagaaagccacccgggttctccttcatccccaacgctcctcacctagcccctgtcctgagggtgcccctaaccctggagccagctttaaaggggcaggccccttctcctgccccagccccagccccacccaccgggcccacattctccgtcttccaggtccagcgctccctcacagaactcccccgcaccttgtctcgctcgctccgcccctccttcccagccacagctagaggtcccgggcgcacctgcagagccggaggcttgctggggcatgcgctccatgaaggctctgcagaaggccctgagccgggctggcagtcactgcgggcgaggaggctggggtcacccgagccggagccccctccttggcgggggcgtccggcaccacctcagtgaggccgcggcgcagggcagagagacgccacacagccaccagccgcagcaccaggatcatgattcatcagaaagtggcatgctgtcccgcctgggtgatttgctcttttacactattgctgaaggacaggaacgaatccctatccacaagttcaccactgcactaaaggccactggactgcagacatcagatcctcggctccgagactgcatgagcgagatgcaccgcgtggtccaagagtccagtagtggtggcctcttggaccgagatctcttccgaaagtgtgtgagcagcaacattgtgctcctgacccaggcattccgaaagaagtttgtcattcctgattttgaggagttcacgggccatgtggatcgcatctttgaggatgtcaaagagctcactggaggcaaagtggcagcctacatccctcagctggccaagtcaaacccagacctgtggggtgtctccctgtgcactgtggatggtcaacggcactctgtgggccacacaaagatccccttctgcctgcagtcctgtgtgaagcccctcacctatgccatctccataagcaccctaggcactgactacgtgcacaagtttgtgggcaaagagccaagtggcctgcgctacaacaagctctccctcaatgaggaaggaatcccccataaccccatggtcaatgctggtgccattgttgtcagctccctgatcaagatggactgtaacaaagcagagaagtttgattttgtgttgcagtatctcaacaaaatggctgggaatgaatacatgggtttcagcaatgccacattccagtcagagaaggaaacaggggatcggaattatgccatcggctattatctcaaggaaaagaagtgctttcctaagggggtggacatgatggctgcccttgatctctacttccagctgtgttctgtggaggtcacttgtgaatcaggcagtgtcatggcagccaccctcgccaacggtgggatctgccccatcacaggcgagagtgtgctgagtgctgaagcagtgcgcaacaccctcagcctcatgcattcctgcggcatgtatgacttctctggccagtttgccttccacgtgggcctgccagccaagtcagctgtatcaggagccatcctcctggtggtacccaatgtcatgggaatgatgtgcctgtcacccccattggacaagctggggaacagccatagggggaccagcttctgccagaagttggtgtctctcttcaatttccacaactatgacaacctgaggcactgtgctcggaagttagacccacggcgtgaaggggcagaaattcggaacaagactgtggtcaacctgttatttgctgcctatagtggcgatgtctcagctcttcgaaggtttgccttgtcagccatggatatggaacagaaagactatgactcgcgcacagctctgcatgttgctgcagctgaaggacacatcgaagttgttaaattcctgatcgaggcttgcaaagtgaatccttttgccaaggacaggtggggcaacattcccctggatgatgctgtgcagttcaaccatctggaggtggtcaaactgcttcaagattaccaggactcctacacactctctgaaactcaggctgaggcagcagctgaggccctgtccaaagagaacttagaaagcatggtatgagcacaggtcatggacagcccctgctcaagaaaaagcatgagctggccacacatgtaatccataaccaccaaaaatactatggagagctacactgcttcagtggggaccaagcagtcatttggtgacttaggctagtgctttctatgggagtcaaaataccccattccctcagcagacagagtacagagaagggcctcagaggacacctgcagtacagctatccagagagactgggcttcaaggtacagcctaatggcttgccccactcaaaaccatcccagctcttcacccaggtctcctcttcctctccctgaagaaaccatcatgagagagatactctggtggagggactctagctaccatgcacatgtacatatccacagaatatgggaagtgggaatggctatatacatggctttagtagtctggagaaatctactccccttggccaggacatgctgctgctactgctaacagccaattttatagacagagaaagtattttgtgttcaaataaactttaattaccaaatca

SEQ ID NO: 175286 - DNA, 623 bp, Artificial Sequence
  derived and/or modified sequence
atgcgctccatgaaggctctgcagaaggccctgagccgggctggcagtcactgcgggcgaggaggctggggtcacccgagccggagccccctccttggcgggggcgtccggcaccacctcagtgaggccgcggcgcagggcagagagacgccacacagccaccagccgcagcaccaggatcatgattcatcagaaagtggcatgctgtcccgcctgggtgatttgctcttttacactattgctgaaggacaggaacgaatccctatccacaagttcaccactgcactaaaggccactggactgcagacatcagatcctcggctccgagactgcatgagcgagatgcaccgcgtggtccaagagtccagtagtggtggcctcttggaccgagatctcttccgaaagtggcagcctacatccctcagctggccaagtcaaacccagacctgtggggtgtctccctgtgcactgtggatggtcaacggcactctgtgggccacacaaagatccccttctgcctgcagtcctgtgtgaagcccctcacctatgccatctccataagcaccctaggcactgactacgtgcacaagtttgtgggcaaagagccaagtggcctgcgctac

SEQ ID NO: 175287 - DNA, 1809 bp, Artificial Sequence
  derived and/or modified sequence
atgaggtccatgaaggccctgcagaaggccctgagccgggccggcagccactgcggccggggcggctggggccaccccagccgcagccccctgctgggcggcggcgtgcgccaccacctgtctgaggccgccgcccagggccgggagaccccccacagccaccagccccagcaccaggaccatgacagcagcgagagcggcatgctgagccggctgggggacctgctcttctacaccatcgccgagggccaggagcgcatccccatccacaagttcaccacagccctgaaggccaccggcctgcagaccagtgacccccggctgcgggactgcatgtctgagatgcaccgggtggtgcaggagagcagcagcggcggcctgctggaccgggacctcttcagaaaatgtgtgagcagcaacatcgtgctgctgacccaggccttcaggaagaagtttgtgatcccagactttgaggagttcaccggccacgtggaccgcatctttgaagatgtgaaggagctgactggaggcaaggtggccgcctacatcccccagctggccaagagcaacccagacctgtggggcgtgtccctgtgcaccgtggatggccagaggcacagcgtgggccacaccaagatccccttctgcctgcagagctgtgtgaagcccctgacctacgccatcagcatcagcaccctgggcacagattatgtgcacaagtttgtgggcaaggagcccagcggcctgcgctacaacaagctgagcctgaatgaggagggcatcccccacaaccccatggtgaatgctggggccatcgtggtgagcagcctcatcaagatggactgcaacaaggccgagaagtttgattttgtgctgcagtacctgaacaagatggctggaaatgagtacatgggcttcagcaatgccaccttccagagcgagaaggagactggagacaggaactatgccatcggctactacctgaaggagaagaagtgcttccccaagggcgtggacatgatggccgccctggacctgtacttccagctgtgcagcgtggaggtgacctgtgagagcggctctgtgatggccgccaccctggccaatggaggcatctgccccatcaccggggagagcgtgctgtctgctgaggccgtgaggaacaccctgagcctgatgcacagctgtggcatgtatgacttcagcggccagtttgccttccacgtgggcctgcctgccaagtctgctgtgtctggggccatcctgctggtggtgcccaacgtgatgggcatgatgtgcctgagcccccccctggacaagctgggcaacagccaccggggcaccagcttctgccagaagctggtgtccctcttcaacttccacaactatgacaacctgcggcactgtgccaggaagctggacccccggcgggagggcgctgagatccggaacaagacagtggtgaacctgctgtttgctgcctacagcggagatgtgtctgccctgcggagatttgccctgagcgccatggacatggagcagaaggactatgacagcaggacagccctgcacgtggccgctgctgagggccacatcgaggtggtgaagttcctgattgaggcctgcaaggtgaacccctttgccaaggaccgctggggcaacatccccctggatgatgctgtgcagttcaaccacctggaggtggtgaagctgctgcaggactaccaggacagctacaccctgtctgagacccaggccgaggccgctgctgaggccctgagcaaggagaacctggagagcatggtgtag

SEQ ID NO: 175288 - DNA, 534 bp, Artificial Sequence
  derived and/or modified sequence
atgaggtccatgaaggccctgcagaaggccctgagccgggccggcagccactgcggccggggcggctggggccaccccagccgcagccccctgctgggcggcggcgtgcgccaccacctgtctgaggccgccgcccagggccgggagaccccccacagccaccagccccagcaccaggaccatgacagcagcgagagcggcatgctgagccggctgggggacctgctcttctacaccatcgccgagggccaggagcgcatccccatccacaagttcaccacagccctgaaggccaccggcctgcagaccagtgacccccggctgcgggactgcatgtctgagatgcaccgggtggtgcaggagagcagcagcggcggcctgctggaccgggacctcttcaggaagtggcagcccaccagcctgtcctggcccagccagacccagacctgtggggtgagcccctgtgccctgtggatggtgaatggcaccctgtgggccacccagaggagccccagcgcctgcagccctgtgtag

SEQ ID NO: 175289 - DNA, 1809 bp, Artificial Sequence
  derived and/or modified sequence
atgcggagcatgaaggccctgcagaaggccctgagccgggccggctcacactgcggcagaggcggttggggacatcccagtagatcgccgctgctgggaggtggagtgcgtcaccatctgtccgaagcggccgcccagggaagagaaaccccccattctcatcagccccagcatcaggatcacgatagttctgagtctggaatgttatctcggttgggggatctgcttttttatacgatcgctgaaggccaagagaggataccaatacacaaattcaccactgccctgaaagccactggacttcagaccagcgacccccgtctgcgagactgcatgtctgaaatgcacagagtggtccaggagagttcatctggcggtctcctagacagagatctctttagaaagtgtgtctcgagtaacattgttctgctcacacaggcatttcgcaaaaaattcgtcatcccggattttgaagaattcaccgggcatgtcgatcgtatcttcgaagatgtgaaagagctcaccgggggcaaagttgctgcctacatccctcagctggctaaaagtaacccggacctgtggggcgtctccctttgcacagtggacgggcagagacattccgtcggccataccaagatccccttctgtctgcaatcttgcgttaagccactcacttacgccatatcaatatctactcttggcaccgattacgtgcacaaattcgtgggcaaagagccatccggcctgcgctataacaagctctcgctcaatgaggagggaattccacataacccaatggttaacgcaggagccattgtcgtgtctagcctgatcaagatggactgcaataaggccgagaaattcgatttcgtgctgcagtatttgaataaaatggcgggaaacgaatacatgggcttttccaacgctacctttcagtctgagaaggagaccggggatcgcaactatgctatcggttactaccttaaggagaaaaaatgctttccaaagggtgtcgacatgatggcagccctggatctctactttcagctgtgttcagtagaggtcacctgtgagtccggctctgtcatggccgcaacactagccaatggaggcatttgtccgatcactggcgagtctgtgctatcagcagaggcggttcgaaacacactttcccttatgcacagctgtggcatgtacgatttctcaggacagtttgcattccacgtcggcttgcccgccaagtcagcagtgagtggcgctattctgcttgtggtgcccaatgtcatgggaatgatgtgcctgagccctcctctcgacaaattgggcaacagccaccggggcacgagcttctgccaaaagttggttagcctcttcaacttccataactacgataacctgagacattgcgccagaaaattggatcctcgtcgcgagggcgcagaaattcggaataaaacagtcgtgaatctcctgttcgcagcgtattcgggggacgtgtcagctttgaggcggtttgcgctcagcgccatggacatggagcagaaagactatgattctcgaacggctctccacgtggcagctgccgaaggacacattgaagtcgttaagtttcttattgaggcctgcaaggttaacccgttcgcaaaagatcgatggggcaatatccctcttgacgatgctgtgcagttcaaccatctcgaagtggtgaagttgcttcaggattaccaggacagttataccctgtccgaaacacaggccgaagcagcggcagaagcgctctctaaggagaacctggaaagcatggtgtag

SEQ ID NO: 175290 - DNA, 534 bp, Artificial Sequence
  derived and/or modified sequence
atgcggagcatgaaggccctgcagaaggccctgagccgggccggctctcactgtggccgagggggctggggccatccatcccgatcacccctgctcggtggcggggttaggcaccatctgtctgaggccgctgctcagggccgcgaaactcctcactctcaccagccgcagcaccaggaccacgactcatccgagtccggaatgctgtctcgcctaggcgacctgttgttctatacaattgctgagggccaggagaggatcccaattcacaaattcaccactgcactcaaagcaaccggcctgcagacatccgatccccgcctcagggactgtatgtctgagatgcaccgggtggtccaggagagcagtagtggtggattgttggaccgagacctatttcgcaagtggcagccaacgtcgttgagctggccatcacagacgcagacttgtggggtttctccatgcgccttatggatggtcaacgggacactgtgggccacgcagcgatcgccctcagcctgcagtccagtctag

SEQ ID NO: 175291 - DNA, 1809 bp, Artificial Sequence
  derived and/or modified sequence
atgcggagtatgaaggccttacaaaaggccctgtcgagagccggttcccactgtggaaggggtggatggggacacccgagcagatctcccctgctcggcggaggggtcaggcatcacctgtctgaagcggctgcccaggggcgagaaaccccccacagccaccagcctcagcaccaggatcatgattcgtcagaatctggaatgttgtcacggttaggggacctgctgttctataccatcgccgagggacaggagaggattcctatacataagtttacaacggccctgaaggctaccggactgcaaacctccgatcctcggttgagggattgtatgagcgaaatgcacagagtggtgcaggaatcatcaagtggcggtttattggatagggatctgttccggaagtgtgtcagtagcaatatagtgcttctgacccaggcctttcgcaagaaatttgtgatcccagattttgaagaatttactgggcatgtcgataggatcttcgaggacgtgaaagagctgaccggaggcaaggtcgcggcatacatcccgcagctcgccaaaagcaacccagatctgtggggcgtctcactttgcacggtggatgggcaacggcacagtgtaggccatacaaaaatacccttttgtcttcagtcatgcgtcaaacccctgacttacgcgattagcatttccacgctcgggacggactacgtgcataagtttgtggggaaggagcccagtggactgcggtacaataagctgtccctcaatgaagaagggatccctcataaccctatggtcaatgcaggagccatcgtcgtgtcctccctcatcaaaatggattgtaataaggctgagaagttcgacttcgtgttacaatacctcaataaaatggcagggaacgagtacatgggcttttccaacgccacattccagtcggagaaagagacaggagatagaaactatgctatcggctactatttaaaagaaaagaagtgttttccaaaaggggtggacatgatggcagcacttgatctgtattttcagctttgctccgtagaagtaacctgcgagagcgggagcgtcatggcagctactttggctaatggaggcatttgtcctattactggcgagtcagttctctctgccgaagcggtgcgcaacaccttgtccttgatgcattcttgcggaatgtacgatttctccgggcaattcgcattccatgtggggctccctgctaaatccgcagtcagcggagccatcttgctggtcgtgcctaatgttatgggaatgatgtgcttatcgcctccgctggataagctcgggaatagccacagaggcacttccttttgccaaaagctagtgtctctgttcaacttccacaactacgataaccttagacattgcgcgaggaaactggaccccaggagggagggggctgaaatccggaataagacggtcgtaaacctgctctttgcagcctatagcggcgatgtcagtgcgctgagacgcttcgccttgagtgcgatggacatggaacagaaggattatgacagcaggacagccttgcatgtcgccgcagccgagggtcacatcgaagtcgtgaagttcttgatcgaggcctgtaaagtgaatcccttcgccaaggataggtggggtaacatcccactcgatgatgccgtccagtttaatcatttggaagtcgtaaagctgctgcaagactatcaggatagctatactctctctgagactcaagccgaagctgctgccgaggccctgtcaaaagagaaccttgagagcatggtttag

SEQ ID NO: 175292 - DNA, 534 bp, Artificial Sequence
  derived and/or modified sequence
atgaggtccatgaaagcactacaaaaagccttgtcacgtgctgggtcgcactgcgggagggggggatgggggcatccaagcagatcaccgttactcgggggaggagtgcgccatcatctgtctgaggccgctgcacaggggagagagacaccgcacagtcaccagccacagcatcaggatcatgacagctccgaaagtggcatgttgtcacggcttggggatttactgttctacacaatcgctgaagggcaggaacgcatccccatccacaaatttaccactgcattgaaggcaacgggcctgcaaacgtccgatcctcggctccgcgactgcatgtcagagatgcaccgcgttgttcaggaatcaagttcggggggtctcctggatcgcgaccttttcaggaagtggcaaccaacgtcactgtcttggcctagtcaaactcagacttgtggggtgtccccgtgtgcgctgtggatggtgaatggaaccttatgggccacacaacgaagccctagcgcctgcagccccgtgtag

SEQ ID NO: 175293 - DNA, 1809 bp, Artificial Sequence
  derived and/or modified sequence
atgagaagcatgaaggccctgcagaaggccctgagcagagccggcagccactgcggcagaggcggctggggccaccccagcagaagccccctgctgggcggcggcgtgagacaccacctgagcgaggccgccgcccagggcagagagaccccccacagccaccagccccagcaccaggaccacgacagcagcgagagcggcatgctgagcagactgggcgacctgctgttctacaccatcgccgagggccaggagagaatccccatccacaagttcaccaccgccctgaaggccaccggcctgcagaccagcgaccccagactgagagactgcatgagcgagatgcacagagtggtgcaggagagcagcagcggcggcctgctggacagagacctgttcagaaagtgcgtgagcagcaacatcgtgctgctgacccaggccttcagaaagaagttcgtgatccccgacttcgaggagttcaccggccacgtggacagaatcttcgaggacgtgaaggagctgaccggcggcaaggtggccgcctacatcccccagctggccaagagcaaccccgacctgtggggcgtgagcctgtgcaccgtggacggccagagacacagcgtgggccacaccaagatccccttctgcctgcagagctgcgtgaagcccctgacctacgccatcagcatcagcaccctgggcaccgactacgtgcacaagttcgtgggcaaggagcccagcggcctgagatacaacaagctgagcctgaacgaggagggcatcccccacaaccccatggtgaacgccggcgccatcgtggtgagcagcctgatcaagatggactgcaacaaggccgagaagttcgacttcgtgctgcagtacctgaacaagatggccggcaacgagtacatgggcttcagcaacgccaccttccagagcgagaaggagaccggcgacagaaactacgccatcggctactacctgaaggagaagaagtgcttccccaagggcgtggacatgatggccgccctggacctgtacttccagctgtgcagcgtggaggtgacctgcgagagcggcagcgtgatggccgccaccctggccaacggcggcatctgccccatcaccggcgagagcgtgctgagcgccgaggccgtgagaaacaccctgagcctgatgcacagctgcggcatgtacgacttcagcggccagttcgccttccacgtgggcctgcccgccaagagcgccgtgagcggcgccatcctgctggtggtgcccaacgtgatgggcatgatgtgcctgagcccccccctggacaagctgggcaacagccacagaggcaccagcttctgccagaagctggtgagcctgttcaacttccacaactacgacaacctgagacactgcgccagaaagctggaccccagaagagagggcgccgagatcagaaacaagaccgtggtgaacctgctgttcgccgcctacagcggcgacgtgagcgccctgagaagattcgccctgagcgccatggacatggagcagaaggactacgacagcagaaccgccctgcacgtggccgccgccgagggccacatcgaggtggtgaagttcctgatcgaggcctgcaaggtgaaccccttcgccaaggacagatggggcaacatccccctggacgacgccgtgcagttcaaccacctggaggtggtgaagctgctgcaggactaccaggacagctacaccctgagcgagacccaggccgaggccgccgccgaggccctgagcaaggagaacctggagagcatggtgtag

SEQ ID NO: 175294 - DNA, 534 bp, Artificial Sequence
  derived and/or modified sequence
atgagaagcatgaaggccctgcagaaggccctgagcagagccggcagccactgcggcagaggcggctggggccaccccagcagaagccccctgctgggcggcggcgtgagacaccacctgagcgaggccgccgcccagggcagagagaccccccacagccaccagccccagcaccaggaccacgacagcagcgagagcggcatgctgagcagactgggcgacctgctgttctacaccatcgccgagggccaggagagaatccccatccacaagttcaccaccgccctgaaggccaccggcctgcagaccagcgaccccagactgagagactgcatgagcgagatgcacagagtggtgcaggagagcagcagcggcggcctgctggacagagacctgttcagaaagtggcagcccaccagcctgagctggcccagccagacccagacctgcggcgtgagcccctgcgccctgtggatggtgaacggcaccctgtgggccacccagagaagccccagcgcctgcagccccgtgtag

SEQ ID NO: 175295 - protein, 139 aa, Artificial Sequence
  derived and/or modified sequence
MSSLPVPYKLPVSLSVGSCVIIKGTPIHSFINDPQLQVDFYTDMDEDSDIAFRFRVHFGNHVVMNRREFGIWMLEETTDYVPFEDGKQFELCIYVHYNEYEIKVNGIRIYGFVHRIPPSFVKMVQVSRDISLTSVCVCN

SEQ ID NO: 175296 - DNA, 420 bp, Artificial Sequence
  derived and/or modified sequence
atgtcatctctccccgtgccatacaagctgccagttagcctttcagttggctcctgcgttataataaagggtacaccaattcactccttcatcaacgatccgcagcttcaagtggatttctatactgacatggacgaagattccgatatcgccttccgcttcagagtccattttggaaatcacgtggtgatgaataggagggagttcggcatctggatgttggaggagactacagattacgtgcctttcgaggacggaaagcaatttgagctttgcatctacgtacattacaatgaatacgaaatcaaagtaaatgggattagaatctacgggttcgtccacagaattcctccatcttttgtcaagatggtacaagtttctcgtgatatatccctcacttccgtgtgtgtgtgtaactag

SEQ ID NO: 175297 - DNA, 420 bp, Artificial Sequence
  derived and/or modified sequence
atgagcagcctgcctgtgccctacaagctgcctgtgtccctgtctgtgggcagctgtgtgatcatcaagggcacccccatccacagcttcatcaatgacccccagctgcaggtggacttctacacagacatggatgaggacagcgacatcgccttccgcttccgggtgcacttcggcaaccacgtggtgatgaacagaagagaatttggcatctggatgctggaggagaccacagattatgtgccctttgaagatggcaagcagtttgagctgtgcatctacgtgcactacaatgaatatgagatcaaggtgaatggcatccgcatctacggctttgtgcaccgcatccccccatcctttgtgaagatggtgcaggtgtcccgggacatcagcctgacctctgtgtgtgtgtgcaactag

SEQ ID NO: 175298 - DNA, 599 bp, Artificial Sequence
  derived and/or modified sequence
agaagactggactcaattctgaaggtcgccaagaaggagagaacaatgtcttctttacccgtgccatacaaactgcctgtgtctttgtctgttggttcctgcgtgataatcaaagggacaccaatccactcttttatcaatgacccacagctgcaggtggatttctacactgacatggatgaggattcagatattgccttccgtttccgagtgcactttggcaatcatgtggtcatgaacaggcgtgagtttgggatatggatgttggaggagacaacagactacgtgccctttgaggatggcaaacaatttgagctgtgcatctacgtacattacaatgagtatgagataaaggtcaatggcatacgcatttacggctttgtccatcgaatcccgccatcatttgtgaagatggtgcaagtgtcgagagatatctccctgacctcagtgtgtgtctgcaattgagggagatgatcacactcctcattgttgaggaatccctctttctacctgaccatgggattcccagaacctgctaacagaataatccctgctcacattttcccctacactttgtcattaaaacagcacgaaaactc

SEQ ID NO: 175299 - DNA, 420 bp, Artificial Sequence
  derived and/or modified sequence
atgagcagcctgcccgtgccctacaagctgcccgtgagcctgagcgtgggctcctgcgttataatcaaagggactccgatacactccttcatcaatgacccacagcttcaagtagacttttacacggatatggacgaggactccgacattgctttcaggttcagagtgcactttggcaatcatgttgttatgaataggcgagaattcggaatctggatgctggaggagacaaccgattatgtccccttcgaggatgggaagcaatttgagctgtgcatctatgtccattacaatgagtacgaaatcaaggtgaatggtatacgcatatatgggttcgtgcacagaattccaccctcttttgttaaaatggtccaggtgtctcgggatatttccctcaccagcgtttgtgtctgtaactag

SEQ ID NO: 175300 - DNA, 420 bp, Artificial Sequence
  derived and/or modified sequence
atgagttctcttcctgtcccatataagctgcctgtctctttgagcgtgggatcttgcgtaatcatcaaaggaactccaatccattcatttatcaacgaccctcagctgcaggttgacttttacacagacatggatgaggattcggatattgctttccggtttagagtccattttggaaaccacgttgtcatgaaccgcagagagttcgggatatggatgctggaggaaaccaccgactacgtaccttttgaagacggtaagcagttcgaactgtgtatctacgtccactataacgaatatgagattaaagtgaatggcatccggatctacggctttgtccaccgtatccctccatcattcgttaagatggtgcaagtgagccgagatattagtttaacctctgtctgcgtgtgcaattag

SEQ ID NO: 175301 - DNA, 420 bp, Artificial Sequence
  derived and/or modified sequence
atgagcagcctgcccgtgccctacaagctgcccgtgagcctgagcgtgggcagctgcgtgatcatcaagggcacccccatccacagcttcatcaacgacccccagctgcaggtggacttctacaccgacatggacgaggacagcgacatcgccttcagattcagagtgcacttcggcaaccacgtggtgatgaacagaagagagttcggcatctggatgctggaggagaccaccgactacgtgcccttcgaggacggcaagcagttcgagctgtgcatctacgtgcactacaacgagtacgagatcaaggtgaacggcatcagaatctacggcttcgtgcacagaatcccccccagcttcgtgaagatggtgcaggtgagcagagacatcagcctgaccagcgtgtgcgtgtgcaactag

SEQ ID NO: 175302 - protein, 191 aa, Artificial Sequence
  derived and/or modified sequence
MHDSNNVEKDITPSELPANPGCLHSKEHSIKATLIWRLFFLIMFLTIIVCGMVAALSAIRANCHQEPSVCLQAACPESWIGFQRKCFYFSDDTKNWTSSQRFCDSQDADLAQVESFQELNFLLRYKGPSDHWIGLSREQGQPWKWINGTEWTRQFPILGAGECAYLNDKGASSARHYTERKWICSKSDIHV

SEQ ID NO: 175303 - DNA, 576 bp, Artificial Sequence
  derived and/or modified sequence
atgcacgatagcaacaatgttgaaaaagatattaccccgagcgagctccccgcgaacccaggctgcctccactccaaagaacacagcataaaagccaccctgatttggagactattttttctgattatgtttctaaccataatcgtttgcggcatggtagccgcactctccgctatccgggccaactgtcatcaggagccatctgtctgcctgcaggcagcctgccccgaaagttggatcggctttcagcgaaaatgcttttacttcagtgatgacactaagaattggacgagtagtcaaagattctgcgattcccaggatgccgacctggcccaggttgaatccttccaggagttgaatttcctcctccgctacaagggcccctcagatcactggatcggcctttcccgcgagcagggtcaaccatggaaatggataaatggaaccgaatggactagacagtttcccattctgggggccggggagtgcgcctatctgaatgataaaggagcgtcatcggcgagacactacaccgaacggaaatggatttgctcaaagtccgatattcatgtctag

SEQ ID NO: 175304 - DNA, 576 bp, Artificial Sequence
  derived and/or modified sequence
atgcatgacagcaacaacgtggagaaggacatcacccccagcgagctgcctgccaaccctggctgcctgcacagcaaggagcacagcatcaaggccaccctcatctggaggctcttcttcctgatcatgttcctgaccatcatcgtgtgtggcatggtggccgccctgagcgccatccgggccaactgccaccaggagcccagcgtgtgcctgcaggccgcctgcccagagagctggattggcttccagaggaagtgcttctacttcagtgatgacaccaagaactggaccagcagccagcgcttctgtgacagccaggatgctgacctggcccaggtggagagcttccaggagctgaacttcctgctgcgctacaagggccccagcgaccactggattggcctgagccgggagcagggccagccctggaagtggatcaatggaacagagtggacccggcagttccccatcctgggcgctggggagtgtgcctacctgaatgacaagggggccagcagcgcccggcactacacagagaggaagtggatctgcagcaagagtgacatccacgtgtag

SEQ ID NO: 175305 - DNA, 576 bp, Artificial Sequence
  derived and/or modified sequence
atgcacgacagcaacaacgtggagaaggacatcacccccagcgagctgccagccaaccccggatgcctgcattcgaaagagcattccatcaaggctaccttgatttggcgactgtttttcctgattatgtttctgacaataatagtgtgtggaatggtggctgccttgtcagccatcagggcgaattgtcatcaagaacccagtgtgtgtctgcaggccgcttgtccagaatcgtggatcggattccagcgcaaatgcttctacttctccgacgatacaaaaaactggacaagttcccagcggttttgcgattcgcaggatgctgacctggcgcaggtcgagagctttcaggaattgaattttctactgcgttataaagggccttcagaccattggatcggcctgagtagggagcaaggtcagccctggaaatggatcaacggaacagagtggacgcgtcagttccccattttaggcgcaggtgagtgtgcatatttaaacgataagggggctagttccgcccggcactacactgagcgcaagtggatctgtagcaaatccgatatccacgtttag

SEQ ID NO: 175306 - DNA, 576 bp, Artificial Sequence
  derived and/or modified sequence
atgcatgacagcaacaatgtggagaaggacattactccctcagagttgcctgccaacccaggctgcctgcatagcaaagaacactccatcaaggccaccctaatttggcggctgtttttcctcattatgttcctgacgattatcgtgtgtggaatggtagccgcactcagtgctatcagagcaaactgtcatcaagagccctcagtgtgtttgcaggccgcttgccccgagtcttggatcggtttccagcgaaagtgcttttatttctccgatgatacaaaaaactggacctcttctcaaaggttttgtgactcccaagatgcagatctggctcaggtggaatctttccaggagcttaacttcctattaaggtacaagggcccatcggatcactggattggactgtctcgagaacaaggacagccgtggaaatggatcaatgggaccgaatggacaaggcagtttcctattctgggtgctggagagtgcgcatatctgaatgataagggcgcttccagcgcacggcattatactgaaaggaagtggatctgtagtaagtcggatatacacgtctag

SEQ ID NO: 175307 - DNA, 859 bp, Artificial Sequence
  derived and/or modified sequence
actcatagaaactggaggcaaaatgcatgacagtaacaatgtggagaaagacattacaccatctgaattgcctgcaaacccaggttgtctgcattcaaaagagcattctattaaagctaccttaatttggcgcttatttttcttaatcatgtttctgacaatcatagtgtgtggaatggttgctgctttaagcgcaataagagctaactgccatcaagagccatcagtatgtcttcaagctgcatgcccagaaagctggattggttttcaaagaaagtgtttctatttttctgatgacaccaagaactggacatcaagtcagaggttttgtgactcacaagatgctgatcttgctcaggttgaaagcttccaggaactgaatttcctgttgagatataaaggcccatctgatcactggattgggctgagcagagaacaaggccaaccatggaaatggataaatggtactgaatggacaagacagtttcctatcctgggagcaggagagtgtgcctatttgaatgacaaaggtgccagtagtgccaggcactacacagagaggaagtggatttgttccaaatcagatatacatgtctagatgttacagcaaagccccaactaatctttagaagcatattggaactgataactccattttaaaatgagcaaagaatttatttcttataccaacaggtatatgaaaatatgctcaatatcactaataactgggaaaatacaaatcaaaatcatagtaaaatattacctgttttcatggtgctaatattacctgttctcccactgctaatgacatacccgagactgagtaatttataaataaaagagatttaattgactcata

SEQ ID NO: 175308 - DNA, 576 bp, Artificial Sequence
  derived and/or modified sequence
atgcacgacagcaacaacgtggagaaggacatcacccccagcgagctgcccgccaaccccggctgcctgcacagcaaggagcacagcatcaaggccaccctgatctggagactgttcttcctgatcatgttcctgaccatcatcgtgtgcggcatggtggccgccctgagcgccatcagagccaactgccaccaggagcccagcgtgtgcctgcaggccgcctgccccgagagctggatcggcttccagagaaagtgcttctacttcagcgacgacaccaagaactggaccagcagccagagattctgcgacagccaggacgccgacctggcccaggtggagagcttccaggagctgaacttcctgctgagatacaagggccccagcgaccactggatcggcctgagcagagagcagggccagccctggaagtggatcaacggcaccgagtggaccagacagttccccatcctgggcgccggcgagtgcgcctacctgaacgacaagggcgccagcagcgccagacactacaccgagagaaagtggatctgcagcaagagcgacatccacgtgtag

SEQ ID NO: 175309 - protein, 385 aa, Artificial Sequence
  derived and/or modified sequence
MGRWCQTVARGQRPRTSAPSRAGALLLLLLLLRSAGCWGAGEAPGALSTADPADQSVQCVPKATCPSSRPRLLWQTPTTQTLPSTTMETQFPVSEGKVDPYRSCGFSYEQDPTLRDPEAVARRWPWMVSVRANGTHICAGTIIASQWVLTVAHCLIWRDVIYSVRVGSPWIDQMTQTASDVPVLQVIMHSRYRAQRFWSWVGQANDIGLLKLKQELKYSNYVRPICLPGTDYVLKDHSRCTVTGWGLSKADGMWPQFRTIQEKEVIILNNKECDNFYHNFTKIPTLVQIIKSQMMCAEDTHREKFCYELTGEPLVCSMEGTWYLVGLVSWGAGCQKSEAPPIYLQVSSYQHWIWDCLNGQALALPAPSRTLLLALPLPLSLLAAL

SEQ ID NO: 175310 - protein, 299 aa, Artificial Sequence
  derived and/or modified sequence
METQFPVSEGKVDPYRSCGFSYEQDPTLRDPEAVARRWPWMVSVRANGTHICAGTIIASQWVLTVAHCLIWRDVIYSVRVGSPWIDQMTQTASDVPVLQVIMHSRYRAQRFWSWVGQANDIGLLKLKQELKYSNYVRPICLPGTDYVLKDHSRCTVTGWGLSKADGMWPQFRTIQEKEVIILNNKECDNFYHNFTKIPTLVQIIKSQMMCAEDTHREKFCYELTGEPLVCSMEGTWYLVGLVSWGAGCQKSEAPPIYLQVSSYQHWIWDCLNGQALALPAPSRTLLLALPLPLSLLAAL

SEQ ID NO: 175311 - DNA, 900 bp, Artificial Sequence
  derived and/or modified sequence
atggagacccagttccccgtgagcgagggcaaggtggacccctacagaagctgcggcttcagctacgagcaggaccccaccctgagagaccccgaggccgtggccagaagatggccctggatggtgagcgtgagagccaacggcacccacatctgcgccggcaccatcatcgccagccagtgggtgctgaccgtggcccactgcctgatctggagagacgtgatctacagcgtgagagtgggcagcccctggatcgaccagatgacccagaccgccagcgacgtgcccgtgctgcaggtgatcatgcacagcagatacagagcccagagattctggagctgggtgggccaggccaacgacatcggcctgctgaagctgaagcaggagctgaagtacagcaactacgtgagacccatctgcctgcccggcaccgactacgtgctgaaggaccacagcagatgcaccgtgaccggctggggcctgagcaaggccgacggcatgtggccccagttcagaaccatccaggagaaggaggtgatcatcctgaacaacaaggagtgcgacaacttctaccacaacttcaccaagatccccaccctggtgcagatcatcaagagccagatgatgtgcgccgaggacacccacagagagaagttctgctacgagctgaccggcgagcccctggtgtgcagcatggagggcacctggtacctggtgggcctggtgagctggggcgccggctgccagaagagcgaggccccccccatctacctgcaggtgagcagctaccagcactggatctgggactgcctgaacggccaggccctggccctgcccgcccccagcagaaccctgctgctggccctgcccctgcccctgagcctgctggccgccctgtag

SEQ ID NO: 175312 - DNA, 1158 bp, Artificial Sequence
  derived and/or modified sequence
atggggcggtggtgccagaccgtcgcccggggtcagcggcccaggacttcagcaccgtcccgagctggagccttgctattgctgttgctgctgctacgaagcgcaggttgttggggggctggtgaggcacccggagcgctcagtaccgccgatcctgctgaccagagtgtccaatgcgtgccaaaggccacttgcccgtcctcacgtccgcgcctgctgtggcagacacccactactcaaactctcccctcaacaacaatggaaactcagttccctgtgagcgaaggcaaggtggacccgtataggtcctgcggcttctcttacgagcaggacccaacgctgcgggatcccgaagctgttgcaagaaggtggccctggatggtcagtgtacgcgcaaacggtacccacatttgcgcaggaacaattattgccagccagtgggtgctcactgttgcacactgtctaatctggcgggacgtgatttactccgtcagagtggggagtccgtggattgatcagatgacccaaactgcttcagacgtgcctgtgttgcaggttatcatgcatagccggtatcgagcccaaagattttggagctgggtcggtcaggccaacgacattgggctgctgaaactaaaacaggagctcaaatattccaattatgtgagacctatttgtttgcccggcaccgattacgtgctcaaggatcattctcgatgtactgtaactggctgggggctgtccaaagctgacggcatgtggccacaatttcggacgatacaggagaaggaggttatcattctcaataacaaggagtgtgataatttttaccacaatttcactaaaatcccaacactggtccaaatcatcaagtctcagatgatgtgcgcagaggacacccaccgggaaaaattttgttatgagttgacaggggaaccattagtatgtagcatggagggcacctggtatctagtgggtttagtgagctggggggccggatgccagaaatcggaagccccccctatctatcttcaggtgtccagctatcagcactggatctgggattgtctgaatggccaggccttggctctgccagcccccagcagaaccctgctgctggccttaccactgcctctgagccttttagccgcgctgtag

SEQ ID NO: 175313 - DNA, 900 bp, Artificial Sequence
  derived and/or modified sequence
atggaaacgcagttccctgtgtcagaaggaaaagtcgacccataccggagctgcggtttctcgtacgaacaggacccaactcttcgggaccctgaggcagtggctaggagatggccctggatggtaagcgtgagggccaacggtacccacatttgcgccggcacaattattgcgagccagtgggtgctcacggtcgcacattgcctgatttggcgcgacgtcatttactcggtccgggtgggttctccctggatcgatcagatgacacagaccgcctcagatgtccccgttctgcaagttatcatgcattcccgctacagagctcagaggttttggagctgggtgggacaggcaaatgatatcggcctgctcaaactcaagcaggagcttaagtattcgaactatgtgagaccaatttgtctccccggcaccgactacgtgctcaaagatcacagcagatgcacagttactggatggggcctaagcaaggccgacggcatgtggccccaattccggactattcaagagaaagaagtgattattctgaacaacaaggagtgcgacaatttttatcataatttcaccaagatccccacacttgtgcagatcattaaatcccaaatgatgtgtgccgaggacacacatagggagaagttttgctatgaattaacaggtgagcctttagtgtgttcaatggagggaacttggtacttagtagggctcgtctcttggggagctggctgtcaaaagagcgaggctccaccaatttatcttcaggtgagctcctatcagcattggatttgggactgcctaaacgggcaggcactggccctgcctgcccccagccggaccctgcttcttgcgctgcctctaccacttagcttactcgccgctctatag

SEQ ID NO: 175314 - DNA, 1158 bp, Artificial Sequence
  derived and/or modified sequence
atgggccgatggtgccagaccgtagcccgcgggcagagacctcgaacatcagcaccctcccgagcaggcgctttactgctgttattgctgttgttaaggtccgccggctgctggggcgccggagaagcgccaggtgccttatccactgctgacccagcagaccaatcggtccaatgtgtacctaaagcaacttgcccatccagtagacctcgtctcttatggcaaacccccaccacacaaaccctcccgagcaccaccatggagacgcaatttccagtgagtgagggcaaagtggatccctatcgcagctgcggatttagttacgaacaggatcccacactgagggatcctgaggctgtagcccggcggtggccttggatggtcagcgtgcgtgccaatggaactcacatctgcgcaggtaccatcatcgcctcccagtgggtcctgaccgtggctcactgtctgatttggcgtgatgtcatctatagtgtgagagtgggctctccttggattgaccaaatgacacagactgcgtcagacgtcccagtactccaggtcatcatgcactcccggtacagagctcagcggttttggtcatgggtagggcaggctaacgacataggactgctaaagttgaaacaggaactgaaatatagcaactacgtgcgacctatctgcctgccagggacggactacgtgctgaaggaccattccagatgcactgtgacaggttggggactttcaaaggcagacggaatgtggccacaatttagaactatccaagagaaggaagtgattatattgaataataaggaatgcgacaacttctaccacaacttcacaaagatccctacacttgtgcagatcattaagagccagatgatgtgtgccgaggacacccaccgggagaagttctgttacgagctcactggggagccactggtttgctcaatggagggtacatggtacctcgtggggctggtgagctggggcgctggttgccaaaaatcagaagctccccccatttacctgcaggtctcaagctaccagcattggatctgggactgcttaaacggacaggcccttgcccttcccgcgccctcgagaaccctactgctggccctcccactgccactctcactcctggccgctctatag

SEQ ID NO: 175315 - DNA, 1158 bp, Artificial Sequence
  derived and/or modified sequence
atgggccgctggtgccagacagtggcccggggccagaggcccaggaccagcgcccccagccgggccggggccctgctgctgctgctgctgctgctgcggtctgctggctgctggggcgctggggaggcccctggggccctgagcacagctgaccctgctgaccagagcgtgcagtgtgtgcccaaggccacctgccccagcagccggccccggctgctgtggcagacccccaccacccagaccctgcccagcaccaccatggagacccagtttcctgtgtctgagggcaaggtggacccctaccgcagctgtggcttctcctatgagcaggaccccaccctgcgggaccctgaggccgtggcccggcgctggccctggatggtgtctgtgcgggccaacggcacccacatctgtgccggcaccatcatcgccagccagtgggtgctgactgtggcccactgcctgatctggagagatgtgatctacagcgtgcgggtgggcagcccctggattgaccagatgacccagacagccagtgatgtgcctgtgctgcaggtgatcatgcacagccgctaccgggcccagcgcttctggagctgggtgggccaggccaatgacatcggcctgctgaagctgaagcaggagctgaagtacagcaactacgtgcggcccatctgcctgcccggcacagattatgtgctgaaggaccacagccgctgcaccgtgacaggctggggcctgagcaaggcagatggcatgtggccccagttccgcaccatccaggagaaggaggtgatcatcctgaacaacaaggaatgtgacaacttctaccacaacttcaccaagatccccaccctggtgcagatcatcaagagccagatgatgtgtgccgaggacacccaccgggagaagttctgctatgagctgaccggggagcccctggtgtgcagcatggagggcacctggtacctggtgggcctggtgtcctggggcgccggctgccagaagtctgaggccccacccatctacctgcaggtgagcagctaccagcactggatctgggactgcctgaatggccaggccctggccctgcctgcccccagcaggaccctgctgctggccctgcccctgcccctgagcctgctggccgccctgtag

SEQ ID NO: 175316 - DNA, 900 bp, Artificial Sequence
  derived and/or modified sequence
atggagacccagtttcctgtgtctgagggcaaggtggacccctaccgcagctgtggcttctcctatgagcaggaccccaccctgcgggaccctgaggccgtggcccggcgctggccctggatggtgtctgtgcgggccaacggcacccacatctgtgccggcaccatcatcgccagccagtgggtgctgactgtggcccactgcctgatctggagagatgtgatctacagcgtgcgggtgggcagcccctggattgaccagatgacccagacagccagtgatgtgcctgtgctgcaggtgatcatgcacagccgctaccgggcccagcgcttctggagctgggtgggccaggccaatgacatcggcctgctgaagctgaagcaggagctgaagtacagcaactacgtgcggcccatctgcctgcccggcacagattatgtgctgaaggaccacagccgctgcaccgtgacaggctggggcctgagcaaggcagatggcatgtggccccagttccgcaccatccaggagaaggaggtgatcatcctgaacaacaaggaatgtgacaacttctaccacaacttcaccaagatccccaccctggtgcagatcatcaagagccagatgatgtgtgccgaggacacccaccgggagaagttctgctatgagctgaccggggagcccctggtgtgcagcatggagggcacctggtacctggtgggcctggtgtcctggggcgccggctgccagaagtctgaggccccacccatctacctgcaggtgagcagctaccagcactggatctgggactgcctgaatggccaggccctggccctgcctgcccccagcaggaccctgctgctggccctgcccctgcccctgagcctgctggccgccctgtag

SEQ ID NO: 175317 - DNA, 1158 bp, Artificial Sequence
  derived and/or modified sequence
atgggccggtggtgccagaccgtggcccggggccagcggccccggacctctgccccttcccgcgcaggagctctcctattgctgctcctgttgctcaggagcgctggatgctggggagcaggggaggcccctggcgctctaagtactgccgatccagccgaccaaagtgtacagtgcgtgcctaaagcaacctgcccttcctctcgaccacggctgttgtggcagacaccaacaacacaaactcttccatccaccactatggagactcaatttcccgtgtccgaaggcaaagtcgatccttatcgctcttgcgggtttagctacgaacaggatccaacccttcgggatccagaagcggtggcccgtcggtggccttggatggtcagcgtgcgagcaaacgggacccacatttgtgcaggcacaattattgcgtcacagtgggtgctgactgtggcccactgcctgatttggcgagatgtgatttactcggtgcgcgtgggatctccctggatcgaccagatgactcaaactgcctctgacgtgcccgtcttgcaggttattatgcattcaaggtaccgggcccagaggttttggtcttgggttggacaggctaacgacatcggtctcctcaagctcaagcaggaactgaaatattctaactacgttagacctatctgcttgcctggtaccgactacgtactcaaagatcactcacgatgcactgttacgggctggggattaagcaaggcggacgggatgtggcctcagttcaggaccatccaagagaaagaggtcatcattttgaataataaggaatgcgataacttctaccataactttacaaagatccctacgttagtgcagatcataaagtcacaaatgatgtgcgccgaagatacccatagggagaaattttgctatgagttgacaggcgagcctctggtgtgctctatggaggggacatggtacttggttggtctggtgtcttggggggccgggtgccagaagtccgaagctccaccaatatatctgcaagtctcctcatatcagcactggatctgggattgcctgaacggacaggcactcgcactgcctgccccatcacgcactctgttactggcactgcctctccctttgagcctgctggccgcattgtag

SEQ ID NO: 175318 - DNA, 900 bp, Artificial Sequence
  derived and/or modified sequence
atggagacccagttccccgtgagcgagggcaaggtggacccctaccgatcttgtggattcagctacgagcaggacccgaccttgcgcgatcctgaggccgtggccagacgctggccttggatggtgtcagtaagagcaaacgggacccatatttgtgccggcaccattatcgcttcacagtgggtgctcaccgtagcgcactgcttgatttggcgcgatgtgatctatagtgtcagagtgggctccccatggatcgaccagatgacgcaaaccgcatccgacgtacccgtcctgcaagtgattatgcactcacgctatagagcccagcggttctggtcttgggtaggacaggccaatgacatcggtctattgaaactcaagcaggaacttaagtattccaactacgtgaggccaatctgcctgccaggcactgattatgtgctgaaggaccacagcagatgcacagttactggatggggactgagcaaggctgacggtatgtggccccagttcagaacaatccaagagaaagaggttatcattctgaataataaagaatgtgataacttttaccataactttacaaaaattcccaccttagttcagataataaaaagccagatgatgtgtgctgaagacactcatcgagagaaattttgctacgagctgacgggggaacctttagtttgttccatggagggcacttggtacctcgttggactggtgtcgtggggtgctgggtgccagaagtctgaggcgcctcctatttacctacaagtgtcatcttaccagcattggatttgggattgcctgaatggccaggcactcgcccttcccgccccctccagaaccctgctccttgcgctacccttacccttatctctgctggccgccctttag

SEQ ID NO: 175319 - DNA, 1158 bp, Artificial Sequence
  derived and/or modified sequence
atgggccggtggtgccagaccgtggcccggggccagcggccccggacctctgccccaagtagagccggggccctgttgctgcttctgctgctgctgagaagcgccggttgttggggtgcaggcgaggctcctggcgccctgagtactgccgatccggcagatcaatccgtacagtgtgtgccgaaggcaacctgcccaagctcgcgcccacgcctgctgtggcagactcccacaacacagaccttgccatcaactacgatggaaacccagtttccggttagcgagggcaaggtggacccataccggagctgtggcttttcctatgagcaggacccgacgctccgggacccagaagctgtggctcgcaggtggccatggatggtcagcgtgcgggccaatggaacgcatatttgcgccggaacaatcatagcgagccagtgggtgcttacagtggcccattgtttaatctggcgtgacgtgatttatagcgtccgcgtgggatcaccctggatcgaccaaatgactcagactgccagcgatgtgcctgtgctgcaagtcatcatgcactcacggtatagagcacagcgcttttggagctgggtgggtcaggccaatgatatcggcttgctgaaactaaagcaagagctgaaatacagcaactatgtgcgaccaatctgcctcccaggtaccgattatgttctgaaggatcactctcgctgcaccgtcaccggatggggcctttctaaggccgacggcatgtggcctcagttccgaacaatccaagaaaaagaggtaatcatcctaaacaataaggagtgcgacaacttctatcacaactttacaaaaatccctaccctggtacagataatcaaaagtcagatgatgtgcgcagaggacacacaccgcgaaaaattttgttacgagctgactggtgagccactcgtgtgctccatggaagggacatggtatctggtcgggctggtcagttggggggcggggtgccagaaatcagaggcccctcctatatacttgcaggtcagctcatatcaacattggatttgggattgcctgaacgggcaagcgctggctctgcctgcaccttcaagaacccttctgttagcgctacccttgccactgtcactcctggcagcactctag

SEQ ID NO: 175320 - DNA, 1158 bp, Artificial Sequence
  derived and/or modified sequence
atgggccgttggtgccagacggtcgctagaggtcagcggccacggacaagcgccccatcccgtgccggagctctgctattgctcctcctcctgctcaggtcagccggttgctggggagccggagaggcccctggcgcactctcgaccgccgaccccgcagaccagagtgtccagtgcgtacccaaagctacatgcccgtcttcgaggccacggctcctgtggcagaccccaactacccagactctgcctagcactactatggaaacccagtttccagttagcgagggcaaggtggacccctaccgatcatgtggattctcatatgaacaggacccaacactccgggacccagaagcggtcgctagaagatggccttggatggtttctgttcgagctaacggaacacacatttgcgcgggtactatcattgcttcccagtgggttctcaccgtcgcccactgtctgatctggagagacgtgatttactctgtcagggtcggctctccttggatcgatcagatgacacagactgcatctgacgtccccgtgctccaggtgatcatgcatagtcgatacagagcccagcgtttctggtcctgggttggccaggccaacgacatcgggctactgaagttaaaacaggaattgaaatattctaactacgttagaccaatctgtctacctggaacagactacgtcctgaaggaccattctagatgcactgtcaccgggtggggcttaagcaaggctgatgggatgtggccgcaatttagaacgatccaagaaaaggaagtgattatcctgaataacaaagaatgcgacaatttttatcataacttcaccaagattcccacactggtccagatcataaagagtcaaatgatgtgcgcggaagacactcacagagagaagttctgttacgaattgacaggggagcctctcgtctgctcaatggaaggcacctggtacctagtgggcctggtgagctggggagccggatgccagaaaagtgaagctcctcccatatatcttcaggtgagttcttaccaacattggatttgggattgcctgaacggacaggcactggcacttccagctcctagccgcaccctgctgctggccctgccgttgcccttgtcgctcctcgccgctctgtag

SEQ ID NO: 175321 - DNA, 900 bp, Artificial Sequence
  derived and/or modified sequence
atggagacccagttccccgtgagtgagggaaaagttgatccttacaggtcctgcggattctcatatgagcaagatcccacccttcgcgaccctgaggccgtagcaagaaggtggccttggatggtgtctgtgagggcaaatggcactcatatctgcgccggaaccatcatcgccagccaatgggtgttaactgtggctcactgtctgatttggcgggacgtgatctactcggttcgcgtggggtccccttggatagaccagatgactcaaacagcttcagacgtcccggtgctacaagttattatgcactcaaggtatcgtgcacagcgcttctggtcttgggtggggcaggcaaatgacataggattactcaaacttaagcaggagcttaagtacagcaactatgtcagacctatttgtctgcccggaactgattacgtgttgaaagaccatagccgctgcacggttacgggatgggggctgagtaaagccgacgggatgtggccacagtttcgcacaatacaggagaaagaagtgatcattctgaacaataaggagtgtgacaatttttaccacaactttacaaagatcccaaccctggtccaaataattaagtcccagatgatgtgtgccgaggatactcacagagagaagttctgttatgagctgaccggggagcccttagtgtgtagtatggaaggcacttggtatcttgtggggctggtcagctggggcgcaggatgtcaaaagagtgaagctccacctatatatctgcaggtgtcaagctatcagcactggatttgggactgcttaaacggccaggccctcgcgctcccagcgccttccagaaccctgctgctggccttacctctgccactctcacttctggctgctctctag

SEQ ID NO: 175322 - DNA, 1158 bp, Artificial Sequence
  derived and/or modified sequence
atgggacgctggtgtcagactgtagcccgtgggcaaaggcctcgtactagtgctccttcacgggctggagccctgctgctgctgctgcttctcttacggtcagctggttgctggggggctggcgaagcgcctggtgctttgagcactgccgatcctgcagaccagtcggttcagtgcgtgcctaaagccacttgtcctagttctcggcctcgcctgctgtggcagacaccgaccactcagactctcccttcgactactatggaaacccagtttccagtctcagaagggaaagtggacccatatcgcagttgtggattcagctacgaacaggatcctaccctgcgggacccagaagctgtggccagaagatggccgtggatggtttctgtccgcgctaatggtacccatatctgtgcgggaacgatcattgcctctcagtgggtgctgacggttgcacactgtctcatttggagagatgtgatatactccgtccgggtcggatctccctggatagaccaaatgacccagaccgcgtcagatgtcccggtactgcaggtgataatgcatagtaggtatcgggctcaaaggttctggtcttgggtaggacaggctaacgatattggcctgctaaagctcaaacaagagttaaagtatagtaactacgtacggccaatatgtcttcctggcacggattacgtgctaaaagaccattctcgatgcaccgtcactggctggggcttgtccaaggctgatggtatgtggccacaatttcgcacaattcaagagaaagaggttatcatcctgaacaataaggaatgcgacaacttctaccacaactttacaaagattcctacattggtgcagattatcaagtctcaaatgatgtgcgcagaggacacccaccgtgaaaaattctgttacgaactgaccggtgaaccgttagtttgctctatggaaggcacctggtatctggttggcttggtgtcatggggcgctggctgtcagaaatccgaggcacctcccatctatttgcaggtgtctagctaccaacactggatctgggattgcctaaacggccaagctctagctttgcctgctcctagcaggaccctgttgcttgccttgcccctgcccttgagcctgctcgccgcactttag

SEQ ID NO: 175323 - DNA, 1804 bp, Artificial Sequence
  derived and/or modified sequence
atccgttagaaggagcattgaggagtagatacccacttgccatggcctgtgggccgggggatcttcaaagccttacatctccgctttcctctgccagattagattatcagccgtctattgaagggccctggctccgggcctgcggtcagaccaacgtgtcctgcagggtggtgaaggggaagctggtagaggtaggcaagtggccatggcagagattcaaggacctcagcctgtactccgtgatggtgggagtccaccagcgcccagaaaatagcactcagctcccgctcactcgcatggtgattcataaggatttcagcaatctcatgtctcaggacattgccctcctaaagctcagggactccatctcgtggtcccccttcgtccagcctgtctgcctccctaacatcaaattcaagccatccattggaagcatgtgctgggtaatcggctggggaactacagggaaaaaaggttgactctggaagctcccttgtctgccaaatggacaagacctggattcagataggagtggtaagctggagctttagttgtggccagcgccacttcccagttccttgggcaaagccccactggaggggctggagggaaagtagggtcacttggagatcctggatgccagcccctgaggtttggtcttcatctcactgcgggaggggtgacaccatgagccagtccagggcaatgggctgcgaggccggcctcgccttctctggcagaccccgaccacccagacactgccctcgaccaccatggagacccaattcccagtttctgaaggcaaagtcgacccataccgctcctgtggcttttcctacgagcaggaccccaccctcagggacccagaagccgtggctcggcggtggccctggatggtcagcgtgcgggccaatggcacacacatctgtgccggcaccatcattgcctcccagtgggtgctgactgtggcccactgcctgatctggcgtgatgttatctactcagtgagggtggggagtccgtggattgaccagatgacgcagaccgcctccgatgtcccggtgctccaggtcatcatgcatagcaggtaccgggcccagcggttctggtcctgggtgggccaggccaacgacatcggcctcctcaagctcaagcaggaactcaagtacagcaattacgtgcggcccatctgcctgcctggcacggactatgtgttgaaggaccattcccgctgcactgtgacgggctggggactttccaaggctgacggcatgtggcctcagttccggaccattcaggagaaggaagtcatcatcctgaacaacaaagagtgtgacaatttctaccacaacttcaccaaaatccccactctggttcagatcatcaagtcccagatgatgtgtgcggaggacacccacagggagaagttctgctatgagctaactggagagcccttggtctgctccatggagggcacgtggtacctggtgggattggtgagctggggtgcaggctgccagaagagcgaggccccacccatctacctacaggtctcctcctaccaacactggatctgggactgcctcaacgggcaggccctggccctgccagccccatccaggaccctgctcctggcactcccactgcccctcagcctccttgctgccctctgactctgtgtgccctccctcacttgtgggccccccttgcctccgtgcccaggttgctgtgggtgcagctgtcacagccctgagagtcagggtggagatgaggtgctcaattaaacattactgttttccatgcc

SEQ ID NO: 175324 - DNA, 2958 bp, Artificial Sequence
  derived and/or modified sequence
gctccaagttgccgccagaacccatggccggcgtggaaaccgctgcgaggcggcgccacgacggaggctgaggtcgccggcagtatccatggcgtcccagagcggcagctccctggggctcctggcctggttcttgcttcttcagccatggctcgaagaggcccgggcaggcagggtgggtgcgcagggaggcgtagcactgctcttcccctccgcgctcccctcagggccaggcggccaggaccccggagcgagcggatgggagccgccacctgtaggggctccaggatccccagcggccccccagtccagggggaacgcagtgcgccccgcttcggtgttacttccctcaggtgagccataccgacccgaggaggattccagaatgaccccggcaagcccagaagcccggacgtctcctgtgcacccgaaattccccaaaattccagaaacttctgtagctccagggtctccagcgaccgcagggcctccaggatcctgggttacttcagcatctacagtgggagaagccttggaatccgacggaatctctgaccttggaaggcagttttctcagggtattgtttctggtgctagatctgtcctggcctgcggggtaggtcaaaggggacacagcctggctcagggaggttgagggtcagaccctgacctagatgatttgagagagaggatagataacccgcctccgccctgggcagcctggtggggtggtgggaaggtagtggcttcacttccagtcccctctctttactgagcccaccagcctgtggccaccgtgtttcaaggatgattggaggattgccagccccaaacaagaagtggccctggcaggtgagcctgcagaccagcaacatacaccactgcggaggctccctcatcgacaggcgctgggtgctcactgccgcccactgtgtctttagtttcaggaccaatgccacttgttcttcaggagactgagctaaacattatgcgtcatgagaaatgttgtgagatgctcaagaacaagaatatatccaagagtaaaatggtcacgagggggaccgtctgtggctataatgaccaagggaaggatgcctgtcaggttataaagaggacacaaccaatccaggttgactctggaagctcccttgtctgccaaatggacaagacctggattcagataggagtgttccttgggcaaagccccactggaggggctggagggaaagtagggtcacttggagatcctggatgccagcccctgaggtttggtcttcatctcactgcgggaggggtgacaccatgagccagtccagggcaatgggctgcgagggtgaggaggtctgagaatcggccgagattaagttgagggactccaggagactgcttggaccagcggagtgaggagagggaggggccaaggagggaagtcagccggggcgtacccagcccgggaggtataagggagggctgtcactaggggcgcccttgcgggtcagacaccacgagcgccgtggcgggtggcccctggggggcgccacgcaggcggggcactaggagcatccccacccagctcaccagaggccgcggcatgcggccaacagggggcgccgtcgtgggggcggcactgggagcgccttccggagagacgcagtcggctgccaccccgggatgggtcgctggtgccagaccgtcgcgcgcgggcagcgcccccggacgtctgccccctcccgcgccggtgccctgctgctgctgcttctgttgctgaggtctgcaggttgctggggcgcaggggaagccccgggggcgctgtccactgctgatcccgccgaccagagcgtccagtgtgtccccaaggccacctgtccttccagccggcctcgccttctctggcagaccccgaccacccagacactgccctcgaccaccatggagacccaattcccagtttctgaaggcaaagtcgacccataccgctcctgtggcttttcctacgagcaggaccccaccctcagggacccagaagccgtggctcggcggtggccctggatggtcagcgtgcgggccaatggcacacacatctgtgccggcaccatcattgcctcccagtgggtgctgactgtggcccactgcctgatctggcgtgatgttatctactcagtgagggtggggagtccgtggattgaccagatgacgcagaccgcctccgatgtcccggtgctccaggtcatcatgcatagcaggtaccgggcccagcggttctggtcctgggtgggccaggccaacgacatcggcctcctcaagctcaagcaggaactcaagtacagcaattacgtgcggcccatctgcctgcctggcacggactatgtgttgaaggaccattcccgctgcactgtgacgggctggggactttccaaggctgacggcatgtggcctcagttccggaccattcaggagaaggaagtcatcatcctgaacaacaaagagtgtgacaatttctaccacaacttcaccaaaatccccactctggttcagatcatcaagtcccagatgatgtgtgcggaggacacccacagggagaagttctgctatgagctaactggagagcccttggtctgctccatggagggcacgtggtacctggtgggattggtgagctggggtgcaggctgccagaagagcgaggccccacccatctacctacaggtctcctcctaccaacactggatctgggactgcctcaacgggcaggccctggccctgccagccccatccaggaccctgctcctggcactcccactgcccctcagcctccttgctgccctctgactctgtgtgccctccctcacttgtgggccccccttgcctccgtgcccaggttgctgtgggtgcagctgtcacagccctgagagtcagggtggagatgaggtgctcaattaaacattactgttttccatg

SEQ ID NO: 175325 - DNA, 1364 bp, Artificial Sequence
  derived and/or modified sequence
ggccaacagggggcgccgtcgtgggggcggcactgggagcgccttccggagagacgcagtcggctgccaccccgggatgggtcgctggtgccagaccgtcgcgcgcgggcagcgcccccggacgtctgccccctcccgcgccggtgccctgctgctgctgcttctgttgctgaggtctgcaggttgctggggcgcaggggaagccccgggggcgctgtccactgctgatcccgccgaccagagcgtccagtgtgtccccaaggccacctgtccttccagccggcctcgccttctctggcagaccccgaccacccagacactgccctcgaccaccatggagacccaattcccagtttctgaaggcaaagtcgacccataccgctcctgtggcttttcctacgagcaggaccccaccctcagggacccagaagccgtggctcggcggtggccctggatggtcagcgtgcgggccaatggcacacacatctgtgccggcaccatcattgcctcccagtgggtgctgactgtggcccactgcctgatctggcgtgatgttatctactcagtgagggtggggagtccgtggattgaccagatgacgcagaccgcctccgatgtcccggtgctccaggtcatcatgcatagcaggtaccgggcccagcggttctggtcctgggtgggccaggccaacgacatcggcctcctcaagctcaagcaggaactcaagtacagcaattacgtgcggcccatctgcctgcctggcacggactatgtgttgaaggaccattcccgctgcactgtgacgggctggggactttccaaggctgacggcatgtggcctcagttccggaccattcaggagaaggaagtcatcatcctgaacaacaaagagtgtgacaatttctaccacaacttcaccaaaatccccactctggttcagatcatcaagtcccagatgatgtgtgcggaggacacccacagggagaagttctgctatgagctaactggagagcccttggtctgctccatggagggcacgtggtacctggtgggattggtgagctggggtgcaggctgccagaagagcgaggccccacccatctacctacaggtctcctcctaccaacactggatctgggactgcctcaacgggcaggccctggccctgccagccccatccaggaccctgctcctggcactcccactgcccctcagcctccttgctgccctctgactctgtgtgccctccctcacttgtgggccccccttgcctccgtgcccaggttgctgtgggtgcagctgtcacagccctgagagtcagggtggagatgaggtgctcaattaaacattactgttttccatgc

SEQ ID NO: 175326 - DNA, 1158 bp, Artificial Sequence
  derived and/or modified sequence
atgggcagatggtgccagaccgtggccagaggccagagacccagaaccagcgcccccagcagagccggcgccctgctgctgctgctgctgctgctgagaagcgccggctgctggggcgccggcgaggcccccggcgccctgagcaccgccgaccccgccgaccagagcgtgcagtgcgtgcccaaggccacctgccccagcagcagacccagactgctgtggcagacccccaccacccagaccctgcccagcaccaccatggagacccagttccccgtgagcgagggcaaggtggacccctacagaagctgcggcttcagctacgagcaggaccccaccctgagagaccccgaggccgtggccagaagatggccctggatggtgagcgtgagagccaacggcacccacatctgcgccggcaccatcatcgccagccagtgggtgctgaccgtggcccactgcctgatctggagagacgtgatctacagcgtgagagtgggcagcccctggatcgaccagatgacccagaccgccagcgacgtgcccgtgctgcaggtgatcatgcacagcagatacagagcccagagattctggagctgggtgggccaggccaacgacatcggcctgctgaagctgaagcaggagctgaagtacagcaactacgtgagacccatctgcctgcccggcaccgactacgtgctgaaggaccacagcagatgcaccgtgaccggctggggcctgagcaaggccgacggcatgtggccccagttcagaaccatccaggagaaggaggtgatcatcctgaacaacaaggagtgcgacaacttctaccacaacttcaccaagatccccaccctggtgcagatcatcaagagccagatgatgtgcgccgaggacacccacagagagaagttctgctacgagctgaccggcgagcccctggtgtgcagcatggagggcacctggtacctggtgggcctggtgagctggggcgccggctgccagaagagcgaggccccccccatctacctgcaggtgagcagctaccagcactggatctgggactgcctgaacggccaggccctggccctgcccgcccccagcagaaccctgctgctggccctgcccctgcccctgagcctgctggccgccctgtag

SEQ ID NO: 175327 - protein, 260 aa, Artificial Sequence
  derived and/or modified sequence
MAGSPLLWGPRAGGVGLLVLLLLGLFRPPPALCARPVKEPRGLSAASPPLAETGAPRRFRRSVPRGEAAGAVQELARALAHLLEAERQERARAEAQEAEDQQARVLAQLLRVWGAPRNSDPALGLDDDPDAPAAQLARALLRARLDPAALAAQLVPAPVPAAALRPRPPVYDDGPAGPDAEEAGDETPDVDPELLRYLLGRILAGSADSEGVAAPRRLRRAADHDVGSELPPEGVLGALLRVKRLETPAPQVPARRLLPP

SEQ ID NO: 175328 - DNA, 783 bp, Artificial Sequence
  derived and/or modified sequence
atggccgggagcccactattatggggcccgcgggcaggtggagtggggctgctcgtcttgctcctgctcgggctgttcaggcccccccctgccctgtgcgcaaggcccgttaaagaacctagagggctttccgccgccagccccccactggcagaaaccggcgcacctcgcagattcaggaggtcagtcccacgcggtgaagctgcaggagcggtgcaggaactcgctagagccttagcccatttgctcgaggctgaacggcaggagcgcgctcgggccgaggctcaggaggcagaagaccagcaggctagggtgctggcacagttgttaagggtgtggggggcgccaaggaattctgaccccgctctcggattggatgacgaccctgacgcgcctgccgctcaactagcgagagccttgctaagagcacggctggaccctgccgccctcgcagcacagcttgttcctgccccggtacccgctgccgcactacgtccgcgccccccagtctacgatgacggcccagctggcccggatgctgaagaagccggagatgaaacacccgatgtggatcctgaactgctgaggtatctcctcggccgtatcctggcgggcagcgcggattctgaaggtgtcgcagcaccaagaagattacgccgagctgccgatcacgatgtgggttccgaactgcctcccgaaggggttctcggggctctacttagagttaagcggctggagacgcctgcaccccaggtgcccgcgagaagattgttgcctccctag

SEQ ID NO: 175329 - DNA, 783 bp, Artificial Sequence
  derived and/or modified sequence
atggccggcagccccctgctgtggggcccccgggccggcggcgtgggcctgctggtgctgctgctgctgggcctcttccggcccccaccagccctgtgtgcccggcctgtgaaggagccccggggcctgtctgctgccagcccccccctggccgagactggagccccccggcgcttccgccgctctgtgcccagaggagaggccgccggggctgtgcaggagctggcccgggccctggcccacctgctggaggccgagcggcaggagcgggcccgggcagaggcccaggaggccgaggaccagcaggcccgggtgctggcccagctgctgcgggtgtggggcgcccccaggaacagcgaccctgccctgggcctggatgatgatcctgatgccccagctgcccagctggcccgggccctgctgcgggcccggctggaccctgctgccctggccgcccagctggtgcctgcccctgtgcctgctgctgccctgcggccccggccccctgtgtatgatgatggccctgctggcccagatgctgaggaggccggagatgagaccccagatgtggaccctgagctgctgcgctacctgctgggccgcatcctggccggcagcgctgacagcgagggcgtggccgccccccggcggctgcggcgggctgctgaccatgatgtgggcagcgagctgcccccagagggcgtgctgggcgccctgctgcgggtgaagaggctggagaccccagccccccaggtgcctgcccggcggctgctgcccccatag

SEQ ID NO: 175330 - DNA, 783 bp, Artificial Sequence
  derived and/or modified sequence
atggccggcagccccctgctgtggggcccccgggccggcggcgtgggattactggtactcctgctgttgggactgtttcgacccccgccagccctgtgtgccaggccagtaaaagagccccgaggacttagcgccgcatcccctcctctggccgaaacaggggcccctcgaagattccgccggtccgtgcctcgcggcgaagccgccggcgccgttcaggagctggcacgcgccttagctcatttactggaagctgagcgtcaggaacgggctcgagcagaagcgcaagaagccgaagaccagcaagctcgggttctggcccagctcctgcgcgtctggggcgctcctagaaacagtgaccctgcgctcgggttagacgatgatccagatgctcccgccgctcagctcgctcgcgcccttctgcgcgccaggctggatccagctgcacttgccgcgcagctcgtaccggccccagtgcctgcagccgctctacggccaagacctccagtgtatgacgatggtcccgccgggcctgacgctgaggaagctggcgacgaaactccggacgtcgacccagagctactgcgttatctgctgggccgcatcttggccggttctgcggatagcgagggagttgccgctcccagacgactgcggagggcagccgaccacgatgtaggatctgaactgcctccagaaggcgttctcggcgctttactaagggttaagcggctggagacaccagccccacaagtgcctgcccgacgactgctgccaccttag

SEQ ID NO: 175331 - DNA, 783 bp, Artificial Sequence
  derived and/or modified sequence
atggctggcagccctctgctctggggacctagggcaggcggtgtcggcctgcttgtcctcctgctgttaggattgtttcggcctccccctgccctttgtgcccgtccagtgaaggaacccagagggctgtccgcagccagccctcccttggctgagacaggagccccacggaggtttcgcaggagtgtgcccaggggagaggccgcaggggctgtgcaagagttggcacgagcccttgctcacctcctcgaggctgagaggcaggagagagcgagagcggaagcccaggaagccgaggaccagcaggctcgagttctagcacaactgctccgggtgtggggagcgccacgtaatagtgacccggctctggggctcgacgacgacccggatgcaccagcagctcaactggcaagagcgcttttgcgcgctcgcctggatccagctgctctggccgcacagctagtgccggctcctgtccctgccgcagctctgaggccaagacccccagtgtacgacgatggacctgccggaccggacgccgaggaggccggtgatgaaacacctgatgtcgatccagaactgttgcgttatctcctgggtcggatcttggccggttcagcagatagcgaaggggtggcagcccctagacgattaaggagagccgctgatcacgatgtgggatctgagcttcctcccgaaggggtactgggtgccctcctccgggttaagcgcctcgagactccagctcctcaggtgcccgctcggagactgctgcctccctag

SEQ ID NO: 175332 - DNA, 1050 bp, Artificial Sequence
  derived and/or modified sequence
ggcgtgcgcagccgcagagcgccgcagcctcgccagctcgccccggcactgcgcacttgccagccagtccgcccgtccggagcccggctcgctggggcagcatggcggggtcgccgctgctctgggggccgcgggccgggggcgtcggccttttggtgctgctgctgctcggcctgtttcggccgccccccgcgctctgcgcgcggccggtaaaggagccccgcggcctaagcgcagcgtctccgcccttggctgagactggcgctcctcgccgcttccggcggtcagtgccccgaggtgaggcggcgggggcggtgcaggagctggcgcgggcgctggcgcatctgctggaggccgaacgtcaggagcgggcgcgggccgaggcgcaggaggctgaggatcagcaggcgcgcgtcctggcgcagctgctgcgcgtctggggcgccccccgcaactctgatccggctctgggcctggacgacgaccccgacgcgcctgcagcgcagctcgctcgcgctctgctccgcgcccgccttgaccctgccgccctcgcagcccagcttgtccccgcgcccgtccccgccgcggcgctccgaccccggcccccggtctacgacgacggccccgcgggcccggatgctgaggaggcaggcgacgagacacccgacgtggaccccgagctgttgaggtacttgctgggacggattcttgcgggaagcgcggactccgagggggtggcagccccgcgccgcctccgccgtgccgccgaccacgatgtgggctctgagctgccccctgagggcgtgctgggggcgctgctgcgtgtgaaacgcctagagaccccggcgccccaggtgcctgcacgccgcctcttgccaccctgagcactgcccggatcccgtgcaccctgggacccagaagtgcccccgccatcccgccaccaggactgctccccgccagcacgtccagagcaacttaccccggccagccagccctctcacccgaggatccctaccccctggccccacaataaacatgatctgaagcagc

SEQ ID NO: 175333 - DNA, 783 bp, Artificial Sequence
  derived and/or modified sequence
atggccggcagccccctgctgtggggccccagagccggcggcgtgggcctgctggtgctgctgctgctgggcctgttcagacccccccccgccctgtgcgccagacccgtgaaggagcccagaggcctgagcgccgccagcccccccctggccgagaccggcgcccccagaagattcagaagaagcgtgcccagaggcgaggccgccggcgccgtgcaggagctggccagagccctggcccacctgctggaggccgagagacaggagagagccagagccgaggcccaggaggccgaggaccagcaggccagagtgctggcccagctgctgagagtgtggggcgcccccagaaacagcgaccccgccctgggcctggacgacgaccccgacgcccccgccgcccagctggccagagccctgctgagagccagactggaccccgccgccctggccgcccagctggtgcccgcccccgtgcccgccgccgccctgagacccagaccccccgtgtacgacgacggccccgccggccccgacgccgaggaggccggcgacgagacccccgacgtggaccccgagctgctgagatacctgctgggcagaatcctggccggcagcgccgacagcgagggcgtggccgcccccagaagactgagaagagccgccgaccacgacgtgggcagcgagctgccccccgagggcgtgctgggcgccctgctgagagtgaagagactggagacccccgccccccaggtgcccgccagaagactgctgcccccctag

SEQ ID NO: 175334 - protein, 710 aa, Artificial Sequence
  derived and/or modified sequence
MQGKKPGGSSGGGRSGELQGDEAQRNKKKKKKVSCFSNIKIFLVSECALMLAQGTVGAYLVSVLTTLERRFNLQSADVGVIASSFEIGNLALILFVSYFGARGHRPRLIGCGGIVMALGALLSALPEFLTHQYKYEAGEIRWGAEGRDVCAANGSGGDEGPDPDLICRNRTATNMMYLLLIGAQVLLGIGATPVQPLGVSYIDDHVRRKDSSLYIGILFTMLVFGPACGFILGSFCTKIYVDAVFIDTSNLDITPDDPRWIGAWWGGFLLCGALLFFSSLLMFGFPQSLPPHSEPAMESEQAMLSEREYERPKPSNGVLRHPLEPDSSASCFQQLRVIPKVTKHLLSNPVFTCIILAACMEIAVVAGFAAFLGKYLEQQFNLTTSSANQLLGMTAIPCACLGIFLGGLLVKKLSLSALGAIRMAMLVNLVSTACYVSFLFLGCDTGPVAGVTVPYGNSTAPGSALDPYSPCNNNCECQTDSFTPVCGADGITYLSACFAGCNSTNLTGCACLTTVPAENATVVPGKCPSPGCQEAFLTFLCVMCICSLIGAMAQTPSVIILIRTVSPELKSYALGVLFLLLRLLGFIPPPLIFGAGIDSTCLFWSTFCGEQGACVLYDNVVYRYLYVSIAIALKSFAFILYTTTWQCLRKNYKRYIKNHEGGLSTSEFFASTLTLDNLGRDPVPANQTHRTKFIYNLEDHEWCENMESVL

SEQ ID NO: 175335 - DNA, 2133 bp, Artificial Sequence
  derived and/or modified sequence
atgcagggcaagaagcccggcggcagcagcggcggcggcagaagcggcgagctgcagggcgacgaggcccagagaaacaagaagaagaagaagaaggtgagctgcttcagcaacatcaagatcttcctggtgagcgagtgcgccctgatgctggcccagggcaccgtgggcgcctacctggtgagcgtgctgaccaccctggagagaagattcaacctgcagagcgccgacgtgggcgtgatcgccagcagcttcgagatcggcaacctggccctgatcctgttcgtgagctacttcggcgccagaggccacagacccagactgatcggctgcggcggcatcgtgatggccctgggcgccctgctgagcgccctgcccgagttcctgacccaccagtacaagtacgaggccggcgagatcagatggggcgccgagggcagagacgtgtgcgccgccaacggcagcggcggcgacgagggccccgaccccgacctgatctgcagaaacagaaccgccaccaacatgatgtacctgctgctgatcggcgcccaggtgctgctgggcatcggcgccacccccgtgcagcccctgggcgtgagctacatcgacgaccacgtgagaagaaaggacagcagcctgtacatcggcatcctgttcaccatgctggtgttcggccccgcctgcggcttcatcctgggcagcttctgcaccaagatctacgtggacgccgtgttcatcgacaccagcaacctggacatcacccccgacgaccccagatggatcggcgcctggtggggcggcttcctgctgtgcggcgccctgctgttcttcagcagcctgctgatgttcggcttcccccagagcctgcccccccacagcgagcccgccatggagagcgagcaggccatgctgagcgagagagagtacgagagacccaagcccagcaacggcgtgctgagacaccccctggagcccgacagcagcgccagctgcttccagcagctgagagtgatccccaaggtgaccaagcacctgctgagcaaccccgtgttcacctgcatcatcctggccgcctgcatggagatcgccgtggtggccggcttcgccgccttcctgggcaagtacctggagcagcagttcaacctgaccaccagcagcgccaaccagctgctgggcatgaccgccatcccctgcgcctgcctgggcatcttcctgggcggcctgctggtgaagaagctgagcctgagcgccctgggcgccatcagaatggccatgctggtgaacctggtgagcaccgcctgctacgtgagcttcctgttcctgggctgcgacaccggccccgtggccggcgtgaccgtgccctacggcaacagcaccgcccccggcagcgccctggacccctacagcccctgcaacaacaactgcgagtgccagaccgacagcttcacccccgtgtgcggcgccgacggcatcacctacctgagcgcctgcttcgccggctgcaacagcaccaacctgaccggctgcgcctgcctgaccaccgtgcccgccgagaacgccaccgtggtgcccggcaagtgccccagccccggctgccaggaggccttcctgaccttcctgtgcgtgatgtgcatctgcagcctgatcggcgccatggcccagacccccagcgtgatcatcctgatcagaaccgtgagccccgagctgaagagctacgccctgggcgtgctgttcctgctgctgagactgctgggcttcatccccccccccctgatcttcggcgccggcatcgacagcacctgcctgttctggagcaccttctgcggcgagcagggcgcctgcgtgctgtacgacaacgtggtgtacagatacctgtacgtgagcatcgccatcgccctgaagagcttcgccttcatcctgtacaccaccacctggcagtgcctgagaaagaactacaagagatacatcaagaaccacgagggcggcctgagcaccagcgagttcttcgccagcaccctgaccctggacaacctgggcagagaccccgtgcccgccaaccagacccacagaaccaagttcatctacaacctggaggaccacgagtggtgcgagaacatggagagcgtgctgtag

SEQ ID NO: 175336 - DNA, 2133 bp, Artificial Sequence
  derived and/or modified sequence
atgcaaggcaaaaaaccgggagggtcttccggcggagggcggtctggagagttgcagggtgatgaagcccagagaaataagaaaaagaagaagaaggtgagctgtttttccaatattaagatcttcctggtgtcagagtgcgccctgatgctggcacaaggcaccgttggcgcctaccttgtatcggtcttgaccacactcgaaaggcgctttaatttgcagtcggcagatgtgggggttatagccagttcgttcgagattggcaatctcgcccttattctgtttgtctcatatttcggcgctcgtggtcacagaccacggttaataggctgtggaggaattgtgatggcgctgggcgcactcctatccgccctacccgaattccttactcaccaatacaaatacgaagcaggggagattcgctggggtgctgagggccgcgacgtttgtgcggccaacggttcaggaggcgatgagggacctgacccagatttgatttgcaggaaccgcacagccacgaatatgatgtacctgctgctgataggtgctcaggtgttgcttggcataggtgccacccctgtgcaaccattaggagtgagctacatcgatgaccacgtgcggcgcaaagactctagcctttatatcggaatattattcacgatgcttgtgtttggtcccgcctgtgggttcatccttggctctttttgcaccaagatatatgtcgacgcagtctttatagacacatctaacctggacattaccccggacgatccccgctggatcggggcttggtggggggggttcctgctctgcggagcattgctgttttttagcagcttattgatgttcggctttccccagagtctgccacctcacagcgagcctgccatggagagcgagcaagccatgctatcagagagggagtacgaacgcccgaaaccttctaacggggtactgcgtcacccattagagcccgacagctcagcctcctgtttccagcagctgagggtaatcccaaaggtgaccaagcacctgttatcaaatcctgtgttcacgtgtatcattttagctgcctgtatggagatcgcggtcgtcgcaggttttgccgcctttctcggtaagtacttagaacagcagtttaacctgaccacgtcttctgccaatcagctgctcggcatgacagcgataccctgtgcttgccttggtatctttttaggtggattgcttgttaaaaagctcagcctctccgctctgggcgcgatcagaatggcaatgctggtcaatctagtaagcactgcctgctatgtgagcttcctgtttttaggctgcgatactggcccagtcgccggggttacagttccttacggcaattctacagctcctggaagtgccctggatccctacagtccatgtaacaacaactgtgagtgccagaccgactcatttactcctgtgtgtggcgctgatggtataacatatctctcagcatgtttcgccgggtgtaattctacgaacctaacaggttgtgcctgtctgacaaccgtgccggcagaaaacgccacagtcgtgccaggcaaatgccccagccccggttgccaggaagccttcttgacctttctgtgcgtgatgtgtatctgcagtctcattggggctatggctcagacaccctcagtcattatcctgatcagaactgtatcgcccgagctaaagtcctatgcgttaggtgtgctcttcctgctcctccggctccttggtttcattcctcctccgctaatctttggggccgggattgattcaacctgtctcttctggagcacattttgtggagagcagggagcctgcgtcctctatgataacgtagtctatcggtatctgtacgtgtccatcgccatcgctctgaagtccttcgcctttatcttgtatacaacaacttggcagtgtcttaggaagaattataaacggtacatcaaaaaccatgaggggggactctctacatcagagttcttcgcaagcacacttaccctggacaatctgggcagagatccagtccccgctaatcagactcacagaactaaattcatctacaatcttgaagatcacgagtggtgtgaaaacatggagtcagtgttgtag

SEQ ID NO: 175337 - DNA, 2133 bp, Artificial Sequence
  derived and/or modified sequence
atgcagggcaagaagccaggcggcagcagcggcggcggccgctctggagagctgcagggagatgaggcccagaggaacaagaagaagaagaagaaggtgtcctgcttcagcaacatcaagatcttcctggtgtctgaatgtgccctgatgctggcccagggcaccgtgggcgcctacctggtgtctgtgctgaccaccctggagcggcgcttcaacctgcagagcgcagatgtgggcgtgattgccagcagctttgaaattggcaacctggccctgatcctgtttgtgtcctactttggagcccggggccaccggccccggctgattggctgcggcggcatcgtgatggccctgggcgccctgctgagcgccctgcctgagttcctgacccaccagtacaagtatgaagctggggagatccgctggggcgctgagggcagagatgtgtgtgccgccaatggaagtggaggagatgagggccctgaccctgacctgatctgcaggaacagaacagccaccaacatgatgtacctgctgctgattggagcccaggtgctgctgggcattggagccacccctgtgcagcccctgggcgtgtcctacattgatgaccacgtgcggaggaaggacagcagcctgtacatcggcatcctcttcaccatgctggtgtttggacctgcctgtggcttcatcctgggcagcttctgcaccaagatctacgtggatgctgtgttcatcgacaccagcaacctggacatcaccccagatgacccccgctggattggagcctggtggggcggcttcctgctgtgtggggccctgctcttcttcagcagcctgctgatgtttggcttcccccagagcctgcccccccacagcgagcccgccatggagagcgagcaggccatgctgtctgagcgggagtatgagcggcccaagcccagcaatggagtgctgcggcaccccctggagccagacagcagcgccagctgcttccagcagctgcgggtcatccccaaggtgaccaagcacctgctgagcaaccctgtgttcacctgcatcatcctggccgcctgcatggagattgctgtggtggccggctttgctgccttcctgggcaagtacctggagcagcagttcaacctgaccaccagcagcgccaaccagctgctgggcatgacagccatcccctgtgcctgcctgggcatcttcctgggcggcctgctggtgaagaagctgagcctgagcgccctgggcgccatccgcatggccatgctggtgaacctggtgtccacagcctgctacgtgtccttcctgttcctgggctgtgacaccggccctgtggccggcgtgacagtgccctacggcaacagcacagcccctggcagcgccctggacccctacagcccctgcaacaacaactgtgagtgccagacagacagcttcacccctgtgtgtggggctgatggcatcacctacctgagcgcctgctttgctggctgcaacagcaccaacctgaccggctgtgcctgcctgaccaccgtgcctgcagaaaatgccaccgtggtgcctgggaagtgccccagccctggctgccaggaggccttcctgaccttcctgtgtgtgatgtgcatctgcagcctgattggagccatggcccagaccccatctgtcatcatcctgatcagaacagtgtccccagagctgaagagctatgccctgggcgtgctcttcctgctgctgcggctgctgggcttcatccccccacccctcatctttggagctggcatcgacagcacctgcctcttctggagcaccttctgtggggagcagggcgcctgtgtgctgtatgacaacgtggtgtaccgctacctgtatgtgtccatcgccatcgccctgaagagctttgccttcatcctgtacaccaccacctggcagtgcctgaggaagaactacaagcgctacatcaagaaccatgaaggaggcctgagcaccagcgagttctttgccagcaccctgaccctggacaacctgggccgggaccctgtgcctgccaaccagacccacaggaccaagttcatctacaacctggaggaccacgagtggtgtgagaacatggagagcgtgctgtag

SEQ ID NO: 175338 - DNA, 2133 bp, Artificial Sequence
  derived and/or modified sequence
atgcagggcaagaagcccggcggcagcagcggcggcggccggagcggggagctccaaggcgacgaggctcaaaggaataagaagaagaaaaaaaaagtgagctgtttttcgaatatcaaaatttttttggtgtctgagtgcgcacttatgctggctcaggggaccgtcggcgcttacttagtgagcgttttgacaacactcgagagacggttcaacttgcaatctgccgacgttggggtcattgcttcttcatttgaaatcgggaatttagcgttgatcctgttcgtttcctatttcggagcccgaggacaccgcccacggctgattggctgcggaggaattgtgatggccctgggggcactgctgtcagccctgcccgaattcctgacacaccagtacaaatatgaagctggggagattcgatggggggctgagggacgggacgtgtgcgcagctaatggtagtggcggcgacgagggtcccgatccagacctgatttgcaggaaccgcaccgctactaatatgatgtatctcctgttgatcggcgcccaagtgctccttggcattggggcaactccagtacagcctctgggcgtgtcttatatcgacgatcacgtccggcgtaaggactctagtctgtacatcggaatcctgtttaccatgttagtgttcggaccagcttgtgggttcattctgggtagcttttgcaccaagatttatgtggatgctgtctttatcgacacctcaaacctggacataactccagatgaccccagatggatcggcgcgtggtggggtggtttcctcctgtgcggggccctcctcttcttttccagtttgctgatgtttggatttccccagtccttgccaccccattcagaaccggcaatggagtctgagcaggcgatgctgagcgaaagagagtacgaacgtccaaagccttccaatggcgtcctccgccaccctttggagcccgacagttcagcctcatgcttccagcagctccgggtgatccccaaggtgacaaaacatttactgtctaaccctgtctttacatgcatcatattagcagcgtgtatggagattgccgtcgtggccggcttcgccgctttcctgggcaagtatttggagcagcaatttaacctaactacatcaagcgccaatcagctcctgggcatgaccgcaattccctgtgcctgcctagggatattcctggggggtttactggtcaagaagctgtcactcagtgccctgggcgccattcggatggccatgctggttaaccttgtttctacagcttgctatgtgagtttcctgttcctgggctgcgataccggaccagtcgccggtgtcactgtgccgtacggcaatagcacggcgcccggtagtgcactcgacccgtactccccatgcaataacaattgtgaatgtcagaccgattcctttacgccagtttgtggcgctgacggtattacatatcttagcgcctgtttcgcagggtgcaatagcacaaacctcacagggtgcgcgtgcctgacaacagtgccagctgagaacgcaactgttgtccccggcaaatgccctagccctggctgccaggaggcctttctgacatttctttgcgtgatgtgcatttgttccttaataggggcaatggcccaaaccccttcggtcataattttgattcgcacagtgtcgcccgaattgaaatcctatgcgttgggagtcctcttcctgctcctgaggctgctgggatttatcccaccccctctgatcttcggtgctggtatcgacagcacatgcttgttttggtctacattttgcggggaacagggcgcctgcgtcttatacgataacgtggtgtaccggtacttgtatgtctcaatcgctatagcgttgaagagcttcgccttcatcttgtatacgacaacatggcagtgtctgagaaaaaattataaacgctacatcaagaatcacgaggggggactttccactagcgagtttttcgcgagtactctaaccctggacaatctgggaagggatcccgtgccagccaatcagacccatagaacaaaatttatatataatttggaggaccatgagtggtgcgagaacatggagtcggtgctgtag

SEQ ID NO: 175339 - DNA, 2133 bp, Artificial Sequence
  derived and/or modified sequence
atgcaggggaagaagccgggaggaagcagcggtgggggacggagtggcgagctgcagggagatgaagcacaacggaacaaaaaaaagaagaaaaaggtgtcatgttttagtaatatcaaaatttttttggtgagcgagtgtgcgctcatgctggctcagggtacagtgggagcctatctagtgtctgtcctgacaacacttgagagacgcttcaatctccagagtgccgatgtgggggttatcgccagtagcttcgagattggaaatctcgctctgatcctgttcgtttcttacttcggagcccgaggccacagaccacgtctcattgggtgtggcggtatcgttatggcgctgggtgccttgctgagcgcactgccggagtttctgactcaccaatataagtatgaggctggggaaatcagatggggtgcagagggaagagacgtttgcgccgctaacggatccggtggggatgaggggcctgatcccgatctgatctgtagaaaccgtaccgccacaaatatgatgtatctgttgctcattggagcacaggtgctcctgggcatcggtgctactcccgtccagcctctaggtgtcagctacatcgatgatcacgtgaggaggaaggatagctctctctatatcggtattctgtttaccatgctggtgtttggtcccgcatgtgggtttatactggggtcattctgtaccaagatctacgtagacgctgtgttcatagacacctctaacttggacatcaccccagatgatcccaggtggattggcgcttggtggggaggattcttattgtgtggtgctctcctatttttcagttccttactgatgttcggattccctcaaagcctgcctccccattcagagcccgcaatggagtctgagcaggcgatgctatcagaaagagagtacgagcggcctaaaccctctaacggcgtgttgagacaccctctcgagcctgattctagcgcaagttgtttccagcaactccgcgtgatccctaaagtgactaaacatctgctctcaaatcccgttttcacatgtattatcctagctgcttgcatggagatcgcggtcgtggccggatttgcggcttttctgggcaaataccttgagcaacaattcaacctgacaacctcaagtgccaatcaattgctgggaatgacagccatcccctgcgcttgtttgggcattttcttgggtggtttgcttgtgaagaagctgtcactctctgccctgggcgctatcagaatggcaatgctggtgaatctcgttagcaccgcttgctacgttagttttctgtttctcgggtgcgataccgggcctgtcgcaggcgtcactgtcccatatgggaactctactgctccaggatccgcactggatccatattccccatgtaacaataactgcgagtgtcagaccgatagcttcacgccagtgtgcggggctgacggcataacatacttgtctgcttgttttgcaggttgtaacagcaccaacctcacggggtgtgcttgtctcaccaccgtccccgctgaaaacgcaactgtggtcccaggtaagtgcccgtctcccggttgccaggaggcttttctgacttttctttgtgtcatgtgcatctgctcgctcatcggtgcaatggctcagacaccatcagtaattatcctgattcggactgtgagtcctgagctgaaatcctatgctttgggggtgctgtttctgctcctacgactcttagggttcattcctccgccactgatttttggagctggcattgacagcacctgtctcttttggagcactttttgtggcgagcagggcgcttgcgtgctttatgacaacgtcgtctaccgatatctgtatgtgtctatcgctatcgccctgaagagctttgcattcatactttatacaactacctggcaatgtctcagaaagaattacaaacgctacataaagaatcacgaagggggtttgagcacatccgagttctttgcttcaacattaaccctagacaatcttgggagggacccagtccccgctaaccaaacccaccggacaaaattcatatataatctcgaggatcatgaatggtgtgagaacatggagagcgtactatag

SEQ ID NO: 175340 - DNA, 5115 bp, Artificial Sequence
  derived and/or modified sequence
ggaggaggaaggggcgatcgcggcggcggcggcggcggcgaggagctgtgccttccacctctccagccccggcaggacgggggcggccgccgcgaacccggggcggggacagcacgcagcctcgaggcgcgcacccccgcccggcagcggccccgacacccggggcgagcgggaaagcggcagcggcggcggcggcggcggcggcgggggaaggatgcaggggaagaagccgggcggttcgtcgggcggcggccggagcggcgagctgcagggggacgaggcgcagaggaacaagaaaaagaaaaagaaggtgtcctgcttttccaacatcaagatcttcctggtgtccgagtgcgccctgatgctggcgcagggcacggtgggcgcctacctggtgagcgtcctgaccaccctggagcgtaggttcaacctgcagagcgctgacgtgggtgtgatcgctagcagcttcgagatcgggaacctggcgctcatcctcttcgtgagctacttcggggcacgcgggcaccggccgcgcctgatcggctgcggcggcatcgtcatggcgctgggcgcgctgctgtcggcgctgcccgagttcctgacccaccagtacaagtacgaggcgggcgagatccgctggggcgccgagggccgcgacgtctgcgcagccaacggctcgggcggcgacgaggggcccgaccccgacctcatctgccgcaaccggacggctaccaacatgatgtacttgctgctcattggggcccaggtgctcctgggcatcggtgctacccctgtgcagcccctgggcgtctcctacatcgacgaccacgtgcggaggaaggactcctcgctctatataggaatcctgttcacgatgctggtatttggaccagcctgcgggtttatcctgggctctttctgtaccaaaatctacgtggatgcggtcttcattgacacaagtaacctggacatcactccggacgacccccgctggatcggagcctggtggggtggctttctgctctgcggtgccttactcttcttctcttccctcttgatgtttgggtttccacagtccctgcccccgcactcagagcccgccatggaaagcgagcaggccatgctctccgaaagagaatacgagagacccaagcccagcaacggggtcctgaggcaccccctggagccagacagcagtgcctcctgtttccagcagctgagagtgatcccgaaggtcaccaagcacctgctctcaaaccctgtgttcacctgcatcatcctggccgcctgcatggagattgcagtggtggctggcttcgctgcctttttggggaagtacctggagcagcagtttaacctcaccacctcttctgccaaccagctgcttgggatgactgcgatcccgtgtgcttgtctgggtatcttcctgggaggtcttttggtgaagaagctcagcctgtctgccctgggggccattcggatggccatgctcgtcaacctggtgtccactgcttgctacgtctccttcctcttcctgggctgcgacactggccctgtggctggggttactgttccctatggaaacagcacagcacctggctcagccctggacccctactcgccctgcaataataactgtgaatgccaaaccgattccttcactccagtgtgtggggcagatggcatcacctacctgtctgcctgctttgctggctgcaacagcacgaatctcacgggctgtgcgtgcctcaccaccgtccctgctgagaacgcaaccgtggttcctggaaaatgccccagtcctgggtgccaagaggccttcctcactttcctctgtgtgatgtgtatctgcagcctgatcggtgccatggcacagacaccctcagtcatcatcctcatcaggacagtcagccctgaactcaagtcttacgctttgggagttctttttctcctccttcgtttgttgggcttcatccctccacccctcatcttcggggctggcatcgactccacctgcctgttctggagcacgttctgtggggagcaaggcgcctgcgtcctctacgacaatgtggtctaccgatacctgtatgtcagcatcgccatcgcgctcaaatccttcgccttcatcctgtacaccaccacgtggcagtgcctgaggaaaaactataaacgctacatcaaaaaccacgagggcgggctgagcaccagtgagttctttgcctctactctgaccctagacaacctggggagggaccctgtgcccgcaaaccagacacataggacaaagtttatctataacctggaagaccatgagtggtgtgaaaacatggagtccgttttatagtgactaaaggagggctgaactctgtattagtaatccaagggtcatttttttcttaaaaaaagaaaaaaaggttccaaaaaaaaccaaaactcagtacacacacacaggcacagatgcacacacacgcagacagacacaccgactttgtcctttttctcagcatcagagccagacaggattcagaataaggagagaatgacatcgtgcggcagggtcctggaggccacttgcgcggctgggccacagagtctactttgaaggcacctcatggttttcaggatgctgacagctgcaagcaacaggcactgccaaattcagggaacagtggtggccagcttggaggatggacatttctggatacacatacacatacaaaacagaaaacattttttaaaagaagtttcctaaaataaaaaaaattaaaaaaaaaaaacccacaagttgaaaacattgccagattaagcactagtgacacaccccgtgccaccctcttcctccaggtgggggtgggggcgggcgcacaagtcggaggggtggaagcaccactcctctctctgactttcgcaatatgggtcactgtgtagacgactcacccagtctgcatgtggttcaaggccccagagttctctcagtgatgctaatgggtgatccgtgctggagtttgtaattggcacctctcaccagctccatttccatgttcaagactgagggcctgagggggagccaggtggggggccagcacctcccagtggcgggcatccaccttcccccagccccacagagtgacctcaggaagcagtaggcctcgcctggctatgactgacccggctcagagctggtgagacccaacgcagtccaagtcatttgcttacatttgccaaaaacattttgccatttttaaaagaaaaaaatacaatccatatgaatttcaaactgttgtatgtataatcctctaatactatttttaactacttctaaaatctgtgttaacccttcaagtcactaacacagttctctaggccggatttattatgctggttgcttttactttttttctccttttttaatgcaccaaaaatatgtgatacaagggatgcaattaacctattgtaattttcatcattttatcctcattcgaatattctacaaaaacaagaatatacaatgtgttacaagaagaaaaaaaaatgcttcaaaaagagagtgtatatgcagcctgcctttaaaagaatcacatttgagacaacaggggataatgtgatgaattgcaaatttgccttttagcttccttccccatgattcagtgatcactgtcacgggaaacccttttatattcatgcttgacattccaagaggcgttcttttcagcctgtggaggagacactcttagatgtgggtttgtgtgtatgggtgcaacacttccggggataggaaagaagaacagttccctaacacaagctgttaagaagtctgtagcatctctgataacgaatagacccacaagctcctggaagctgtcgtgtgtccaatgcgtgaaaatgtctgtgacattttcagtgttagtcttgaactaaggcccttgtctgtgtgttttgaaggtgggtgaacctcagagaatgaacctgttatgatttggggtaagaatcacgttggaaaacctctcgcaaccagcacactaggccttctacggccatttctgtaaggggacagagcttaggtaaaggcacacactcatacacacacaacaaagggccctgctaacttactcctcatgctgcttcagtgacctttgttcatgtcacattcctggcgctggaaaaaaaactcaaaggttgattggtttgctttttcaccttggacacatttgcattttacccacaaggcaaacaaaagaatcaggaagtaaaaaatggttgggagtgggacaggtatggtaccgaatttttaatgaacattgtaaatgaagaggcttgaatgacagcccaaatctagagaaggcactcagcaagaccaaccaaaagaaaagctgtgtcgtggtatggggccaccgtgatcagctacctggggcaggatgcttctgagacaggcctttcaactgcttagtgttagtatgtccttgcttatgaaaatggggacactcatcagtacgttaactactaaaggggagatggttctccaaccacttcataaaatatgtatgttctgttgttcctaaggctttgataatatcctgtacagattttggtttagttttgcaaatatattgctaataggtcactcttatagattattgcttggcccttcaaactcagtacacacacactgaggccctttgacctagtgttttatggaactatttgctttgagagaaaaaaaaaagaaagttttttaaactctttgcattttggattttttttcctaagattttaggatgaatgtgaaaaagatgttagaataacaggaagacaactccagggctgagttttatcagcaattgggtataaatttaaagaccgctgttgcaggatggctctgaattctgttgtgtcgtcttttaaaattttaattattctcatatagtaccgaacagaaaactcagtctagttttaatttgccttttgtgctctaaagaagcattgtacatacaacactagatccagcccctcgattatctgtttggtttcaagtgaatgaaaagatttcctggtaagatcattggatttacagaatacaaaaatgtacgggatggaataaacctagaaagtgaa

SEQ ID NO: 175341 - protein, 2663 aa, Artificial Sequence
  derived and/or modified sequence
MPKGGCPKAPQQEELPLSSDMVEKQTGKKDKDKVSLTKTPKLERGDGGKEVRERASKRKLPFTAGANGEQKDSDTEKQGPERKRIKKEPVTRKAGLLFGMGLSGIRAGYPLSERQQVALLMQMTAEESANSPVDTTPKHPSQSTVCQKGTPNSASKTKDKVNKRNERGETRLHRAAIRGDARRIKELISEGADVNVKDFAGWTALHEACNRGYYDVAKQLLAAGAEVNTKGLDDDTPLHDAANNGHYKVVKLLLRYGGNPQQSNRKGETPLKVANSPTMVNLLLGKGTYTSSEESSTESSEEEDAPSFAPSSSVDGNNTDSEFEKGLKHKAKNPEPQKATAPVKDEYEFDEDDEQDRVPPVDDKHLLKKDYRKETKSNSFISIPKMEVKSYTKNNTIAPKKASHRILSDTSDEEDASVTVGTGEKLRLSAHTILPGSKTREPSNAKQQKEKNKVKKKRKKETKGREVRFGKRSDKFCSSESESESSESGEDDRDSLGSSGCLKGSPLVLKDPSLFSSLSASSTSSHGSSAAQKQNPSHTDQHTKHWRTDNWKTISSPAWSEVSSLSDSTRTRLTSESDYSSEGSSVESLKPVRKRQEHRKRASLSEKKSPFLSSAEGAVPKLDKEGKVVKKHKTKHKHKNKEKGQCSISQELKLKSFTYEYEDSKQKSDKAILLENDLSTENKLKVLKHDRDHFKKEEKLSKMKLEEKEWLFKDEKSLKRIKDTNKDISRSFREEKDRSNKAEKERSLKEKSPKEEKLRLYKEERKKKSKDRPSKLEKKNDLKEDKISKEKEKIFKEDKEKLKKEKVYREDSAFDEYCNKNQFLENEDTKFSLSDDQRDRWFSDLSDSSFDFKGEDSWDSPVTDYRDMKSDSVAKLILETVKEDSKERRRDSRAREKRDYREPFFRKKDRDYLDKNSEKRKEQTEKHKSVPGYLSEKDKKRRESAEAGRDRKDALESCKERRDGRAKPEEAHREELKECGCESGFKDKSDGDFGKGLEPWERHHPAREKEKKDGPDKERKEKTKPERYKEKSSDKDKSEKSILEKCQKDKEFDKCFKEKKDTKEKHKDTHGKDKERKASLDQGKEKKEKAFPGIISEDFSEKKDDKKGKEKSWYIADIFTDESEDDRDSCMGSGFKMGEASDLPRTDGLQEKEEGREAYASDRHRKSSDKQHPERQKDKEPRDRRKDRGAADAGRDKKEKVFEKHKEKKDKESTEKYKDRKDRASVDSTQDKKNKQKLPEKAEKKHAAEDKAKSKHKEKSDKEHSKERKSSRSADAEKSLLEKLEEEALHEYREDSNDKISEVSSDSFTDRGQEPGLTAFLEVSFTEPPGDDKPRESACLPEKLKEKERHRHSSSSSKKSHDRERAKKEKAEKKEKGEDYKEGGSRKDSGQYEKDFLEADAYGVSYNMKADIEDELDKTIELFSTEKKDKNDSEREPSKKIEKELKPYGSSAINILKEKKKREKHREKWRDEKERHRDRHADGLLRHHRDELLRHHRDEQKPATRDKDSPPRVLKDKSRDEGPRLGDAKLKEKFKDGAEKEKGDPVKMSNGNDKVAPSKDPGKKDARPREKLLGDGDLMMTSFERMLSQKDLEIEERHKRHKERMKQMEKLRHRSGDPKLKEKAKPADDGRKKGLDIPAKKPPGLDPPFKDKKLKESTPIPPAAENKLHPASGADSKDWLAGPHMKEVLPASPRPDQSRPTGVPTPTSVLSCPSYEEVMHTPRTPSCSADDYADLVFDCADSQHSTPVPTAPTSACSPSFFDRFSVASSGLSENASQAPARPLSTNLYRSVSVDIRRTPEEEFSVGDKLFRQQSVPAASSYDSPMPPSMEDRAPLPPVPAEKFACLSPGYYSPDYGLPSPKVDALHCPPAAVVTVTPSPEGVFSSLQAKPSPSPRAELLVPSLEGALPPDLDTSEDQQATAAIIPPEPSYLEPLDEGPFSAVITEEPVEWAHPSEQALASSLIGGTSENPVSWPVGSDLLLKSPQRFPESPKRFCPADPLHSAAPGPFSASEAPYPAPPASPAPYALPVAEPGLEDVKDGVDAVPAAISTSEAAPYAPPSGLESFFSNCKSLPEAPLDVAPEPACVAAVAQVEALGPLENSFLDGSRGLSHLGQVEPVPWADAFAGPEDDLDLGPFSLPELPLQTKDAADGEAEPVEESLAPPEEMPPGAPGVINGGDVSTVVAEEPPALPPDQASTRLPAELEPEPSGEPKLDVALEAAVEAETVPEERARGDPDSSVEPAPVPPEQRPLGSGDQGAEAEGPPAASLCAPDGPAPNTVAQAQAADGAGPEDDTEASRAAAPAEGPPGGIQPEAAEPKPTAEAPKAPRVEEIPQRMTRNRAQMLANQSKQGPPPSEKECAPTPAPVTRAKARGSEDDDAQAQHPRKRRFQRSTQQLQQQLNTSTQQTREVIQQTLAAIVDAIKLDAIEPYHSDRANPYFEYLQIRKKIEEKRKILCCITPQAPQCYAEYVTYTGSYLLDGKPLSKLHIPVIAPPPSLAEPLKELFRQQEAVRGKLRLQHSIEREKLIVSCEQEILRVHCRAARTIANQAVPFSACTMLLDSEVYNMPLESQGDENKSVRDRFNARQFISWLQDVDDKYDRMKTCLLMRQQHEAAALNAVQRMEWQLKVQELDPAGHKSLCVNEVPSFYVPMVDVNDDFVLLPA

SEQ ID NO: 175342 - protein, 438 aa, Artificial Sequence
  derived and/or modified sequence
SAGRVNEDRVRSRTMPKGGCPKAPQQEELPLSSDMVEKQTGKKDKDKVSLTKTPKLERGDGGKEVRERASKRKLPFTAGANGEQKDSDTEKQGPERKRIKKEPVTRKAGLLFGMGLSGIRAGYPLSERQQVALLMQMTAEESANSPVDTTPKHPSQSTVCQKGTPNSASKTKDKVNKRNERGETRLHRAAIRGDARRIKELISEGADVNVKDFAGWTALHEACNRGYYDVAKQLLAAGAEVNTKGLDDDTPLHDAANNGHYKVVKLLLRYGGNPQQSNRKGETPLKVANSPTMVNLLLGKGTYTSSEESSTESSEEEDAPSFAPSSSVDGNNTDSEFEKGLKHKAKNPEPQKATAPVKDEYEFDEDDEQDRVPPVDDKHLLKKDYRKETKSNSFISIPKMEKVTLKITRLHQRKRPIVSCQTRRTRRTRVSPWGQERS

SEQ ID NO: 175343 - DNA, 7992 bp, Artificial Sequence
  derived and/or modified sequence
atgcccaagggcgggtgccctaaagccccacagcaggaggaattgcctctctcctctgacatggttgagaaacaaacaggaaagaaggataaggacaaagtttccctgactaagacccctaaattggagcggggcgatggcggcaaggaggttcgagagagggcctccaagcgcaagttgcccttcacagccggagcaaacggggaacaaaaggattccgatactgaaaaacagggcccggaaagaaaaagaatcaaaaaggagcccgtgacaagaaaagcaggactgctctttgggatgggtctgagtggtatcagggccggataccctctgtccgagcgccagcaagtggctttgctcatgcagatgacagccgaagagtcggctaactccccagtggatactactcctaagcacccgtctcagtcgaccgtttgtcaaaaaggaacccccaattcagcaagcaaaacaaaagacaaggtcaataagaggaacgaaagaggggagactcgccttcatcgtgcagctatcaggggtgatgcgaggcggataaaagagctgatttctgaaggagctgatgtgaatgtaaaggacttcgccggttggactgcactgcatgaagcatgtaatagagggtattatgacgtcgccaaacagctgctggctgctggagccgaagtgaatacgaagggacttgacgacgatacccctttacacgacgctgccaacaatggccactataaagtagtaaaactgctcctccggtatggagggaatccacagcagtcaaatagaaagggcgaaacccctctgaaggtcgctaatagtcctactatggtgaacttgctcttgggcaaagggacatacacctcgagcgaagagtccagcaccgagtcatctgaggaggaggacgcaccttcgttcgctccctcaagcagcgtcgacggaaacaacactgatagcgagtttgaaaagggactgaaacacaaggccaagaatcccgagccccagaaggcaaccgcaccggtgaaggacgagtatgaattcgatgaggacgacgagcaggacagagtccctcctgttgacgacaaacatctgctaaagaaagattacagaaaggagacgaaatcaaactcgtttatctccattccgaaaatggaggtgaagtcctacactaagaacaatacaatagcacccaagaaggcgagccacagaatcctctctgataccagtgacgaagaagatgcctctgtgacggtgggcactggagagaaactgcgattgagcgctcataccattctgcccggctcgaagacacgtgagccgtcaaacgccaaacagcagaaggagaagaataaagtgaaaaagaagcgcaagaaggaaaccaaaggccgtgaggtgagatttggcaaacggagcgataaattctgtagctctgagagcgagagtgaaagttcggagagtggcgaagatgaccgggattccctcggcagcagcggatgtctgaagggttcgcccctcgttctgaaggatccaagcctcttcagttccctgtccgccagctccacctctagccatgggtcttctgccgcacagaagcagaaccccagtcacactgaccagcataccaaacactggaggaccgataactggaagacaatctcttcgcccgcttggtctgaggttagtagtctgagtgatagtacacgtaccaggctgacctccgagtccgattatagttcggaaggctccagcgtcgaatcgctgaaaccagttcgcaaacgacaagaacacaggaagcgagctagcctgtcagagaagaagtcccctttcttaagtagtgctgagggggcagtccctaaactcgacaaggagggaaaagtggtcaagaagcacaaaaccaagcacaagcacaagaacaaagagaaagggcagtgctccattagtcaggagctcaagcttaaatctttcacctatgagtacgaagactcaaagcagaaatctgataaagctatcttacttgaaaacgatctgtcaacagagaacaaactgaaagtgctgaagcacgaccgggatcactttaaaaaggaggagaaactcagtaagatgaagctcgaggagaaagaatggctcttcaaagatgagaaatccctcaagcgcatcaaagacactaacaaagatatcagtcggagttttcgcgaagagaaagacagatccaacaaagcggagaaggagagatctctcaaagagaagagccctaaagaggagaagcttcgactttacaaggaggagcggaagaaaaagtccaaagatagacctagtaagcttgagaaaaagaacgacctcaaggaggataagatcagtaaggagaaggagaagattttcaaggaagacaaggagaaacttaaaaaagaaaaagtctatagggaagactccgcctttgacgagtactgtaacaaaaatcagtttttggagaatgaggataccaagttctccctgtccgacgatcagcgagacaggtggttctcagacctctccgacagcagtttcgactttaaaggagaggactcttgggattctcccgtgacagactatagggacatgaagtcagacagcgtggccaaactgatcttagagacagttaaagaggattccaaagaaagaagacgcgactcaagggcccgcgagaaacgcgactaccgggaaccgttcttccgcaaaaaggatcgcgactatttggacaagaactccgagaagcgcaaggagcaaactgagaagcataagagtgtgcccgggtatctgagtgaaaaggacaagaaacgcagagagtctgccgaggcgggccgcgatcgaaaggacgcgttagagtcgtgcaaggagaggagagacgggagagcaaagcctgaggaggcccaccgagaagagcttaaagaatgcggatgtgagagtggctttaaagacaagtccgacggcgacttcggcaagggcttagagccgtgggagcggcaccatcccgctcgggaaaaggagaaaaaagacgggcccgacaaagagcgaaaggaaaagaccaagccggaaaggtacaaagagaagtctagtgacaaagataaatccgagaagtccattttagagaaatgtcagaaagataaggagttcgataaatgtttcaaggagaaaaaagatactaaggagaagcacaaggatacgcatgggaaggacaaggagaggaaagctagtcttgatcaagggaaagagaagaaggagaaggcgtttccagggataattagtgaagacttctccgagaagaaggatgacaagaaagggaaggagaagtcgtggtacatcgccgacatatttacagacgaaagtgaggatgatagggactcatgcatggggagtggattcaaaatgggggaggcatctgatctgcccagaacagacggtttgcaagaaaaagaagaaggtcgagaagcctacgcctctgacaggcaccgcaagagttctgacaagcagcaccctgagaggcaaaaagataaagaacccagagaccgccgaaaagaccgtggcgccgcagatgcagggcgcgataaaaaagaaaaggtgtttgaaaaacacaaggagaagaaagacaaggagtccacagagaagtacaaggaccgaaaggacagggcgtccgtggacagcacacaggataaaaagaacaaacagaaactgccagagaaggccgagaagaagcatgcggccgaggacaaagccaagagcaagcacaaagaaaagagtgacaaagagcatagcaaggagaggaagagtagcaggtccgccgacgcagaaaaaagcctgttagagaagttggaggaagaggccttgcacgaatacagggaggattccaatgacaagatctcggaggtctcctcagatagcttcacggaccgggggcaggaaccagggctcaccgcctttttggaggtgtctttcaccgaaccccccggcgacgacaaacctcgcgagtctgcttgtttgcctgagaaactgaaggaaaaggagcgccacaggcattcgagtagttcatcaaaaaagtcacacgacagagagcgcgcgaagaaggagaaggctgaaaagaaagagaagggcgaggactataaggagggtggatctcggaaggatagcggacagtacgagaaggattttctcgaggctgacgcttatggcgtctcttataacatgaaggccgatatagaagacgagttggacaagaccattgaactgtttagcaccgaaaagaaagataagaacgacagtgagagagagccttcaaaaaagattgagaaggaattaaagccatacggttcatcggcgataaacatacttaaagagaagaaaaaaagggagaagcaccgtgaaaaatggagagacgagaaggaaagacaccgtgacaggcatgcagacggcctcctaaggcaccatagggacgaactcctcaggcaccacagagacgaacagaaacccgccactcgcgacaaagattcacccccccgagtgctgaaggacaaaagtagagacgagggcccccgcctaggggatgccaaactgaaggaaaagttcaaggatggagcagagaaggagaagggagaccccgtcaagatgagcaatggaaatgataaagtggctccaagtaaagaccctggaaagaaagacgcgaggccacgcgagaagctcctcggcgacggtgaccttatgatgacttcgtttgagcggatgctgagccagaaagatttggagatcgaagaacgccacaagagacacaaagagagaatgaaacagatggaaaagcttcggcacagaagcggggatcccaaactgaaggaaaaagctaagccagcagatgatggccggaagaagggactggatattccggctaaaaaaccccccggtctcgaccctccctttaaagataagaaactgaaagagagcactcccataccccccgctgctgaaaataagctgcatcccgcatccggagcagattctaaggattggctagcaggaccacacatgaaagaagtgctcccagccagtcccagacctgatcagagtaggcctactggggtccctacgccaacctccgtcctgtcatgcccgtcatatgaagaggtgatgcatacaccacggaccccttcttgcagtgccgacgactacgccgatctcgtgttcgactgcgcagacagtcagcatagcactcccgtgccaaccgcacccactagtgcttgttcgccatccttctttgaccggttttccgtggcatctagcggtctctctgagaatgcgagccaggctcccgcacgcccactgtccacaaatctctataggagcgtgagcgtggatatccgcagaactcccgaggaggagttctccgtcggcgacaagctttttcggcagcaatcggtgcctgcagcttcctcctacgacagtcccatgcccccaagcatggaggaccgtgcccctctgccaccggttccagcagaaaaatttgcttgtcttagcccgggctactatagcccggattatgggctcccaagtcctaaggtggacgccctccactgtccccctgccgccgttgtgacggtgaccccctcaccggagggtgtattttctagcctgcaggctaagccatctcccagccctagagctgagctcttggtcccgtcacttgaaggcgccctcccccccgatttagacacctctgaggatcaacaagcaaccgcagctattatccctccagagccaagttatctcgagcctttggatgagggtcctttttctgctgtgatcactgaagagcctgtcgagtgggcccaccccagtgagcaagctttagctagcagcctgattggtggcacctcagagaacccagtctcctggccggtgggctcagacttactcctgaagagtccccagcgatttcctgagtctcccaagaggttttgccctgcagatcctcttcactccgcggctccagggccgttctcagctagcgaagcgccctacccagcccctcctgcgtcgcctgctccttacgctctacctgtggctgagcccggccttgaagacgttaaggacggtgtcgatgctgtgccggcggcaatcagcacctcagaggccgccccatatgccccgccttccgggttggaatctttcttctccaattgtaagtcgttacccgaagctccactggacgtggccccggagccggcttgcgtggctgctgtggcccaggtagaggcactagggcctctcgaaaattcgtttctcgatggaagtagaggactgtcacatctaggccaggtggaacccgttccttgggccgatgctttcgccggccctgaagatgacctggacttgggtcccttcagcctccccgaactgcccctgcagactaaagatgctgcagacggagaagcagagccagtcgaggagtcattggcgccccccgaggagatgcctcctggcgccccaggcgtgattaacggcggagacgtgagtacagtcgtggccgaggaaccaccggctctgcctcctgaccaagcatccaccagactacccgccgagctcgagcctgagccctctggggagcctaagcttgatgtggccctagaagccgcggtcgaggccgagacggtccccgaggaacgcgcgagaggtgatcctgattcaagcgtcgagcctgccccggttccaccagaacagcggccattaggttccggggaccaaggtgctgaggctgagggtccccctgctgcctccttgtgtgcccctgatggccctgctcccaataccgtggcacaggcccaggcagccgacggagcgggccccgaggatgacacagaagcctccagggccgcagcacccgctgaaggcccccctggtggaatacagcccgaggctgctgagcctaaacccaccgccgaggcgccaaaggcacctcgcgtcgaagaaattccacagaggatgacccgaaacagagctcaaatgctggcaaatcagtcaaagcagggtccccctccgagtgagaaggaatgcgctccaactccagcccctgtgaccagagctaaggctaggggcagcgaagatgacgatgcacaggcacagcaccctcgcaagaggaggtttcagcggagtactcaacaacttcaacagcagttgaacacctcgacgcagcagacccgcgaggtcatccaacagacacttgccgcgatcgtggacgccataaagctggatgctattgagccctatcactcagacagggccaacccctactttgaatacctgcagatccgcaagaaaatagaggaaaagcggaaaatcctctgctgtattaccccacaagcgccccagtgctacgcagagtatgttacatacaccggctcttacctgctggacggaaaacccttatctaaactccacatacctgtgattgccccacctcccagcctggcagaacccttgaaagagctctttaggcagcaggaagcagtgcgcggaaagctgaggctccagcattcaatcgagagggagaaacttattgtgtcatgtgagcaagaaatcttacgggttcactgccgagctgctaggaccatcgctaaccaagccgtccctttttcagcatgtaccatgttgcttgactctgaggtctacaatatgcctctggagtcacagggggacgaaaacaagtccgtgagggaccgctttaacgctagacaattcattagctggctccaggatgttgacgacaaatacgataggatgaagacatgtcttctgatgagacaacaacacgaagcagcagcgctgaatgcagttcaacggatggaatggcagctgaaggttcaagaactcgaccccgcggggcataagtctctgtgcgtgaacgaggtcccttcattttatgtccccatggtagatgttaacgacgattttgtgttgttacccgcttag

SEQ ID NO: 175344 - DNA, 7992 bp, Artificial Sequence
  derived and/or modified sequence
atgcccaaaggcgggtgccctaaggcaccacagcaagaagaactccctctgagcagcgatatggttgagaaacagaccggcaaaaaagataaggacaaagtatctcttacaaaaacgcctaaactcgagaggggagatggaggaaaggaggtacgcgagagggcttccaagcgcaagttgccattcacagctggggcaaatggggaacaaaaagacagcgacacagagaagcaggggcctgagcgcaagaggataaagaaggaacctgtcacgcgcaaagctgggctgttatttggaatggggctttcaggcattcgcgcgggatacccccttagcgaaagacagcaggtggccttgctgatgcaaatgacagctgaggagagcgccaacagccccgtggatacaacgccgaaacatccttctcaaagcaccgtgtgccaaaaagggacgcctaatagcgcttcgaaaaccaaagataaggtcaataaacggaacgaacggggcgagacacgactgcacagggctgccatcagaggagacgctaggcgcattaaagaactgatctccgaaggagccgacgtcaatgtcaaggacttcgccggttggaccgcgctccatgaagcctgcaatcgtgggtattacgatgttgctaaacagctgctcgctgccggtgctgaggtgaataccaaagggctagacgatgacacgccactccatgacgcggctaacaatgggcactacaaagtagtcaagctgctgctgaggtacggcggaaaccctcagcagtctaaccgcaaaggtgaaactcccctgaaggttgccaacagcccaactatggtcaacctcctgcttggaaaaggaacatacacttcctccgaagaatcctcaactgaaagtagcgaagaggaagacgccccgtcattcgcaccctctagctccgtcgatggtaataatacggactctgaatttgaaaagggattaaagcacaaggcgaagaaccccgagccccagaaggctacagcacccgtgaaggatgaatatgagttcgacgaggatgatgaacaggaccgggtcccaccggttgacgacaagcacttgctcaagaaggattacagaaaagaaacaaagtccaatagttttatctctatccctaagatggaagttaagtcatacactaaaaataacacaattgctccaaaaaaggcatctcataggattttgtccgatacgagcgatgaggaggatgcttccgttacggtggggacgggcgaaaaactgaggctgagtgcccacactattctgccaggatcaaaaacaagggagccttcaaatgccaagcagcaaaaagaaaaaaacaaagtgaagaagaagcggaaaaaagaaactaagggccgggaagtgcgttttggaaagagatccgataaattttgttcttctgagtccgagtcggagtccagtgaaagtggcgaggacgatcgggattccctgggctccagcggatgtctgaagggaagcccactggtgctcaaggacccctctctgttctcctcgctcagtgcgagctctactagctcccacgggtccagcgctgctcaaaaacagaatccttcacacactgatcagcataccaagcattggaggacggacaactggaagacgatttccagccccgcatggagtgaggtttccagcctcagcgactctacccgcacaagactgacatctgagtctgactactcatcagagggttctagtgttgagtcattgaaacccgtccgtaaacggcaggagcaccggaagcgcgcctctcttagcgaaaagaagagcccattcctgtccagcgctgaaggggccgtaccaaaactcgataaggagggcaaggtggtcaaaaaacacaaaacgaaacataagcataaaaacaaggagaaaggccagtgctccatttcacaggagctgaagcttaaaagtttcacctacgaatacgaggacagtaagcagaaaagcgataaagccatcttattagaaaacgatctctcaacagagaacaagcttaaggtgttgaagcacgatagagaccacttcaaaaaggaggagaagctctcgaagatgaagttggaggagaaagagtggctgttcaaggatgagaagagcctgaagcgcatcaaggacacaaacaaggatatttcacgttccttcagagaagagaaggaccgtagtaataaggccgaaaaagaacgttcactcaaggagaaatcccccaaagaggagaagctaagactgtataaagaggagaggaagaagaaaagcaaagaccgccccagcaagcttgagaagaagaatgaccttaaagaagacaagattagcaaggagaaggagaaaatctttaaggaggacaaggagaagcttaagaaggaaaaagtatacagagaggactccgcattcgatgaatactgtaataagaaccagtttttggaaaatgaggacacaaaattctcactgagcgacgaccagcgggaccggtggttcagcgacttgtcagactctagttttgatttcaagggcgaggactcatgggactctcccgttaccgattatagagacatgaagtctgacagcgtcgcaaagctcatccttgaaacagtgaaggaggattccaaggaaaggcggagagactctcgtgcccgcgaaaaaagggattaccgagagccattctttcggaaaaaggacagggattacctagacaagaatagtgagaaaaggaaggaacagacagaaaaacataaatccgttccaggttatttatctgagaaggataagaaacgcagggaatccgccgaggctggtcgagatcgcaaggatgctctcgagagctgtaaagagcggcgagacggacgtgccaaacctgaagaagcccatcgagaggagttgaaagagtgtggctgtgagagtgggttcaaggataagtccgacggtgatttcggtaaggggctggaaccctgggaacgccaccatccagcccgggaaaaagagaagaaggatggccctgataaagaacgaaaggagaaaacaaaacctgagagatataaggaaaaatcatctgataaggacaagtccgaaaagtctattctggagaaatgccagaaagacaaagagtttgacaaatgtttcaaggaaaaaaaggacacaaaagagaaacataaagacactcacggaaaagataaggagcggaaagcctccctggatcaggggaaagagaaaaaagaaaaagcatttcctggaattatatccgaagacttctctgagaaaaaggatgacaagaagggtaaggagaaatcctggtatatcgctgacatcttcactgatgagtctgaagatgaccgggactcgtgcatggggtcggggttcaaaatgggtgaggccagtgacctgcccaggacagatgggctgcaggaaaaggaagagggccgggaggcctatgcctccgatcgccatcggaagagttctgataagcagcacccagaaaggcagaaagacaaggaacctcgggataggaggaaagaccgaggcgccgccgatgcgggtagggacaaaaaggaaaaggtatttgaaaagcacaaggagaagaaggataaagagagcactgaaaaatataaagatcgaaaggacagggcttcagtggatagcacacaagataaaaaaaacaagcagaagctgccagagaaagcggagaagaaacatgcagcagaggacaaagccaaatccaagcataaggaaaaatccgataaggagcactccaaggaacggaagtcatctaggagcgccgatgccgaaaagtctctgctcgaaaaactggaagaggaggccctgcatgagtatcgggaggacagcaatgacaagatcagcgaagtcagttccgattcctttacagaccgtggccaggagcccgggttgaccgcctttttggaagtaagtttcacggagccaccaggcgacgacaaaccgcgagaaagtgcctgcctgcctgagaaactaaaggagaaggaacgacatagacactcgtcttcttcgtcgaagaagtcccacgaccgagagagagctaagaaggagaaagcagagaagaaagaaaagggggaggactacaaagaggggggctcccgcaaagattcaggacagtacgagaaagattttctggaggccgacgcatatggcgtgtcatataacatgaaagctgacatcgaggatgaacttgacaaaactatcgagctgttcagcacagaaaagaaggataagaatgacagtgaacgtgaaccgtctaaaaaaatcgagaaggagctcaagccctacggttcttccgccattaacatactaaaagaaaagaaaaagagagagaaacatagagaaaagtggcgcgacgaaaaggagcggcatagggatagacacgcggatggtctgctgcgtcatcaccgagatgaactactccgtcatcacagggacgaacagaaaccggcgaccagggataaagactctcctccccgggttctgaaggataagtctcgcgatgaagggccgaggctcggggatgcaaagctcaaggaaaaattcaaagatggtgccgaaaaagaaaaaggcgatcctgtgaaaatgtcaaacggcaatgataaagtcgcaccaagcaaagaccccggcaagaaagacgcaagaccccgggagaaactactaggagacggggatctcatgatgacttccttcgagcggatgttaagccaaaaggacctggaaatagaggagagacataaacggcataaggaacggatgaaacagatggaaaaactgcgccaccgaagtggggatccaaagctgaaggagaaagccaagccagcagatgatggtcgaaagaaagggttagacatcccagcaaagaagcccccgggcctagacccccctttcaaggacaaaaaattaaaagagagcactcctatcccccccgccgctgagaacaagctgcaccccgcctccggtgctgattcgaaggattggttagctggtcctcacatgaaggaggtgctgccagcttccccccgtccagatcagtctagacctactggcgtgcctactcctacttcagtgctctcttgtccgtcgtatgaagaagtgatgcacacacctcgcacgccctcatgcagcgcagacgactatgctgacctcgtgtttgattgtgctgacagtcagcatagcaccccagtgcctactgcgccaacttccgcctgttctcccagtttctttgatcgcttttcagttgcttctagtgggctttctgaaaatgcaagccaggcccctgcacggcccctgagcaccaacctctatcgttctgtcagcgttgatattaggaggacacccgaagaggaattctccgttggagacaagctgtttcggcagcaaagcgtaccagctgcctcctcttacgattccccaatgcctccaagtatggaggatcgggcacccttacctccagtccccgctgagaagtttgcttgcctctctcctggttattattctccagactatgggttgcctagtcccaaggtggacgcgctccactgccctcctgcagccgtggtgacagtgacacccagccctgagggtgtattcagcagcctgcaggcgaagccaagccctagcccacgagcagaactgctcgtcccatcgttggaaggggcacttcctccggacctcgacacctctgaagatcagcaggccacagccgcaattatccctcccgaaccaagttacctagaaccgctggacgagggacctttcagcgcagtgataacagaggaaccagtagaatgggcccacccatccgagcaggctctggcttcttccttaatcgggggaacctccgagaacccggtttcctggccagttggaagtgatctcctgctcaagagcccacagcgcttccctgagtcaccaaagcggttctgccccgcagacccactgcatagcgcagctcctgggccattctcagctagcgaagctccctatccagccccccctgctagccccgctccctatgctctgcctgtcgctgaacccgggctcgaggacgtgaaagatggcgtggatgctgtgccggcagctataagtacgagtgaagccgcaccttacgcccccccgagcggcctggagagctttttttctaactgcaaaagcttgccggaagctcctctcgacgtcgcaccggagccagcctgtgtggcggcggttgcccaggttgaggcgctcgggccgttggagaacagctttctcgacggaagccgcggtctctcacatttaggtcaagtagagcctgtcccttgggcggacgccttcgccggccccgaggacgacctcgacctcgggccatttagccttcccgagctgccactccagacaaaagacgcagccgatggagaggctgagcccgtcgaagaaagcttagccccacctgaagagatgccccctggggctccaggcgtgatcaatggaggcgatgtatctactgtggttgccgaggagcctccagccttgcctcccgaccaggcctccactaggctgcccgcagaattggagcccgaaccatcaggggagcccaaactggatgttgctctggaagccgccgtggaggccgagacagtgccggaggaaagggcccgcggagatccggactcatccgtggagcccgcacctgtgcctcctgagcagagacctctgggatcgggagatcagggcgcagaagccgagggccctcccgccgcttcgctgtgtgctccagacggaccagcaccgaacacagtggcgcaagctcaggccgccgatggtgccgggcccgaagacgataccgaagctagccgggcagccgcacctgccgaggggcctcccggaggcatccagccagaagccgctgaacctaagccaactgccgaggcacctaaagcacctcgggtggaggaaattcctcaacgtatgacacgcaatcgggcgcagatgctggctaaccaaagcaaacagggcccgccgccctccgaaaaagaatgtgctccaacaccggccccagtcacgagagcaaaggcccgaggcagcgaagacgacgatgcccaagcccagcaccccagaaaacgcaggttccagagaagcactcagcagctccagcaacagttgaatacttctacccaacagacccgggaggtgatccagcaaactcttgcagctatcgtcgacgctattaagctggatgcgattgagccctatcatagtgacagagctaacccctatttcgagtacttgcaaataaggaaaaagatcgaagagaaacgaaaaatcctctgctgtatcacaccacaagcaccgcagtgctacgcagagtacgtgacctataccgggtcatatttactcgacggcaagcctctctcaaagctccacatccccgtgatcgcaccccctccttccctagccgaaccactgaaagaactgttccgccagcaagaagccgtgaggggtaaactccgtttgcagcatagtatagagagggaaaaactcatcgtgtcttgtgagcaggaaatccttagggtgcattgccgagccgccaggacaattgcaaaccaggccgtccccttcagtgcctgtacaatgctgctggactccgaggtgtacaacatgccactagaaagccagggtgacgagaataagtcagtcagagacaggttcaatgcccgccagtttatatcctggttgcaggatgtggacgataagtatgatcggatgaaaacatgcctgctgatgcggcagcagcatgaggcggccgccctgaatgcggtacaacgaatggaatggcaactaaaggtgcaagaactggaccctgccgggcataaatccctctgcgttaatgaagtgcccagcttctacgttccaatggtggacgtaaatgatgatttcgttctgttgcctgcctag

SEQ ID NO: 175345 - DNA, 7992 bp, Artificial Sequence
  derived and/or modified sequence
atgcccaagggcggctgccccaaggccccccagcaggaggagctgcccctgagcagtgacatggtggagaagcagacaggcaagaaggacaaggacaaggtgtccctgaccaagacccccaagctggagagaggagatggcggcaaggaggtgcgggagcgggccagcaagaggaagctgcccttcaccgctggggccaatggagagcagaaggacagcgacacagagaagcagggccctgagaggaagaggatcaagaaggagcctgtgaccaggaaggccggcctgctgtttggcatgggcctgagcggcatccgggccggctaccccctgtctgagcggcagcaggtggccctgctgatgcagatgacagctgaggagagcgccaacagccctgtggacaccacccccaagcaccccagccagagcacagtgtgccagaagggcacccccaacagcgccagcaagaccaaggacaaggtgaacaagagaaatgaaagaggagagacccggctgcacagagctgccatcagaggagatgcccggcgcatcaaggagctgatcagcgagggcgcagatgtgaatgtgaaggactttgctggctggacagccctgcacgaggcctgcaacagaggctactatgatgtggccaagcagctgctggccgccggggctgaggtgaacaccaagggcctggatgatgacacccccctgcatgatgctgccaacaacggccactacaaggtggtgaagctgctgctgcgctatggaggcaacccccagcagagcaacaggaagggggagacccccctgaaggtggccaacagccccaccatggtgaacctgctgctgggcaagggcacctacaccagcagcgaggagagcagcacagagagcagcgaggaggaggatgcccccagctttgcccccagcagctctgtggatggcaacaacacagattctgaatttgagaagggcctgaagcacaaggccaagaaccctgagccccagaaggccacagcccctgtgaaggatgaatatgaatttgatgaagatgatgagcaggacagagtgccccctgtggatgacaagcacctgctgaagaaggactacaggaaggagaccaagagcaacagcttcatcagcatccccaagatggaggtgaagagctacaccaagaacaacaccatcgcccccaagaaggccagccaccgcatcctgagtgacaccagtgatgaggaggatgcctctgtgacagtgggcaccggggagaagctgcggctgagcgcccacaccatcctgcccggcagcaagacccgggagcccagcaatgccaagcagcagaaggagaagaacaaggtgaagaagaagaggaagaaggagaccaagggccgggaggtgcgctttgggaagagaagtgacaagttctgcagcagcgagagcgagagcgagagcagcgagagcggggaggatgaccgggacagcctgggcagcagcggctgcctgaagggcagccccctggtgctgaaggaccccagcctcttcagcagcctgagcgccagcagcaccagcagccacggcagcagcgctgcccagaagcagaaccccagccacacagaccagcacaccaagcactggaggacagacaactggaagaccatcagcagccctgcctggagcgaggtgagcagcctgagtgacagcaccaggacccggctgaccagcgagagtgactacagcagcgagggcagctctgtggagagcctgaagcctgtgaggaagaggcaggagcacaggaagagggccagcctgtctgagaagaagagccccttcctgagcagcgctgagggcgctgtgcccaagctggacaaggagggcaaggtggtgaagaagcacaagaccaagcacaagcacaagaacaaggagaagggccagtgcagcatcagccaggagctgaagctgaagagcttcacctatgaatatgaggacagcaagcagaagagtgacaaggccatcctgctggagaatgacctgagcacagagaacaagctgaaggtgctgaagcatgaccgggaccacttcaagaaggaggagaagctgagcaagatgaagctggaggagaaggagtggctgttcaaggatgagaagagcctgaagaggatcaaggacaccaacaaggacatcagccgctccttccgggaggagaaggacaggagcaacaaggccgagaaggagaggagcctgaaggagaagagccccaaggaggagaagctgcggctgtacaaggaggagaggaagaagaagagcaaggaccggcccagcaagctggagaagaagaatgacctgaaggaggacaagatcagcaaggagaaggagaagatcttcaaggaggacaaggagaagctgaagaaggagaaggtgtaccgggaggacagcgcctttgatgagtactgcaacaagaaccagttcctggagaatgaagacaccaagttcagcctgagtgatgaccagagggaccgctggttcagtgacctgagtgacagcagctttgacttcaagggagaagattcctgggacagccctgtgacagactacagagacatgaagagtgacagcgtggccaagctgatcctggagaccgtgaaggaggacagcaaggagaggagaagagacagccgggcccgggagaagagggactaccgggagcccttcttcaggaagaaggaccgggactacctggacaagaacagcgagaagaggaaggagcagacagagaagcacaagtctgtgcccggctacctgtctgagaaggacaagaagagaagagagagcgctgaggccggccgggacaggaaggatgccctggagagctgcaaggagaggagagatggccgggccaagccagaggaggcccaccgggaggagctgaaggaatgtggctgtgagagcggcttcaaggacaagagtgatggagactttgggaagggcctggagccctgggagcggcaccacccagcccgggagaaggagaagaaggatggccctgacaaggagaggaaggagaagaccaagccagagcgctacaaggagaagagcagtgacaaggacaagtctgagaagagcatcctggagaagtgccagaaggacaaggagtttgacaagtgcttcaaggagaagaaggacaccaaggagaagcacaaggacacccacggcaaggacaaggagaggaaggccagcctggaccagggcaaggagaagaaggagaaggccttccctggcatcatcagcgaggacttcagcgagaagaaggatgacaagaagggcaaggagaagtcctggtacatcgctgacatcttcacagatgaaagtgaagatgaccgggacagctgcatgggcagcggcttcaagatgggagaggccagtgacctgcccaggacagatggcctgcaggagaaggaggagggccgggaggcctatgccagtgacagacacaggaagagcagtgacaagcagcaccctgagcggcagaaggacaaggagccccgggacaggaggaaggacagaggagctgctgatgctggccgggacaagaaggagaaggtgtttgagaagcacaaggagaagaaggacaaggagagcacagagaagtacaaggacaggaaggaccgggcctctgtggacagcacccaggacaagaagaacaagcagaagctgcctgagaaggccgagaagaagcatgctgctgaggacaaggccaagagcaagcacaaggagaagagtgacaaggagcacagcaaggagaggaagagcagccgctctgcagatgctgagaagagcctgctggagaagctggaggaggaggccctgcacgagtaccgggaggacagcaatgacaagatcagcgaggtgtccagtgacagcttcacagaccggggccaggagcccggcctgacagccttcctggaggtgtccttcacagagcccccaggagatgacaagccccgggagagcgcctgcctgcctgagaagctgaaggagaaggagcggcaccgccacagcagcagcagcagcaagaagagccatgaccgggagcgggccaagaaggagaaggccgagaagaaggagaagggggaggactacaaggagggcggcagcaggaaggacagcggccagtatgagaaggacttcctggaggctgatgcctacggcgtgtcctacaacatgaaggctgacattgaagatgagctggacaagaccatcgagctgttcagcacagagaagaaggacaagaatgattctgagcgggagcccagcaagaagattgagaaggagctgaagccctacggcagcagcgccatcaacatcctgaaggagaagaagaagcgggagaagcaccgggagaagtggagagatgagaaggagcggcaccgggacagacatgctgatggcctgctgcggcaccacagagatgagctgctgcggcaccacagagatgagcagaagccagccacccgggacaaggacagccccccccgggtgctgaaggacaagagcagagatgagggcccccggctgggagatgccaagctgaaggagaagttcaaggatggagctgagaaggagaagggggaccctgtgaagatgagcaatggaaatgacaaggtggcccccagcaaggaccccgggaagaaggatgcccggccccgggagaagctgctgggagatggagacctgatgatgaccagctttgagaggatgctgagccagaaggacctggagattgaggagcggcacaagaggcacaaggagaggatgaagcagatggagaagctgcggcacaggtctggggaccccaagctgaaggagaaggccaagccagcagatgatggcaggaagaagggcctggacatcccagccaagaagcccccaggcctggacccccccttcaaggacaagaagctgaaggagagcacccccatccccccagctgctgagaacaagctgcacccagccagcggggctgacagcaaggactggctggccggcccccacatgaaggaggtgctgcctgccagccccaggccagaccagagccggcccactggagtgcccacccccacctctgtgctgagctgccccagctatgaggaggtgatgcacacccccaggacccccagctgcagcgcagatgattatgctgacctggtgtttgactgtgccgacagccagcacagcacccctgtgcccacagcccccaccagcgcctgcagccccagcttctttgaccgcttctctgtggccagcagcggcctgtctgaaaatgccagccaggccccagcccggcccctgagcaccaacctgtacagatctgtgtctgtggacatccggaggaccccagaggaggagttctctgtgggggacaagctgttccggcagcagagcgtgcctgctgccagcagctatgacagccccatgccacccagcatggaggaccgggcccccctgccccctgtgcctgctgagaagtttgcctgcctgagccctggctactacagcccagactatggcctgcccagccccaaggtggatgccctgcactgccccccagctgctgtggtgacagtgacccccagccctgagggcgtcttcagcagcctgcaggccaagcccagccccagccccagggctgagctgctggtgcccagcctggagggcgccctgcccccagacctggacaccagcgaggaccagcaggccacagctgccatcatccccccagagcccagctacctggagcccctggatgagggccccttctctgctgtgatcacagaggagcctgtggagtgggcccaccccagcgagcaggccctggccagcagcctgattggaggcaccagcgagaaccctgtgtcctggcctgtgggcagtgacctgctgctgaagagcccccagcgcttccctgagagccccaagcgcttctgcccagctgaccccctgcacagcgctgcccctggccccttcagcgccagcgaggccccctacccagcccccccagccagccctgccccctatgccctgcctgtggccgagcccggcctggaggatgtgaaggatggagtggatgctgtgcctgctgccatcagcaccagcgaggccgccccctatgccccacccagcggcctggagagcttcttcagcaactgcaagagcctgcctgaggcccccctggatgtggcccctgagcccgcctgtgtggccgctgtggcccaggtggaggccctgggccccctggagaacagcttcctggatggcagccggggcctgagccacctgggccaggtggagcctgtgccctgggcagatgcctttgctggcccagaagatgacctggacctgggccccttcagcctgcctgagctgcccctgcagaccaaggatgctgctgatggagaggccgagcctgtggaggagagcctggcccctcctgaggagatgcctcctggggcccctggggtcatcaatggaggagatgtgtccacagtggtggccgaggagcccccagccctgcccccagaccaggccagcacccggctgcctgctgagctggagcctgagcccagcggggagcccaagctggatgtggccctggaggccgctgtggaggccgagaccgtgcctgaggagcgggcccggggggaccctgacagctctgtggagcccgcccctgtgcccccagagcagaggcccctgggcagcggggaccagggcgctgaggccgagggccccccagctgccagcctgtgtgccccagatggccctgcccccaacacagtggcccaggcccaggccgcagatggagctggcccagaagatgacacagaggccagcagagctgctgccccagctgagggccccccaggcggcatccagcctgaggccgctgagcccaagcccacagctgaggcccccaaggccccccgggtggaggagatcccccagaggatgaccaggaacagagcccagatgctggccaaccagagcaagcagggccccccaccttctgagaaggaatgtgcccccaccccagcccctgtgacccgggccaaggcccggggctctgaagatgatgatgcccaggcccagcaccccaggaagaggcgcttccagaggagcacccagcagctgcagcagcagctgaacaccagcacccagcagacccgggaggtgatccagcagaccctggccgccatcgtggatgccatcaagctggatgccatcgagccctaccacagcgaccgggccaacccctactttgagtacctgcagatcaggaagaagattgaggagaagaggaagatcctgtgctgcatcaccccccaggccccccagtgctacgcagaatatgtgacctacacaggcagctacctgctggatggcaagcccctgagcaagctgcacatccctgtgattgcccccccacccagcctggccgagcccctgaaggagctgttccggcagcaggaggccgtgcggggcaagctgcggctgcagcacagcattgagcgggagaagctgattgtgtcctgtgagcaggagatcctgcgggtgcactgcagagctgcccggaccatcgccaaccaggccgtgcccttcagcgcctgcaccatgctgctggacagcgaggtgtacaacatgcccctggagagccagggagatgagaacaagtctgtgcgggaccgcttcaatgcccggcagttcatctcctggctgcaggatgtggatgacaagtatgacaggatgaagacctgcctgctgatgaggcagcagcatgaagctgctgccctgaatgctgtgcagaggatggagtggcagctgaaggtgcaggagctggaccctgctggccacaagagcctgtgtgtgaatgaggtgcccagcttctacgtgcccatggtggatgtgaatgatgactttgtgctgctgcctgcctag

SEQ ID NO: 175346 - DNA, 7992 bp, Artificial Sequence
  derived and/or modified sequence
atgcccaagggcggctgccccaaggccccccagcaggaggagctgcccctgagttctgacatggtggaaaaacagaccggaaaaaaggataaggacaaggtcagtctcaccaaaactcctaaactggaaagaggcgacggcggcaaagaggttcgagaacgtgcaagtaagagaaagttaccctttaccgctggcgctaacggcgagcaaaaagattcggacacagaaaaacagggtcccgagcgaaagagaatcaagaaggaacctgtgacaagaaaagcagggctgctttttggaatgggcctgtctggcatccgtgctggctaccccctcagcgaaagacaacaggtcgcactgctcatgcaaatgacagctgaggaatcagctaacagtcctgtggatacgacccccaaacacccgagccaaagcactgtctgccagaaaggaactccaaactcagcctccaaaaccaaggataaagtaaacaaacggaatgagcgcggagagacccgtttacatcgcgccgccattcgtggtgacgcgcgccgcatcaaggagctcataagcgaaggagccgatgtgaatgttaaggacttcgccgggtggacagcactgcacgaagcatgtaaccgtgggtactacgatgtggctaaacaactactggcagccggcgccgaggtgaataccaaaggcctggatgacgacaccccgctgcatgatgctgctaataatgggcactataaagtggtcaaactcttgctgcgatacggtggcaacccccagcagtctaacagaaagggggaaacaccgctgaaagtcgccaattcacctactatggtcaacctcttgctgggaaagggcacatacacaagcagcgaggagtctagcaccgaatcatctgaggaagaggacgcaccatcgttcgcccctagttcttccgtggatggcaataatactgatagcgagtttgaaaaagggctgaagcataaagccaaaaatccggagcctcagaaggccacagccccagtgaaagacgaatatgagtttgacgaagatgatgaacaggacagagttccgcctgtcgatgacaagcatttgcttaaaaaagactaccggaaggagacaaagtctaatagctttatcagtatacctaagatggaagtcaagagttacacaaaaaacaataccattgcgcccaagaaagcatcccacagaatactctcggacacatccgatgaagaggatgctagcgtcaccgtcgggacaggggaaaaactgaggttgtctgcccacaccatcctgccaggctctaagacaagggagccctccaacgctaagcagcagaaggagaaaaataaagtgaagaagaaaagaaaaaaagaaaccaagggtagggaagtaagatttggaaaaagatcggacaaattctgttcttctgagtcagagtctgagtcatccgagtcaggggaagacgacagagattctttaggaagttctggctgtctgaaggggtcaccactggtcctgaaggacccatcactattttcatccctcagtgcaagctctaccagctcacatgggagttctgccgcacagaagcagaatccctcacacacagatcagcacaccaagcactggcgcacagacaactggaaaactatttcctcgccagcttggagcgaggtcagttctctgtccgattctactagaacgcgccttacttctgagtccgactactcaagtgaaggatcatcagtcgaatcactcaagccagtgcgaaaacgccaggagcaccgcaagagggctagtttaagtgagaaaaaatccccctttctctcttcagcagagggtgcagtccccaagctggataaggaggggaaggtggtgaagaagcataagactaaacacaagcataagaataaggagaaaggccagtgctcgattagccaggaactcaaacttaaaagtttcacatatgaatacgaagactcaaagcagaaaagtgataaagcaattctgcttgagaacgatctcagcacagaaaacaagctcaaggtgctgaagcatgaccgggatcatttcaaaaaagaggagaaactgtccaagatgaaactggaggaaaaggaatggctgttcaaggatgaaaaaagcctgaagcggatcaaggatactaacaaagatattagcaggagctttagggaagagaaagacagaagtaataaggcagagaaggagaggtcactgaaggagaaaagccctaaagaagaaaagcttaggctctataaggaagaacgcaagaaaaagtccaaggacagacccagtaaactggaaaagaaaaatgatttgaaagaggataagattagtaaggagaaggaaaagatcttcaaagaggacaaggaaaagctgaaaaaggagaaggtgtatcgggaagattctgcctttgacgagtattgcaacaaaaaccagtttcttgagaacgaggacaccaagtttagcctcagtgatgaccaacgagacagatggttctccgacctcagtgatagtagttttgacttcaaaggagaggattcatgggactccccagttacggattaccgcgacatgaagagcgactctgtggcaaaactgatcttggagacagtgaaggaggactcaaaggagaggagaagagattcccgagccagggaaaagcgcgattacagagaaccgtttttcaggaaaaaagatcgcgactacctggacaaaaatagcgagaaacggaaggaacagaccgagaaacacaaatctgtaccaggctatctttctgaaaaggacaagaaaagacgcgaatcagcagaagccggcagagaccgcaaagacgccttggaaagttgcaaagagagacgggacggtagggccaagcctgaggaagctcatcgcgaagagctgaaggaatgcggatgtgagtccggctttaaagacaaatcagacggcgacttcggtaagggcctagagccctgggaaaggcatcacccagcccgagagaaagagaagaaggatggcccagataaggagcgtaaagagaagaccaagcctgagcgctacaaggagaaatcatctgacaaggataagtcagagaagagtattttagagaaatgtcaaaaggacaaagagttcgataagtgttttaaggaaaaaaaagacaccaaagagaagcataaagatacacacggaaaagacaaagagaggaaggcctccctggaccaaggtaaggaaaagaaggagaaggccttccctggaatcatttcagaagatttcagtgaaaaaaaggacgacaagaaaggcaaagaaaaatcctggtatattgccgacatatttacagacgagagcgaggatgacagagattcctgtatgggaagcggattcaaaatgggcgaagcctctgatctgccacggactgatggtctccaagagaaggaggagggtcgagaggcttacgcctctgaccgacaccgcaagtcttctgataaacaacaccctgagcgacagaaggataaagaaccgcgagacagacgaaaggaccggggcgcagctgacgcaggccgggataagaaagaaaaggtgtttgagaaacacaaagagaagaaagataaagagtcaacagagaaatataaggaccggaaagatcgggcctcagtcgactcaacgcaagacaagaagaataagcagaaacttccagaaaaagccgaaaagaaacacgccgccgaggataaggcgaaatccaagcataaagagaaatccgacaaggaacattctaaagaacgcaagtctagcagatctgctgatgccgagaagtcactgctcgaaaaactcgaggaagaggctctgcacgaataccgggaagacagcaacgataagatctcagaggtgtcctccgatagttttaccgatagagggcaagaaccgggcttaacagcgtttctggaggtgagcttcaccgaaccccccggggacgataaacctcgtgaatcagcctgtctgcccgaaaagttgaaggaaaaggagcgccacagacactcttcatcatcatccaaaaaatcacacgacagggagcgggcaaaaaaggaaaaagcagaaaagaaggagaagggagaggattacaaagaaggaggcagcagaaaagactcagggcagtatgagaaggactttctcgaagcagatgcttacggtgtttcttataacatgaaagctgacatcgaagacgagctggacaagaccattgagttgttcagtaccgagaaaaaggacaagaacgactccgagcgagagcctagtaagaagatcgagaaagaacttaagccttatggttctagtgcaataaacattcttaaagaaaagaagaaacgtgagaagcacagggagaagtggagggatgagaaggagcggcacagggatcgccacgcagatgggctcctcagacatcacagagacgagctgctgcggcatcatagggacgaacagaaaccggcgacgcgagacaaggattcgcctccaagagtcctgaaggataagtcaagagatgaaggaccccgactaggcgacgccaagttgaaagaaaagtttaaagatggcgccgagaaggagaagggggacccagtcaaaatgtctaatggcaacgacaaagttgctccctctaaagatcccgggaaaaaggatgcgagacctcgggagaaactgctgggagacggcgacctgatgatgaccagctttgaacggatgctatcacagaaagacctcgagatcgaagaacggcacaaaaggcataaggaacggatgaagcagatggaaaagctgcgccataggtcaggcgatcctaagctgaaagagaaggccaagccagccgacgacggaaggaagaagggtttggatatcccagctaaaaagcctcctggtcttgaccccccgtttaaggacaaaaagttaaaggagagcactcccatacctcctgccgctgagaacaaactgcacccagcgtctggcgccgatagcaaggattggctcgccggaccacacatgaaggaggtcctcccagcaagccctcgaccggatcagagcagacctactggagtgccaacccctacctctgtgctatcttgtcctagttatgaggaagtcatgcacaccccccgcacacctagctgctcagccgacgactatgctgacctggtgtttgactgcgcggatagccagcatagcactcccgtgcctacagctcctacatctgcatgctctccttccttttttgaccgtttctctgttgcatcttccgggttgtcagagaacgccagccaggctcccgcgcgtccactgagtacaaatctgtacaggtcagtatctgtcgatattagacgaacccccgaagaggagtttagtgttggagacaagctgtttaggcagcaaagtgtccctgccgccagttcctatgactccccaatgcccccaagcatggaggaccgcgctccattgccccctgtgcctgctgagaaatttgcatgtctcagccctggttattacagtccagattacggactaccctcaccaaaggtcgacgccctgcattgcccccctgccgcagtggtcaccgttactcccagccctgaaggtgttttcagtagcttacaggcaaagccctccccgagccctagagcagagttgctggtgccatccttagagggtgccttgccgcctgacctcgatacctcggaggatcagcaggctaccgccgcaatcataccccccgagcctagttatctggaacctctggacgaaggcccatttagcgctgtgattactgaagagcccgtggagtgggcacacccaagcgagcaggctctcgcctccagcctcattggggggacctctgagaatcccgtctcatggcccgtggggtctgacctgctgctgaagtctcctcaacgttttcccgagagcccgaaacgtttctgcccagctgatcccctgcactccgctgcaccggggcctttctcagcctcggaagccccctaccccgccccacccgcatccccagccccctatgctttgcccgttgccgagcccggccttgaagatgtcaaggacggcgtcgatgccgtgccagctgcaatttcaacgagcgaagctgccccatatgccccaccttcagggctcgagtcttttttttccaactgcaaatcgttgcccgaagccccgctggacgtcgcacccgagcccgcctgcgttgccgccgtggcccaggtcgaggccctgggccctctggagaatagcttcctggacggttcgaggggactgtcccatttgggacaggtggaaccagtgccatgggctgacgcattcgcggggccagaagacgatctggacctgggaccattttctttacccgagttgccccttcagaccaaggatgcggcagatggcgaagctgaacctgtggaagagagccttgcacccccagaggagatgccccctggagcccccggtgtgattaatggcggcgatgtctccacagtggtggccgaggaaccaccagccctcccccctgaccaagccagtactaggctcccagcagagctggagcctgaaccctctggagagccaaaacttgatgtagccctcgaagccgcagtagaggccgagactgtccctgaagagcgcgctagaggagacccagatagtagcgtggaaccagccccagttcccccggagcaaaggccactcggatcaggtgaccagggtgcggaggcagaggggccgccggcagcaagcttgtgcgctccggatggtcctgcgcctaatacagtggcacaggcgcaggcagcagacggcgccgggcccgaggatgataccgaggcctccagggctgccgccccggctgagggtcctccgggaggcatccagcccgaagctgccgagccaaagccaaccgcggaggcccccaaggcgccgagggtagaagaaattccccaacggatgacacgcaatcgggcacagatgctcgccaatcagtctaagcaaggccctccaccaagcgagaaagagtgcgccccaacccctgccccagttacacgggccaaggcccggggctccgaggacgacgacgcgcaggcacagcaccccaggaaacggagatttcaacggtcgacacaacagcttcagcaacagttgaatactagtactcaacagacaagagaggtcatccagcagacactggctgccattgtggatgctatcaaactcgatgctatcgaaccctaccatagtgaccgagctaatccttacttcgaatatcttcagattcgcaaaaagatcgaagaaaagaggaagattctctgctgcattacaccccaggccccccagtgttacgccgagtatgtaacctacactggctcttatctgctcgacgggaagccgctctcgaaactgcatatacccgttatcgctccaccaccatcccttgcagaaccactgaaggagttgttccggcagcaggaggcggttagaggcaaactgcggttgcagcactccattgagagggagaaacttattgtgtcgtgcgagcaagagatcctgcgagttcattgtagggccgctcgaacaatagcaaaccaggccgtcccattcagcgcctgcaccatgttgttggatagcgaagtgtataacatgccacttgagtcacagggcgatgaaaacaagagcgttagagataggttcaatgcacgtcagttcatcagttggctgcaggatgtggacgataagtatgatcgaatgaaaacttgtttgttgatgcggcagcaacacgaagcagcagccctgaacgctgttcagcgaatggagtggcagctgaaggttcaagaacttgatcctgctggccataaaagtctgtgcgtgaacgaagtgccttcgttttacgtgccaatggtggacgttaacgatgactttgttctactgccagcttag

SEQ ID NO: 175347 - DNA, 7992 bp, Artificial Sequence
  derived and/or modified sequence
atgcccaagggcggctgccccaaggccccccagcaggaggagctgccactgagtagtgacatggttgagaagcagactggcaagaaagataaagacaaagtctctttgacaaagacccccaaactcgagaggggcgatggaggaaaagaagtccgtgagcgagcatccaagcgcaaacttccgttcaccgccggcgccaatggagagcagaaagactctgataccgagaaacagggccccgagcgcaaacgtatcaagaaggagccggtgactcggaaagcgggactacttttcggtatgggactttccgggattagagctggttaccctctgagcgaacgccagcaggtggcactcctaatgcagatgacagctgaggagagcgctaattcgcctgtggacaccactcccaaacatccgagccagtcaaccgtctgtcagaagggtacccctaactcagcgtctaagacaaaggacaaggttaacaaacgaaacgaacgaggggaaacgcggctgcatcgggcagcgattagaggcgacgctagacgaatcaaggaactgatctccgagggtgctgatgtgaacgttaaggacttcgccggttggactgcgctacacgaggcctgtaaccgggggtactatgacgtggctaagcagcttctagctgctggtgcagaagtgaacactaaggggcttgacgacgatactcccctgcacgatgcggctaacaacggacactacaaggtcgtgaagcttctacttagatacggtggaaacccccagcagagcaataggaagggagaaactccacttaaagtagccaattctccaactatggttaaccttttactggggaaaggtacatacacaagctctgaagagtctagtacggagtcttccgaggaggaagacgcgccgtctttcgctccctcttcttccgtcgatgggaataacaccgactccgaattcgaaaagggtctcaaacacaaggcaaaaaacccagagcctcagaaagcaactgccccagtcaaagacgaatatgagtttgatgaggacgacgagcaagatcgggtcccacccgtggacgataaacacctactgaagaaagattatagaaaggagaccaaatctaacagcttcatatctatccccaaaatggaagtgaagtcatatacaaaaaacaacacaatcgccccgaagaaggcttctcataggatactttcggatacttcggacgaggaagatgccagcgtgacggtgggtaccggtgaaaagttgcgactgtcagctcacactatcttacccggatctaaaactagggaacccagcaacgccaagcaacagaaggagaagaacaaagtcaaaaaaaaacggaaaaaggaaacaaagggccgcgaagtgagattcggaaaaagatctgacaagttttgcagttccgaaagcgaatctgagtcctcagaatccggcgaagatgatcgggattctttgggatccagtgggtgcttaaaaggatctcctcttgtactgaaagaccccagtctgttctcatcacttagcgccagcagcacctcttcccacgggagcagcgcagcccagaaacagaacccatcgcatacagatcagcataccaaacattggagaactgacaattggaagaccatcagtagccctgcttggagcgaggtgagctctctgtcagatagcactaggacaagactgaccagtgagtccgattatagcagtgaaggttcatcagtggagtcactcaagcccgttcggaagagacaagagcatagaaaaagggcatctctgtcagagaagaagagccccttcttgtcttccgccgagggggccgttcccaagctcgacaaggaaggaaaggtggtgaaaaagcataaaactaaacacaagcacaaaaataaagaaaaagggcagtgctcaatctcgcaggagctgaagctgaagtcattcacctacgagtatgaagatagcaaacagaaatctgataaggccattcttctggagaacgatctttctaccgagaacaaactaaaggtcttgaaacacgaccgggaccattttaagaaagaagaaaagcttagcaagatgaaactcgaagaaaaagagtggctattcaaagatgaaaaatctctgaaacggattaaagacacgaacaaggacatttcgagatcttttcgcgaggaaaaagatagaagtaacaaggctgagaaagagcgctcactaaaggaaaagtcccccaaggaagagaagctgcgactgtacaaagaagaacggaagaagaagagcaaggacagaccaagtaagcttgagaagaagaatgatctcaaagaggataaaatctcgaaagagaaagagaagattttcaaggaagacaaagaaaagttgaaaaaggagaaggtgtatcgcgaggattctgcattcgacgagtactgcaataagaaccagtttctggagaatgaagacacaaaattttccctgagtgatgatcagcgagacagatggttttcagacctgagcgactcaagtttcgacttcaagggggaggatagttgggatagccccgtcaccgattaccgggacatgaagtccgatagcgtggctaagttgattttggaaaccgttaaggaagacagtaaagaacggaggcgcgactccagggccagagaaaaacgggattaccgcgaaccattcttcagaaagaaagaccgcgactacctggacaagaactctgaaaagcgtaaggaacaaactgaaaagcataagtccgtccctggatacttgagcgagaaagacaagaagaggcgcgagagtgcagaggccggccgagaccgcaaagatgcccttgagtcttgcaaagagcgtcgcgacggaagggcaaagcctgaggaagcccatagggaggagctgaaggagtgtggttgtgagtcaggattcaaagacaagtcggatggggattttggaaagggtttagagccgtgggaacggcaccaccccgctcgcgaaaaagagaagaaagacggtccagacaaggagagaaaggagaaaactaaaccggaacgatataaagaaaaatctagcgacaaggacaagagcgagaagtccatcttagagaagtgccaaaaagacaaggaattcgacaaatgttttaaggaaaagaaagatacgaaggaaaagcataaggatacacacggaaaagataaggagcgaaaggcaagtctggatcaaggaaaggagaagaaggaaaaggctttccctggcatcatcagcgaggacttcagcgaaaaaaaggatgacaagaaaggcaaggaaaagagttggtacattgcggatatctttactgatgaatctgaagacgatagggactcctgcatgggttcaggattcaagatgggagaggcttcagatctgccccgtaccgacgggctgcaggaaaaagaggaaggcagggaggcatacgccagcgaccgtcatcggaaaagctcggataagcagcatccagagcggcaaaaggataaggagccacgtgaccggagaaaggaccggggcgcagccgatgccggacgggacaagaaggagaaagtgttcgagaaacataaggaaaagaaagacaaggagagtaccgagaagtataaagaccgcaaagaccgcgcgtccgtcgactctacccaggacaagaaaaacaagcagaagcttccagaaaaggctgaaaagaagcacgccgctgaggataaagcgaagtccaaacacaaagagaagtcagacaaggaacactccaaggagcggaagtcgtctagatcagcggatgctgagaaatctctgttggagaaattagaagaagaggcccttcatgagtatagggaggactccaatgacaaaatcagcgaggttagctctgactcatttacagataggggccaagaacctggcctgaccgccttcttagaagtctcatttactgaaccccctggggatgacaagcctcgcgagagcgcgtgcttgccagagaaactcaaggagaaggaacgccatcggcatagctcatcctcctctaagaagtcacacgaccgcgagagggcaaagaaagagaaagcagaaaagaaggagaaaggagaggactacaaagagggaggttcccggaaagacagcgggcagtacgaaaaagacttccttgaagccgacgcctatggtgtgagctataacatgaaggctgacatcgaggacgaactcgacaagactatcgagctgttttctacagaaaaaaaagataaaaacgatagcgaacgagaaccttctaagaagattgagaaggaactcaaaccttacggcagctcagcaattaatatcctcaaagagaaaaagaagcgggagaaacacagggagaagtggcgtgatgaaaaggagcgccacagggataggcacgctgatggactccttagacaccaccgggacgaactgttgagacaccatcgcgacgagcagaagcctgccacacgtgacaaagacagcccaccccgagtcctgaaggacaaaagtagggacgaggggcctagattgggtgatgccaaactgaaggagaagtttaaggacggtgcagaaaaggagaagggagatcctgtgaaaatgtccaacgggaacgataaagtcgccccatcgaaggaccctggaaaaaaggatgctcgcccccgtgagaagctgttaggggacggcgaccttatgatgaccagctttgagcgcatgctgagccaaaaagacctcgaaatcgaagagagacacaagaggcataaagaacgtatgaagcagatggaaaagctgcgacacaggtccggggatccaaagctaaaggagaaagccaaaccggcagatgacggacggaagaaaggcttggacatccctgccaagaagccacccggcctagatccaccttttaaggacaagaaactgaaggaaagcacccccattcccccagcagccgagaataaactccaccctgccagcggcgcagactcgaaggattggcttgccggcccacatatgaaggaggtcctgccagcctcgcccaggccagaccagtcgaggccgaccggggtccctacccctacctccgttctgtcgtgtccttcatacgaggaagtgatgcatactcccagaacccccagctgcagcgcagatgactatgccgatctggtttttgactgtgccgattcacagcacagcacacccgttcctacggctccaacttccgcttgctcgccttcattttttgataggttttcagtggcctcttccgggctcagtgagaatgcctcacaggctccagctaggccactttcaacgaacctgtataggtcggtttctgtggacattaggaggacccctgaggaagaattttctgtaggcgacaagctcttcaggcagcagagtgtgcccgcggcctcatcatacgactcaccaatgccgcctagcatggaagacagagcaccattgccaccggtgcctgctgagaagtttgcttgcctatcacctggctactacagtcctgattatgggcttccttcacccaaggttgatgctctgcactgccctcctgccgccgttgtgacggttacaccttccccggagggagtattctcatcattgcaggctaaaccatctccatcaccccgggccgagttgcttgttccctccctggaaggagcgctgccccccgatctcgacacatctgaggatcagcaggccacagcagcgatcatccccccagagccctcgtacttggaaccattggatgagggcccattctccgccgtgattaccgaagagccagttgaatgggcgcatcctagcgagcaagcattagccagcagcctcatcggaggtaccagtgagaatccagtgagctggccagtgggctcagacctgttactcaagtctcctcagcgttttcccgagtctcccaaaaggttctgcccagccgatcccctgcattccgcagcgcccggaccttttagcgccagtgaggcaccttaccccgccccgccagcttctcctgccccttacgcactacccgttgcggaacccgggttggaggacgtgaaggacggtgttgatgccgttccagcggctatcagtaccagtgaggccgcaccttatgccccaccttcaggtttagagtcctttttttccaattgcaaatcactgccagaggcccctctcgacgtagcgcccgagcccgcatgtgtagccgcggtcgctcaggtcgaagcacttggtcccctagaaaacagttttctagatggttccagaggcctctcccacctggggcaggttgaaccagtgccctgggctgatgccttcgccgggcctgaagatgatcttgacctcggcccatttagcctccctgagctgccgttacaaacaaaagatgcagccgatggtgaggccgagccagtagaggagagtctggctcctcccgaggaaatgcccccgggcgcgccaggcgtcatcaatggtggggatgtcagcacagtggtggccgaagagcccccagccctcccgccagaccaggcatccacaaggttgccagccgagcttgagcccgagccttccggagagccaaaactggacgtggcattggaggccgcagtcgaagccgagactgtgcccgaagagcgggcccgaggggatcccgacagctccgtggaacctgctccagtaccccccgagcaacgtcctcttgggagcggagatcagggcgcagaggcggagggaccccctgccgcgtctctttgcgcacccgatggacccgctcctaataccgtcgcccaagctcaggcggcggatggagctggccctgaagacgacacagaggcaagcagggcagccgcacccgccgaggggccacccggcgggatccagccggaagcagcagagcctaaaccgacagccgaggctcccaaagcccccagggtggaggagattccccaaagaatgacccgcaaccgagctcagatgttagcaaatcaatccaaacagggcccgccgccctcagagaaagaatgcgctcccacacccgccccagtgacccgggccaaagccagaggctccgaagatgacgatgcccaggcccagcaccctagaaaacgcagatttcagcggtctacccagcaactgcaacaacaactgaacacaagcacccagcagaccagggaggtgatacagcagacgctggcagccatcgtggacgccatcaagttagacgccatcgaaccttaccattctgatagagccaacccctactttgagtacctccagataagaaagaagatcgaagaaaagcggaaaatcctttgttgtattaccccccaggccccacagtgctatgccgagtacgtaacttatactggaagctacctgctggatgggaaacctctctcgaagctacacatccctgtcattgcccctccccctagtctggctgaaccacttaaagagctgtttcgccagcaagaagctgtcaggggaaagctgaggttacagcattccatcgaacgagaaaaacttatcgtatcatgcgagcaggagatccttcgggtccattgtagagcagctcggaccatcgcaaaccaggctgtcccctttagcgcttgtacaatgcttctggacagcgaagtatataacatgccactggaatcacagggcgacgagaataagtccgtcagggataggttcaacgccaggcaatttatcagctggctgcaggacgtggatgacaaatacgatcggatgaaaacttgcctcttgatgagacagcagcacgaggccgcagcattaaacgctgttcagcggatggaatggcagctgaaggtccaggagctagaccccgcaggccacaagtcactttgtgtcaacgaagttccttcattctacgtaccaatggtggacgtgaatgacgacttcgtcctcttacccgcttag

SEQ ID NO: 175348 - DNA, 9304 bp, Artificial Sequence
  derived and/or modified sequence
agaggccgccctgagacggtgcgcgatggaccgagggccccagccggggaggcgccgccgccgagcccgcggccagacgccccatcagtagcgtccgcaccgggagccgcggctctcgcccgagccgtgggcgcgcccgaggggcgggctcgcctcccgccgtccctcgcagctctgccgggcccgagcccgcgccgccgccgccgccgccttgccgctcgggccgcgcggcccgggaaacgcggccgcgggctgcatgggcagcgcccgcgccccgccgctgagccgtcgcggagccgcgcagccctcggagcacgaatatatacagccctgctctgggacacacctccattggatttaaaagacagtcctcgtcagcactgactttcagctatggaatcgcagacggttgatgatgaagcgccggccgtgtaaatgaagatcgggtgaggagcaggacgatgcccaagggtgggtgccctaaagcaccacagcaggaagagcttcccctcagcagcgacatggtggagaagcagactgggaaaaaggataaagataaagtttctctaaccaagaccccaaaactggagcgtggcgatggcgggaaggaggtgagggagcgagccagcaagcggaagctgcccttcaccgcgggcgccaatggggagcagaaggactcggacacagagaagcagggccctgagcggaagaggattaagaaggagcctgtcacccggaaggccgggctgctgtttggcatggggctgtctggaatccgagccggctaccccctctccgagcgccagcaggtggcccttctcatgcagatgacggccgaggagtctgccaacagcccagtggacacaacaccaaagcacccctcccagtctacagtgtgtcagaagggaacgcccaactctgcctcaaaaaccaaagataaagtgaacaagagaaacgagcgtggagagacccgcctgcaccgagccgccatccgcggggacgcccggcgcatcaaagagctcatcagcgagggggcagacgtcaacgtcaaggacttcgcaggctggacggcgctgcacgaggcctgtaaccggggctactacgacgtcgcgaagcagctgctggctgcaggtgcggaggtgaacaccaagggcctagatgacgacacgcctttgcacgacgctgccaacaacgggcactacaaggtggtgaagctgctgctgcggtacggagggaacccgcagcagagcaacaggaaaggcgagacgccgctgaaagtggccaactcccccacgatggtgaacctcctgttaggcaaaggcacttacacttccagcgaggagagctcgacggagagctcagaagaggaagacgcaccatccttcgcaccttccagttcagtcgacggcaacaacacggactccgagttcgaaaaaggcctcaagcacaaggccaagaacccagagccacagaaggccacggcccccgtcaaggacgagtatgagtttgatgaggacgacgagcaggacagggttcctccggtggacgacaagcacctattgaaaaaggactacagaaaagaaacgaaatccaatagttttatctctatacccaaaatggaggttaaaagttacactaaaaataacacgattgcaccaaagaaagcgtcccatcgtatcctgtcagacacgtcggacgaggaggacgcgagtgtcaccgtggggacaggagagaagctgagactctcggcacatacgatattgcctggtagtaagacacgagagccttctaatgccaagcagcagaaggaaaaaaataaagtgaaaaagaagcgaaagaaagaaacaaaaggcagagaggttcgcttcggaaagcggagcgacaagttctgctcctcggagtcggagagcgagtcctcagagagtggggaggatgacagggactctctggggagctctggctgcctcaaggggtccccgctggtgctgaaggacccctccctgttcagctccctctctgcctcctccacctcgtctcacgggagctctgccgcccagaagcagaaccccagccacacagaccagcacaccaagcactggcggacagacaattggaaaaccatttcttccccggcttggtcagaggtcagttctttatcagactccacaaggacgagactgacaagcgagtctgactactcctctgagggctccagtgtggaatcgctgaagccagtgaggaagaggcaggagcacaggaagcgagcctccctgtcggagaagaagagccccttcctgtccagcgcggagggcgctgtccccaaactggacaaggaggggaaagttgtcaaaaaacataaaacaaaacacaaacacaaaaacaaggagaagggacagtgttccatcagccaagagctgaagttgaaaagttttacttacgaatatgaggactccaagcagaagtcagataaggctatactgttagagaatgatctttccactgaaaacaagctaaaagtgttaaagcacgatcgcgaccactttaaaaaagaagagaaacttagcaaaatgaaattagaagaaaaagaatggctctttaaagatgaaaaatcactgaagagaatcaaagacacaaacaaagacatcagcaggtctttccgagaagagaaagaccgttcgaataaagcagaaaaggagagatcgctgaaggaaaagtctccgaaagaagaaaaactgagactgtacaaagaggagagaaagaagaaatcaaaagaccggccctcaaaattagagaagaagaatgatttaaaagaggacaaaatttcaaaagagaaggagaagatttttaaagaagataaagaaaaactcaaaaaagaaaaggtttatagggaagattctgcttttgacgaatattgtaacaaaaatcagtttctggagaatgaagacaccaaatttagcctttctgacgatcagcgagatcggtggttttctgacttgtccgattcatcctttgatttcaaaggggaggacagctgggactcgccagtgacagactacagggacatgaagagcgactctgtggccaagctcatcttggagacggtgaaggaggacagcaaggagaggaggcgggacagccgggcccgggagaagcgagactacagagagcccttcttccgaaagaaggacagggactatttggataaaaactctgagaagaggaaagagcagaccgaaaagcataaaagtgtccctggctacctttcggaaaaggacaagaagaggagagagtccgcagaggccgggcgggacagaaaggacgccctggagagctgcaaggagcgcagggacggcagggccaagcccgaggaggcgcaccgggaggagctgaaggagtgtggctgcgagagtggcttcaaggacaagtccgacggcgactttgggaagggcctggagccgtgggaacggcaccacccagcacgagagaaggagaagaaggatggccccgataaggaaaggaaggagaagacaaaaccagaaagatacaaagagaaatccagtgacaaggacaaaagtgagaaatcaatcctggaaaaatgtcagaaggacaaagaatttgataaatgttttaaagagaaaaaagataccaaggaaaaacataaagacacacatggcaaagacaaagaaaggaaagcgtctctcgaccaagggaaagagaagaaggagaaggctttccctgggatcatctcagaagacttctctgaaaaaaaagatgacaagaaaggcaaagagaaaagctggtacatcgcagacatcttcacagatgagagtgaggacgacagagacagctgcatggggagcgggttcaagatgggagaggccagcgacttgccgaggacggacggcctccaggagaaggaggaaggacgggaggcctatgcctccgacagacacaggaagtcttctgacaagcagcaccctgagaggcagaaggacaaggagcccagagacaggagaaaggaccgaggggctgccgacgcggggagagacaaaaaagagaaagtctttgaaaagcacaaggagaagaaggataaagagtccacagaaaagtacaaggacaggaaggacagagcctcagtggactccacgcaagataagaaaaataaacagaagctccccgagaaggctgaaaagaagcacgctgccgaagacaaggctaaaagcaaacacaaagagaagtcggacaaagaacattccaaggagaggaagtcctcgagaagtgccgacgcggaaaaaagcctgcttgaaaagttggaagaagaggctctccatgagtacagagaagactccaacgataaaatcagcgaggtctcctctgacagcttcacggaccgagggcaggagccggggctgactgccttcctggaggtctctttcacggagccacctggagacgacaagccgagggagagcgcctgcctccctgagaagctgaaagagaaggagaggcacagacactcctcatcttcatccaagaagagccacgaccgagagcgagccaagaaagagaaggccgagaagaaagagaagggcgaagattacaaggagggcggtagcaggaaggactccggccagtacgaaaaggacttcctggaggcggatgcttacggagtttcttacaacatgaaagctgacatagaagatgagctagataaaaccattgaattgttttctaccgaaaagaaagataaaaatgattccgagagagaaccttccaagaaaatagaaaaggaactaaagccttatggatctagtgccatcaacatcctaaaagagaagaagaagagagagaaacacagggagaaatggagagacgagaaggagaggcaccgggacaggcatgcggatgggctgctgcggcatcacagggacgagctcctgcggcatcacagggacgagcagaagcccgccaccagggacaaggacagcccgccccgcgtgctcaaagacaagtccagggacgagggcccgaggctcggcgatgccaaactgaaggagaaattcaaggacggtgcagagaaagaaaagggcgacccagtgaagatgagcaacgggaatgataaggtagcgccatccaaagacccaggcaagaaagacgccaggcccagggagaagctcctgggggacggcgacctgatgatgaccagcttcgagaggatgctgtcccagaaggacctggagatcgaggagcgccacaagcggcacaaggagaggatgaagcaaatggagaagctgaggcaccggtccggagaccccaagctcaaggagaaggcgaagccggcagacgacgggcggaagaagggtctggacattcctgctaagaaaccgccggggctggaccctccatttaaagacaaaaagctcaaagagtcgactcctattccacctgccgcggaaaataagctacacccagcatcaggtgcagactccaaagactggctggcaggccctcacatgaaagaggtcctgcctgcgtcccccaggcctgaccagagccggcccactggcgtgcccacccctacgtcggtgctatcctgccccagctacgaggaggtgatgcacacgcccaggaccccgtcctgcagcgccgatgactacgcggacctcgtgttcgactgcgccgactcgcagcactccacgcccgtgcccaccgctcccaccagcgcctgctccccctcctttttcgacaggttctccgtggcttcaagtgggctttcggaaaacgccagccaggctcctgccaggcctctctccacaaacctttaccgctcggtctctgtcgacattaggaggacccccgaggaagaattcagcgtcggagacaagctcttcaggcagcagagcgttcctgctgcctccagctacgactctcccatgccaccctcgatggaagacagggcgcccctgcccccggttcccgcggagaagtttgcctgcttgtcgccagggtactactccccagactatggcctcccgtcgcccaaagtcgacgctttgcactgcccaccggctgccgttgtcactgtcaccccgtctccagagggcgtcttctcaagtttacaagcaaaaccttccccttcccccagagccgagctgctggttccttccctcgaaggggcccttcccccggacctggacacctccgaggaccagcaggcgacggccgccatcatccccccggagcccagctacctggagccgctggacgagggtcccttcagcgccgtcatcaccgaggagcccgttgagtgggcccacccctccgagcaggcgcttgcctctagcctgatcgggggcacctctgaaaaccctgtgagctggcctgtgggctcggacctcctgctgaagtctccacagagattccccgagtccccaaagcgtttctgccccgcggaccccctccactctgccgccccagggcccttcagcgcctcggaggcgccgtaccccgcccctcccgcctctcctgccccgtacgctctgcccgtcgctgagccggggctggaggacgtcaaggacggagtggacgccgtccccgccgccatctccacctcagaggcggctccctacgcccctccctccgggctggagtccttcttcagcaactgcaagtcacttccggaagccccgctggacgtggcccccgagcccgcctgtgtagccgctgtggctcaggtggaggctctggggcccctggaaaatagcttcctggacggcagccgcggcctgtctcacctcggccaggtggagccggtgccctgggcggacgccttcgccggccccgaggacgacctggacctggggcccttctccctgccggagcttcccctgcagactaaagatgccgcagatggtgaagcggaacccgtggaagaaagtcttgctcctccagaagagatgcctccaggggcccccggggtcataaacggtggggatgtttccaccgtagtggctgaggagccgccggcactgcctcctgaccaggcctccacccggctccctgcagagctcgagcctgagccctcaggggagccaaagctggacgtggctctagaagctgcggtggaggcggagacggtgccggaagagagggcccgtggggatccggactccagcgtggagcccgcgcccgttcccccagaacagcgcccactggggagcggagaccagggggctgaggctgaaggcccccccgccgcgtccctctgtgcccctgacggccccgccccgaacactgtggcacaagctcaggccgcagacggtgccggccccgaggacgacactgaggcctcccgtgccgccgccccagccgaaggccctcctggcggcatccagccggaagccgcagaaccaaaacccacggccgaagccccgaaggccccccgagtggaggagatccctcagcgcatgaccaggaaccgggcgcagatgctcgcgaaccagagcaagcagggcccgcccccctccgagaaggagtgcgcccccacccctgccccggtcaccagggccaaggcccgcggctccgaggacgacgacgcccaggcccagcatccgcgcaaacgccgctttcagcgctccacccagcagctgcagcagcagctgaacacgtccacgcagcagacgcgggaggtgatccagcagacgctggccgccatcgtggacgccatcaagctggatgccatcgagccctaccacagcgacagggccaacccctacttcgaatacctgcagatcaggaagaagatcgaggagaagcgcaagatcctgtgctgtatcacgccgcaggcgccccagtgctacgccgagtacgtcacctacacgggctcctacctcctggacggcaagccgctcagcaagctccacatccccgtgatcgcaccccctccctccctggcggagcccctgaaggagctgttcaggcagcaggaggccgtccggggaaagctgcgtctacagcacagcatcgagcgggagaagctgatcgtatcctgtgagcaggagattctgcgggttcactgccgggcggccaggaccatcgccaaccaggcagtgccattcagcgcctgcacgatgctgctggactccgaggtctacaacatgcccctggagagccagggtgacgagaacaagtcagtgcgcgaccgtttcaacgcccgccagttcatctcctggctccaggacgtggatgacaagtatgaccgcatgaagacttgcctcctcatgcggcagcagcacgaggccgcggccctgaacgccgtgcagaggatggagtggcagctgaaggtgcaggaactggaccccgccgggcacaagtccctgtgcgtgaacgaggtgccctccttctacgtgcccatggtcgacgtcaacgacgactttgtattgttgccggcatgacaccgcgggacggccgcaggacgcaggcgagggccgcacggctgcccaggactgctgctgagccccaggggcggaggagggagcgccctgtccacccgggcggggagagaccccgagagagactgcacttggccacagcgcctccatcccttccagactggtccagacgtcggggaggtgaaacacgtctcttctctaccagctgccgcggcgggggcaaagcccccagagcctcactggccccggcgggatgaggagaccatgccgggcgcgcacacacggcagcttctgtttgaaaacggcgaccttcgggcccttttctccagcaactgcagaggcatttcaggagttggagaacggagtacatttttaaaattttttgttccattctgatcaactaaagaaaattaaggtgtccacctctcacaaacagtgacctgcaggtcggaggggcaggagccccatcccagccgtggttctgttgccgccgagctgcgacggcctcagactgggcttcagacctggtgcggagccaggcggagggacacagagccaggactcccagccgtattgaaatggagtcaaatccgcgtggtttgtatcttctttcctttaatcttgggcattttgtttctctttctgagaacgtaacttgaaacactacagagccaataatcatataaaaagtgtatccgtaaacgctgtacagttttatataccttcacaatgtacttttgctgccttctagataatttattttgcaacacattactgcacagttgtaaataacttatgtactgtaacatcactttcagttatgtgtaaagaaataaataaattaattaaaatgc

SEQ ID NO: 175349 - DNA, 9129 bp, Artificial Sequence
  derived and/or modified sequence
ggccgcgggctgcatgggcagcgcccgcgccccgccgctgagccgtcgcggagccgcgcagccctcggagcacgcccgtgcagcctgccaggactcttccagacacgggatttgtcggtgaacaacgcagagctgatgcagacataatatatacagccctgctctgggacacacctccattggatttaaaagacagtcctcgtcagcactgactttcagctatggaatcgcagacggttgatgatgaagcgccggccgtgtaaatgaagatcgggtgaggagcaggacgatgcccaagggtgggtgccctaaagcaccacagcaggaagagcttcccctcagcagcgacatggtggagaagcagactgggaaaaaggataaagataaagtttctctaaccaagaccccaaaactggagcgtggcgatggcgggaaggaggtgagggagcgagccagcaagcggaagctgcccttcaccgcgggcgccaatggggagcagaaggactcggacacagagaagcagggccctgagcggaagaggattaagaaggagcctgtcacccggaaggccgggctgctgtttggcatggggctgtctggaatccgagccggctaccccctctccgagcgccagcaggtggcccttctcatgcagatgacggccgaggagtctgccaacagcccagtggacacaacaccaaagcacccctcccagtctacagtgtgtcagaagggaacgcccaactctgcctcaaaaaccaaagataaagtgaacaagagaaacgagcgtggagagacccgcctgcaccgagccgccatccgcggggacgcccggcgcatcaaagagctcatcagcgagggggcagacgtcaacgtcaaggacttcgcaggctggacggcgctgcacgaggcctgtaaccggggctactacgacgtcgcgaagcagctgctggctgcaggtgcggaggtgaacaccaagggcctagatgacgacacgcctttgcacgacgctgccaacaacgggcactacaaggtggtgaagctgctgctgcggtacggagggaacccgcagcagagcaacaggaaaggcgagacgccgctgaaagtggccaactcccccacgatggtgaacctcctgttaggcaaaggcacttacacttccagcgaggagagctcgacggagagctcagaagaggaagacgcaccatccttcgcaccttccagttcagtcgacggcaacaacacggactccgagttcgaaaaaggcctcaagcacaaggccaagaacccagagccacagaaggccacggcccccgtcaaggacgagtatgagtttgatgaggacgacgagcaggacagggttcctccggtggacgacaagcacctattgaaaaaggactacagaaaagaaacgaaatccaatagttttatctctatacccaaaatggaggttaaaagttacactaaaaataacacgattgcaccaaagaaagcgtcccatcgtatcctgtcagacacgtcggacgaggaggacgcgagtgtcaccgtggggacaggagagaagctgagactctcggcacatacgatattgcctggtagtaagacacgagagccttctaatgccaagcagcagaaggaaaaaaataaagtgaaaaagaagcgaaagaaagaaacaaaaggcagagaggttcgcttcggaaagcggagcgacaagttctgctcctcggagtcggagagcgagtcctcagagagtggggaggatgacagggactctctggggagctctggctgcctcaaggggtccccgctggtgctgaaggacccctccctgttcagctccctctctgcctcctccacctcgtctcacgggagctctgccgcccagaagcagaaccccagccacacagaccagcacaccaagcactggcggacagacaattggaaaaccatttcttccccggcttggtcagaggtcagttctttatcagactccacaaggacgagactgacaagcgagtctgactactcctctgagggctccagtgtggaatcgctgaagccagtgaggaagaggcaggagcacaggaagcgagcctccctgtcggagaagaagagccccttcctgtccagcgcggagggcgctgtccccaaactggacaaggaggggaaagttgtcaaaaaacataaaacaaaacacaaacacaaaaacaaggagaagggacagtgttccatcagccaagagctgaagttgaaaagttttacttacgaatatgaggactccaagcagaagtcagataaggctatactgttagagaatgatctttccactgaaaacaagctaaaagtgttaaagcacgatcgcgaccactttaaaaaagaagagaaacttagcaaaatgaaattagaagaaaaagaatggctctttaaagatgaaaaatcactgaagagaatcaaagacacaaacaaagacatcagcaggtctttccgagaagagaaagaccgttcgaataaagcagaaaaggagagatcgctgaaggaaaagtctccgaaagaagaaaaactgagactgtacaaagaggagagaaagaagaaatcaaaagaccggccctcaaaattagagaagaagaatgatttaaaagaggacaaaatttcaaaagagaaggagaagatttttaaagaagataaagaaaaactcaaaaaagaaaaggtttatagggaagattctgcttttgacgaatattgtaacaaaaatcagtttctggagaatgaagacaccaaatttagcctttctgacgatcagcgagatcggtggttttctgacttgtccgattcatcctttgatttcaaaggggaggacagctgggactcgccagtgacagactacagggacatgaagagcgactctgtggccaagctcatcttggagacggtgaaggaggacagcaaggagaggaggcgggacagccgggcccgggagaagcgagactacagagagcccttcttccgaaagaaggacagggactatttggataaaaactctgagaagaggaaagagcagaccgaaaagcataaaagtgtccctggctacctttcggaaaaggacaagaagaggagagagtccgcagaggccgggcgggacagaaaggacgccctggagagctgcaaggagcgcagggacggcagggccaagcccgaggaggcgcaccgggaggagctgaaggagtgtggctgcgagagtggcttcaaggacaagtccgacggcgactttgggaagggcctggagccgtgggaacggcaccacccagcacgagagaaggagaagaaggatggccccgataaggaaaggaaggagaagacaaaaccagaaagatacaaagagaaatccagtgacaaggacaaaagtgagaaatcaatcctggaaaaatgtcagaaggacaaagaatttgataaatgttttaaagagaaaaaagataccaaggaaaaacataaagacacacatggcaaagacaaagaaaggaaagcgtctctcgaccaagggaaagagaagaaggagaaggctttccctgggatcatctcagaagacttctctgaaaaaaaagatgacaagaaaggcaaagagaaaagctggtacatcgcagacatcttcacagatgagagtgaggacgacagagacagctgcatggggagcgggttcaagatgggagaggccagcgacttgccgaggacggacggcctccaggagaaggaggaaggacgggaggcctatgcctccgacagacacaggaagtcttctgacaagcagcaccctgagaggcagaaggacaaggagcccagagacaggagaaaggaccgaggggctgccgacgcggggagagacaaaaaagagaaagtctttgaaaagcacaaggagaagaaggataaagagtccacagaaaagtacaaggacaggaaggacagagcctcagtggactccacgcaagataagaaaaataaacagaagctccccgagaaggctgaaaagaagcacgctgccgaagacaaggctaaaagcaaacacaaagagaagtcggacaaagaacattccaaggagaggaagtcctcgagaagtgccgacgcggaaaaaagcctgcttgaaaagttggaagaagaggctctccatgagtacagagaagactccaacgataaaatcagcgaggtctcctctgacagcttcacggaccgagggcaggagccggggctgactgccttcctggaggtctctttcacggagccacctggagacgacaagccgagggagagcgcctgcctccctgagaagctgaaagagaaggagaggcacagacactcctcatcttcatccaagaagagccacgaccgagagcgagccaagaaagagaaggccgagaagaaagagaagggcgaagattacaaggagggcggtagcaggaaggactccggccagtacgaaaaggacttcctggaggcggatgcttacggagtttcttacaacatgaaagctgacatagaagatgagctagataaaaccattgaattgttttctaccgaaaagaaagataaaaatgattccgagagagaaccttccaagaaaatagaaaaggaactaaagccttatggatctagtgccatcaacatcctaaaagagaagaagaagagagagaaacacagggagaaatggagagacgagaaggagaggcaccgggacaggcatgcggatgggctgctgcggcatcacagggacgagctcctgcggcatcacagggacgagcagaagcccgccaccagggacaaggacagcccgccccgcgtgctcaaagacaagtccagggacgagggcccgaggctcggcgatgccaaactgaaggagaaattcaaggacggtgcagagaaagaaaagggcgacccagtgaagatgagcaacgggaatgataaggtagcgccatccaaagacccaggcaagaaagacgccaggcccagggagaagctcctgggggacggcgacctgatgatgaccagcttcgagaggatgctgtcccagaaggacctggagatcgaggagcgccacaagcggcacaaggagaggatgaagcaaatggagaagctgaggcaccggtccggagaccccaagctcaaggagaaggcgaagccggcagacgacgggcggaagaagggtctggacattcctgctaagaaaccgccggggctggaccctccatttaaagacaaaaagctcaaagagtcgactcctattccacctgccgcggaaaataagctacacccagcatcaggtgcagactccaaagactggctggcaggccctcacatgaaagaggtcctgcctgcgtcccccaggcctgaccagagccggcccactggcgtgcccacccctacgtcggtgctatcctgccccagctacgaggaggtgatgcacacgcccaggaccccgtcctgcagcgccgatgactacgcggacctcgtgttcgactgcgccgactcgcagcactccacgcccgtgcccaccgctcccaccagcgcctgctccccctcctttttcgacaggttctccgtggcttcaagtgggctttcggaaaacgccagccaggctcctgccaggcctctctccacaaacctttaccgctcggtctctgtcgacattaggaggacccccgaggaagaattcagcgtcggagacaagctcttcaggcagcagagcgttcctgctgcctccagctacgactctcccatgccaccctcgatggaagacagggcgcccctgcccccggttcccgcggagaagtttgcctgcttgtcgccagggtactactccccagactatggcctcccgtcgcccaaagtcgacgctttgcactgcccaccggctgccgttgtcactgtcaccccgtctccagagggcgtcttctcaagtttacaagcaaaaccttccccttcccccagagccgagctgctggttccttccctcgaaggggcccttcccccggacctggacacctccgaggaccagcaggcgacggccgccatcatccccccggagcccagctacctggagccgctggacgagggtcccttcagcgccgtcatcaccgaggagcccgttgagtgggcccacccctccgagcaggcgcttgcctctagcctgatcgggggcacctctgaaaaccctgtgagctggcctgtgggctcggacctcctgctgaagtctccacagagattccccgagtccccaaagcgtttctgccccgcggaccccctccactctgccgccccagggcccttcagcgcctcggaggcgccgtaccccgcccctcccgcctctcctgccccgtacgctctgcccgtcgctgagccggggctggaggacgtcaaggacggagtggacgccgtccccgccgccatctccacctcagaggcggctccctacgcccctccctccgggctggagtccttcttcagcaactgcaagtcacttccggaagccccgctggacgtggcccccgagcccgcctgtgtagccgctgtggctcaggtggaggctctggggcccctggaaaatagcttcctggacggcagccgcggcctgtctcacctcggccaggtggagccggtgccctgggcggacgccttcgccggccccgaggacgacctggacctggggcccttctccctgccggagcttcccctgcagactaaagatgccgcagatggtgaagcggaacccgtggaagaaagtcttgctcctccagaagagatgcctccaggggcccccggggtcataaacggtggggatgtttccaccgtagtggctgaggagccgccggcactgcctcctgaccaggcctccacccggctccctgcagagctcgagcctgagccctcaggggagccaaagctggacgtggctctagaagctgcggtggaggcggagacggtgccggaagagagggcccgtggggatccggactccagcgtggagcccgcgcccgttcccccagaacagcgcccactggggagcggagaccagggggctgaggctgaaggcccccccgccgcgtccctctgtgcccctgacggccccgccccgaacactgtggcacaagctcaggccgcagacggtgccggccccgaggacgacactgaggcctcccgtgccgccgccccagccgaaggccctcctggcggcatccagccggaagccgcagaaccaaaacccacggccgaagccccgaaggccccccgagtggaggagatccctcagcgcatgaccaggaaccgggcgcagatgctcgcgaaccagagcaagcagggcccgcccccctccgagaaggagtgcgcccccacccctgccccggtcaccagggccaaggcccgcggctccgaggacgacgacgcccaggcccagcatccgcgcaaacgccgctttcagcgctccacccagcagctgcagcagcagctgaacacgtccacgcagcagacgcgggaggtgatccagcagacgctggccgccatcgtggacgccatcaagctggatgccatcgagccctaccacagcgacagggccaacccctacttcgaatacctgcagatcaggaagaagatcgaggagaagcgcaagatcctgtgctgtatcacgccgcaggcgccccagtgctacgccgagtacgtcacctacacgggctcctacctcctggacggcaagccgctcagcaagctccacatccccgtgatcgcaccccctccctccctggcggagcccctgaaggagctgttcaggcagcaggaggccgtccggggaaagctgcgtctacagcacagcatcgagcgggagaagctgatcgtatcctgtgagcaggagattctgcgggttcactgccgggcggccaggaccatcgccaaccaggcagtgccattcagcgcctgcacgatgctgctggactccgaggtctacaacatgcccctggagagccagggtgacgagaacaagtcagtgcgcgaccgtttcaacgcccgccagttcatctcctggctccaggacgtggatgacaagtatgaccgcatgaagacttgcctcctcatgcggcagcagcacgaggccgcggccctgaacgccgtgcagaggatggagtggcagctgaaggtgcaggaactggaccccgccgggcacaagtccctgtgcgtgaacgaggtgccctccttctacgtgcccatggtcgacgtcaacgacgactttgtattgttgccggcatgacaccgcgggacggccgcaggacgcaggcgagggccgcacggctgcccaggactgctgctgagccccaggggcggaggagggagcgccctgtccacccgggcggggagagaccccgagagagactgcacttggccacagcgcctccatcccttccagactggtccagacgtcggggaggtgaaacacgtctcttctctaccagctgccgcggcgggggcaaagcccccagagcctcactggccccggcgggatgaggagaccatgccgggcgcgcacacacggcagcttctgtttgaaaacggcgaccttcgggcccttttctccagcaactgcagaggcatttcaggagttggagaacggagtacatttttaaaattttttgttccattctgatcaactaaagaaaattaaggtgtccacctctcacaaacagtgacctgcaggtcggaggggcaggagccccatcccagccgtggttctgttgccgccgagctgcgacggcctcagactgggcttcagacctggtgcggagccaggcggagggacacagagccaggactcccagccgtattgaaatggagtcaaatccgcgtggtttgtatcttctttcctttaatcttgggcattttgtttctctttctgagaacgtaacttgaaacactacagagccaataatcatataaaaagtgtatccgtaaacgctgtacagttttatataccttcacaatgtacttttgctgccttctagataatttattttgcaacacattactgcacagttgtaaataacttatgtactgtaacatcactttcagttatgtgtaaagaaataaataaattaattaaaa

SEQ ID NO: 175350 - DNA, 7991 bp, Artificial Sequence
  derived and/or modified sequence
atgcccaagggtgggtgcccaaaggctcctcagcaggaggagctgcctctaagctccgacatggtggaaaaacagaccggaaagaaagacaaggataaggtctccctgacaaagaccccaaagctcgaaagaggggatggcggaaaagaagtaagagagcgtgcgagtaaaagaaaactcccttttaccgctggcgcaaacggagagcagaaggacagcgacacagaaaagcagggccctgagcgaaagcggattaaaaaggagcctgtgaccaggaaggccggactgctgttcggcatgggtcttagtggcatacgtgctgggtatcccctctcagaacgccaacaagtggctctgctcatgcagatgaccgccgaagagtctgcaaattctcccgtcgacaccacacccaaacatccgagtcagtccacggtgtgccagaaaggcacccccaactccgccagcaaaacaaaggacaaagtcaataagcgtaatgagcggggagaaaccaggttgcaccgggctgccatccggggagacgccagacggatcaaggaactcattagcgagggcgctgatgttaacgtgaaagactttgctggatggaccgccctgcatgaggcatgcaaccgcggatactatgacgtggccaagcagctcttagcggctggggctgaggtgaacactaaagggcttgacgacgatacgccattgcatgacgccgctaacaatggacattataaggttgtgaagcttctgctgaggtacggtggtaacccgcagcagagtaatcgcaagggcgagacacccctaaaggtggcaaattccccaacaatggtgaacctgctcctgggtaaaggtacttacacatcttcagaggaatcaagtactgagtccagcgaagaagaggatgcaccatcctttgccccttcttcctccgtggatgggaataacaccgacagcgagttcgaaaagggactcaagcataaagccaagaacccggagcctcagaaggccaccgccccagtgaaggacgagtatgagtttgatgaagacgatgagcaagatagggtgcccccagtggatgacaaacatttattgaagaaggactatcggaaggaaactaagtccaacagtttcatctcaattcctaaaatggaggttaaatcctatactaaaaataacaccattgccccaaagaaggcatcgcaccgcatcctgtctgatacctccgacgaagaagatgcttctgtcactgtggggacgggcgagaaactcaggctgtctgctcatactatcctaccgggatccaagactagagaaccttccaacgcaaagcaacagaaagaaaagaataaggtcaaaaagaagcggaagaaggagaccaaaggccgtgaagtccgatttggcaagcgaagcgacaagttctgttccagcgagtctgaatcagaatcctccgagagcggagaagacgaccgcgacagtctcggaagtagtgggtgcctgaagggatcccctctcgtgctcaaggacccatcactgttcagcagcttaagcgcctcaagtacgagttcacatggttcttcagccgctcagaagcagaatccctctcacacagaccagcacaccaaacactggcgtacggataattggaagacaatttcaagcccagcctggtctgaggtctctagcctctccgattctactaggactcgattgacttccgagagcgactactcatcggagggaagcagcgtcgagtcccttaaacccgtgcgtaagagacaggaacacagaaagcgggcatcactgtccgagaagaagagcccatttctcagtagtgcagaaggagcagtccccaagttggataaggagggtaaggtcgtgaagaaacacaaaactaagcataaacacaagaacaaggagaaggggcagtgtagcatcagccaggagttgaaactcaagtctttcacttatgagtacgaggacagcaagcagaagagtgataaggccattctgttggagaacgaccttagcacagaaaacaaactgaaagtgttaaaacatgaccgggaccacttcaaaaaggaagagaaactttctaagatgaaactagaggagaaagagtggctcttcaaggatgagaaatctttaaagcggatcaaagatactaataaggacatcagtcggtccttccgcgaagagaaggaccgatctaacaaggctgaaaaggagcgcagcctgaaggagaagtcaccgaaagaagaaaaactgagactgtacaaggaggagcggaagaagaagtccaaagacagaccaagcaaactggaaaagaagaatgacctgaaagaggataaaattagcaaggagaaggagaaaatattcaaggaggataaagaaaagttaaagaaagagaaagtgtaccgagaagactcagctttcgacgagtactgtaacaagaatcagtttcttgagaatgaggacacaaaattcagcttgtctgacgatcagcgagatcgatggtttagtgacctgtcagactcaagcttcgatttcaaaggggaggactcctgggattcgccggttactgattaccgggacatgaagtccgattcagtggccaaattgatcctggaaacggttaaggaagacagcaaggagagaagacgggatagtagagcgagggaaaaacgcgattatcgtgagccttttttccgcaaaaaagacagagattatctggacaaaaattctgagaaacgaaaggagcagaccgagaagcataaatcagtgcccggatatctttctgagaaagataaaaagcgtagagaaagcgcagaggcaggaagagacagaaaggacgcactggagtcatgtaaagaaaggagggatggaagagcaaagccggaggaggcccaccgcgaggagctaaaggaatgcggctgtgagagtggcttcaaggacaagagtgacggtgactttggaaaaggactagagccatgggagcgccaccaccccgctcgcgagaaggagaagaaagatggtccagataaagaacgcaaggagaagaccaaacctgaaagatacaaagaaaagagctctgacaaagacaaatccgaaaagagtatcctggagaagtgccagaaagacaaagaatttgataagtgcttcaaggaaaaaaaggacactaaggaaaaacataaagatactcatggtaaagacaaagaaaggaaagctagcctggatcagggcaaggagaaaaaagaaaaggcgtttcccggaatcatctcggaagatttctcggagaagaaggacgataaaaagggtaaggagaagtcgtggtatatagccgacatattcaccgatgagtcagaggatgacagagatagctgtatgggttctggatttaagatgggagaggcgtcagatctcccacggacggacggcctgcaggagaaagaggagggcagggaagcatatgcctcggataggcaccgaaagtcatctgataagcagcatcctgagagacagaaggataaggagcccagagatagacgcaaagaccggggagccgctgatgcagggagggataaaaaagagaaagtgtttgagaaacacaaagagaaaaaggacaaagagtcaacggagaagtacaaggatagaaaggatcgggcatccgttgactcaacacaggacaaaaaaaacaagcagaaactccctgaaaaggccgagaagaaacacgcagccgaggataaggcaaaatcaaagcacaaagaaaaaagtgacaaggaacactctaaggagcggaagtcatcccgttccgccgatgctgagaagagcctcctggaaaagctagaagaggaggccctccacgaatatagagaggactctaacgataaaataagcgaggtgagcagcgatagttttaccgacagaggccaagagcctggtctcaccgcattcctcgaggtgtccttcaccgagcctcccggagacgacaaacccagggagagcgcctgccttcccgaaaagctaaaggagaaggagcggcaccgccattcttcctcctccagcaagaagtcgcacgatcgtgaacgggcaaagaaggagaaagccgagaagaaggagaaaggagaggattacaaagagggcggaagccgcaaggattctggacaatacgaaaaggactttttggaagcagatgcgtatggcgtgtcgtacaacatgaaggcagacatcgaggacgaactcgacaagacaatcgagctcttcagtacggagaagaaagataagaatgacagcgagagggaaccctccaaaaagatcgagaaggaactgaaaccgtacggaagttctgccattaatatcctgaaagaaaagaaaaaaagagaaaaacatagggagaagtggcgggacgaaaaggagagacacagagatcgtcacgctgacggattgctcagacatcatagggatgagctgctgagacaccacagagatgaacagaagcccgctacccgcgataaagattctcctccaagggtgctgaaagacaagtcgcgtgacgagggccctagacttggggacgcaaagctgaaggaaaagttcaaggatggcgctgaaaaagagaagggggacccagtgaaaatgtcaaatggtaatgataaggtggctccttccaaagaccccggtaagaaggacgcacgccctcgcgaaaagctgttaggcgatggtgacctcatgatgacctctttcgagcggatgttatctcagaaagacctggagatcgaagagagacacaaacgtcataaggaaaggatgaagcagatggaaaagctgagacacagatctggggatcctaagttgaaagagaaagcaaaaccagcagatgacggaaggaaaaaaggactcgacatacccgcaaaaaaaccccctggtctcgaccccccttttaaagataagaaactgaaagagtccacccctatccctcctgcagcagagaacaagctacacccagcatccggggctgatagcaaagattggctggctggaccacacatgaaagaagtgctgccagccagccctcggccagaccagtcccggcctactggcgttccaactcccactagcgttttatcatgtccgagctacgaggaggtcatgcacactcccaggacgccttcctgctccgccgatgattacgccgacctggtttttgactgcgccgacagccagcacagcacccccgtaccaacagcccctacctccgcctgcagccccagcttttttgaccggtttagcgtcgcttcatctggcctgtccgaaaatgcaagccaggctcctgcgcgacccctgagtactaacctgtacagatccgtgtctgtggacataaggcggactcctgaagaggagttcagtgtcggcgataagttgtttcggcaacaatccgtccccgcagcttcctcgtacgactcacctatgcccccaagtatggaggatcgcgctccattgccccctgtgcctgccgaaaagttcgcttgtctgtcacctggatattatagcccagactacggactgcctagcccgaaagttgacgcccttcattgtccccctgccgcagtggtcaccgtgaccccatccccagaaggcgtcttcagcagccttcaggccaaaccaagcccgtcgcctcgcgctgagctgttagtgcctagtctcgaaggcgctctgccccctgatcttgatacttccgaagatcagcaagccaccgccgcaatcatacccccagaaccctcctacttggagccactcgacgagggcccattttcggctgtgattaccgaggaacccgtggagtgggcccacccctctgagcaggcattagcctcttctctgattggcggaactagtgagaacccagtgtcttggcctgttggaagcgatctattattaaaatctccccagcgatttccagaatcaccgaagcggttctgtccagcggaccctctccactctgctgcgccaggaccttttagcgcttcagaggccccatatccagccccacccgcaagtcccgctccctacgccctgccggtagccgagcctggcctggaggatgtcaaggacggcgtggacgccgtcccagctgccatttctacaagtgaggccgctccttacgcccctccttcaggactggagagctttttttcaaactgcaagagtctgcctgaagcccctcttgacgttgcgcctgagcctgcctgcgtggctgctgtggcgcaggtggaggctcttggacccctggagaattctttcctcgacggctcaaggggcctgtcccacctgggacaggttgagccagtcccgtgggcagacgcctttgctgggcctgaagatgatcttgacctcggcccattctccttaccagagcttcccctccagaccaaagatgcggctgatggagaagccgagcccgttgaggaatctctcgcaccccctgaagagatgcctcccggtgcccctggagtgatcaatggcggagacgtgtccacagttgttgctgaagaaccaccagcgctacctcctgaccaggcttccacccgtctgccagcggagcttgagcccgaacctagcggtgaaccaaagctcgacgtcgctctggaagcggcagtggaggccgagactgtgccagaggaaagggccaggggcgaccctgattcttccgtcgaaccagctccggtgcctcctgaacagaggcctctcggatcgggtgaccagggcgcagaggccgaggggcctcctgccgcatccctttgcgctcccgatgggccagcacccaacaccgtggctcaggcacaggccgctgacggcgcaggacccgaagacgatactgaggcctctcgggcagccgcacctgccgaaggtcccccagggggaatacagcctgaggcagccgaaccgaagccaacagcggaagccccaaaggctcccagagtagaagagatccctcagagaatgacaaggaatagggcacagatgcttgccaatcaatcgaaacaaggtccaccccctagcgaaaaagaatgcgccccaacgccggctcccgtgacacgggctaaagctcgcggaagcgaggatgacgatgcacaggcacagcaccccagaaaacgccgattccaacgaagcactcaacagctgcagcagcagcttaatacaagcactcagcagacgcgggaagttatccagcagacgctcgcagcaatagtggacgccatcaaactagatgcaattgagccgtatcacagtgaccgcgcaaatccatactttgagtaccttcaaattcgcaaaaagatcgaggaaaaaaggaaaattctctgctgcatcacaccccaggctccccagtgctatgcggaatacgtcacctataccgggagctatcttctagacgggaaaccactcagcaaactgcatattccggtgatagcgcctccaccttccctggctgaacctttgaaagaactgtttaggcagcaggaggccgtgagaggcaaattacgactgcagcatagtatcgagagggaaaagttaatcgtctcgtgcgaacaggagattctacgagtccattgtagggcagcgaggaccatcgctaaccaagccgttccgttttctgcctgcacaatgcttctagacagcgaagtgtataatatgccactcgaaagccagggagatgagaacaagagtgtcagggaccgcttcaatgccaggcagttcatttcatggctgcaagacgtggacgataagtacgaccgaatgaagacctgcttactcatgcggcaacaacatgaagccgctgccctcaacgcagtgcaacgaatggaatggcagctgaaagtgcaggagttagacccagcgggtcacaagtccctgtgtgtcaacgaggtcccaagcttctatgtgcctatggttgacgtgaacgatgattttgttctcctgccagcata

SEQ ID NO: 175351 - DNA, 7991 bp, Artificial Sequence
  derived and/or modified sequence
atgccaaagggcggatgtcctaaagcgccacaacaggaagaacttcccttgtcgagtgacatggtcgaaaaacagactgggaagaaagacaaggataaagtgtctctgactaaaactcctaaattggagaggggagatggaggaaaagaggtgcgggagcgggcttctaaacgcaaactgccattcacagcgggagccaatggcgagcagaaggactccgataccgagaagcagggccctgagagaaagagaattaaaaaggagcccgtgacccgtaaggctggcctactctttggcatggggctcagtggcattcgggcagggtacccactaagtgaaagacagcaggtagcacttcttatgcagatgaccgccgaagagagcgcgaatagccccgtcgatacaaccccgaagcacccgtcacagtccaccgtgtgtcaaaagggaacccctaacagtgcctctaaaacgaaggacaaggtcaacaaacggaacgagcgaggtgaaacccggctacacagggcagctattaggggcgatgctcgtaggatcaaagaattaatcagcgagggcgcagacgtgaacgtgaaagactttgcgggttggactgccctgcatgaggcttgcaatcgtgggtattacgatgtcgccaagcagctgttggccgcaggagctgaagtgaacaccaaaggccttgacgatgataccccccttcatgacgccgcaaataacggccactacaaagtcgtcaaactcctgttgcggtatggtgggaacccccagcagagcaatcggaagggggagacaccccttaaagtggcgaacagcccaactatggtaaatctgctgctgggcaagggtacttatacctcatcagaagagtcctctaccgaatcctcggaggaggaagatgcaccgagttttgccccttcctcttcagttgacggaaacaatacagattccgaattcgagaaaggtttgaagcacaaggctaagaaccccgaacctcagaaggctactgcccctgtgaaggacgagtacgaatttgacgaggacgatgagcaggatagagtgcccccagtcgatgataaacacctgcttaaaaaggactacagaaaggagaccaaatccaactccttcatcagcattcctaagatggaggtgaaaagttatactaaaaacaatacaatcgcccctaaaaaagcgtcccatcggatcctgagcgacacgtccgatgaggaggatgccagcgtgacggtcgggactggggaaaagctcagactgagtgcgcacacaatcctgcccggaagcaagacacgggagcccagcaatgcaaaacagcagaaggagaaaaacaaagttaagaagaaacgcaaaaaagagacaaaggggcgtgaggtcagattcggcaaacggtctgacaagttctgctcttccgagtcagagagcgagagctcagagtccggcgaagacgatcgagattcactcggttcaagtgggtgtttgaaaggctctccattggtgctgaaagatccttctctgttttcctctctgtctgctagttccactagctcacacggatcttctgctgcccaaaagcagaacccatctcacacagatcaacacacgaagcattggcggactgataactggaaaacgatctcttcccccgcttggtctgaagtgagctcactcagcgactcgacaaggactagactaactagcgaatccgattattccagtgagggctcttctgtggagtctcttaagcccgtacggaagaggcaggagcacaggaagagagcctccctgtcggaaaagaagtcgccttttttgagttctgccgagggggcagttccgaaactggataaggaaggcaaagtagtgaagaagcacaagactaaacacaaacacaaaaacaaagagaagggacagtgttctatcagccaagaattaaaacttaaatcttttacttacgagtacgaggatagcaaacagaagtccgacaaggcgatccttctagaaaacgacctgagcaccgagaacaaacttaaggtgctcaagcacgacagggaccattttaagaaagaggagaagttgtccaaaatgaagctagaggagaaagagtggcttttcaaagatgagaagagcctgaagcgaataaaagataccaacaaggacattagtaggagcttcagggaagaaaaagaccgcagcaataaagccgagaaagaaagatctctgaaggagaaaagtcccaaagaggagaaactcaggctgtacaaggaggagaggaaaaaaaagtccaaggaccggccatccaagctcgagaaaaaaaatgatctgaaagaagataagatatcgaaagaaaaagaaaaaatattcaaagaggacaaggagaagttgaagaaagagaaagtttaccgagaggactcggcatttgacgagtattgtaacaagaatcagttcctcgaaaacgaggacactaagttttccctgtccgacgatcagcgggatcggtggttcagcgacctctctgacagctctttcgacttcaagggtgaggactcctgggatagcccagtgacagactatagagatatgaaatcagacagtgtcgccaaactgatcttagaaacagtcaaggaggactctaaagaacgcaggcgcgatagccgcgcacgcgaaaaaagagattatagggaacctttttttagaaaaaaggaccgcgattacttggataagaactcagagaaacggaaagagcagactgagaaacacaagagtgtgcctggctatctgagcgaaaaagataaaaaacgccgagagtcagctgaagcaggacgggatcgcaaggatgcactcgaaagctgtaaagaaaggagggatggcagagcaaaacctgaggaggcacatagggaagaactgaaggagtgcggatgcgagtccggctttaaggataagtccgacggcgatttcggcaaagggctcgagccttgggagcggcatcacccggcaagggagaaggaaaaaaaggatggaccagataaggaacggaaggagaagacaaaaccagagaggtataaagagaaaagctctgacaaagataaaagcgaaaagagcattttggagaaatgccagaaagataaggagtttgacaaatgtttcaaagaaaagaaggacacaaaagagaaacacaaggatactcatggaaaggataaagagaggaaagccagccttgatcagggcaaggagaaaaaggagaaggcatttccgggaatcatctctgaagacttttcagaaaaaaaggatgataaaaaaggaaaggagaagtcatggtacattgctgacatctttacagatgaatctgaagacgacagggatagctgcatgggttctggatttaagatgggcgaggcttctgatctgcccagaaccgacggattgcaagaaaaggaggaaggccgtgaagcatacgctagcgatcgccacaggaagagttcagacaagcaacatccagagcgacagaaggacaaggagcccagggacaggaggaaggatagaggggcagcggacgcaggcagagacaaaaaggagaaagtgtttgagaaacataaggagaagaaggacaaggaatccaccgaaaagtataaggatagaaaagatagggcatcagtagattctacccaggataagaaaaacaaacagaagttacctgaaaaagcagaaaagaaacacgctgcagaagataaagcgaaaagcaagcacaaggaaaaatcagacaaggaacactccaaagagaggaagtctagcaggagtgccgatgcagagaagtcattacttgaaaagctcgaggaagaggctctccatgagtaccgagaggattcaaatgacaaaatcagcgaagtcagttctgactcctttaccgatagggggcaagagcccggattaacagcttttctcgaagtatcctttacagagccccctggggacgataagcctcgcgagagcgcatgtctgcctgaaaaactaaaggagaaggagcgccatcgacactcttcgtccagcagcaagaagagccacgaccgcgagcgcgcaaagaaggagaaggctgaaaagaaagaaaagggggaggattataaggaggggggttcgcgcaaagactctgggcagtatgaaaaagacttcctcgaagccgacgcatatggggtcagctacaacatgaaggctgatattgaggatgagctggacaaaactatagagctattcagcaccgagaagaaagacaagaacgattccgagagggaaccttcaaaaaagattgaaaaggaattgaagccctacggaagctccgcaataaacattttgaaggaaaagaagaagcgggaaaagcatcgggagaagtggcgcgatgagaaagagcggcatcgcgacaggcacgctgatgggttgctcagacatcaccgcgatgagctattgcgccaccacagggatgaacagaagccagccaccagagataaagactcccctcctcgcgttcttaaggacaagtccagggacgagggccctcgccttggcgacgccaagctgaaagagaaatttaaggatggcgcagaaaaggagaaaggagatcccgtgaaaatgagcaacgggaatgataaggtcgctcctagcaaggacccaggcaagaaagatgctcgacccagggagaagcttctaggcgacggcgacctcatgatgacgtccttcgagaggatgctctcccaaaaggacctagagatcgaggaaaggcataaaaggcacaaagagcggatgaaacagatggaaaaactgcgtcaccgcagtggagaccccaaactgaaggagaaagctaaacctgctgatgacggcagaaagaaggggctggacatccctgctaaaaagccccctgggttggatccccctttcaaagataagaagctcaaggagtccacacccattccacctgcggctgagaacaagctccaccctgcaagcggagctgacagcaaggattggctggcgggaccgcacatgaaagaagtactcccggcttccccaagaccggaccagtcgagaccaactggagtgccaacaccgacctcagtgctgtcctgcccatcttatgaagaggtcatgcacacacctaggacccccagctgctcagcagatgactacgcagacttggtgttcgactgtgccgattcacagcattccactcctgtgcctacagcgccaacgtcagcttgttctcctagttttttcgaccgtttttcagttgcaagttccggactgtccgaaaacgctagtcaggcgcctgcaagacctctcagtaccaacctctatcggagcgtctctgtggatatccggagaactcctgaggaagagttttccgtgggagataagctcttccggcaacagtctgtgccagctgcatcctcttacgacagccccatgcccccatcaatggaagatagagcacctttaccaccggtcccagccgagaagttcgcatgccttagcccaggctactactccccggattacggtctgcccagccccaaagtagatgccttgcattgtcctcctgctgctgtggtgaccgttaccccttctccggagggggtgtttagctccctgcaggccaagccttcacctagccctcgggcagaactcctggtcccttcccttgaaggcgctcttccacctgatctggatacgtctgaagaccagcaggcaaccgccgcaatcatccctcctgaaccttcttatctggagcccctcgatgagggccctttctcagccgtcattacggaggaaccggtggagtgggcccacccttcagaacaggcgctcgctagcagccttataggcggtacttcagaaaacccagtgtcctggcccgtgggaagcgacttgcttctcaagagtccccagagattccctgaaagtcccaaaagattctgcccagcagaccctttacacagcgcagcccctggtccattctcggcttcagaagccccatatcccgctcctcctgcctcccctgccccatacgcacttccagttgccgaacccggtcttgaggatgtcaaagacggcgtcgatgccgtcccggctgctatttctacatccgaggccgcaccatatgcacccccatctggtctagaaagtttcttcagcaactgcaagtcactccccgaggcacctttggacgttgctcctgagcctgcatgtgtggccgcagtggctcaggtcgaggccctcggccctctggaaaactccttcttggacggcagccggggtctgagccatctaggccaggtggaacccgtaccatgggctgatgcctttgccggtcctgaggatgacctggaccttgggcctttctctttaccagagctgcctcttcagactaaagacgcggctgacggcgaagcggaacctgttgaagagtccctagcacctcctgaggaaatgcctccaggcgcacctggcgtaatcaacggcggagatgtgagtacggtagtggccgaagaaccccctgcgctgcccccagaccaggctagcactcggcttcctgctgagctagaacccgagccttctggcgagcctaagctagacgtcgctctcgaggccgcagtggaagccgaaacagttcccgaggaaagggcgagaggcgacccagactcatccgtggaacctgctccggtgccgcctgaacagcggccactgggctctggcgatcagggagcagaggcggaggggcctccagccgctagtctgtgcgctccagacgggcctgcaccaaatactgtggcccaggcccaggcggctgatggcgcaggtcccgaagacgataccgaagccagtcgtgccgcagccccagctgaagggccaccgggaggcatacagcctgaagccgctgagcctaagccaaccgccgaggccccaaaggctcctcgcgtggaggaaatccctcaacgaatgaccaggaatagggctcagatgctggctaaccaaagcaagcagggacctcccccaagcgagaaagagtgcgcccctacaccagcaccagtgactagagcgaaggctagaggaagtgaagacgacgacgctcaggcacaacaccccaggaagcgccgttttcagcgatcaacacagcagctgcaacagcagctgaatacttcaacccagcagaccagagaggtcatacagcagacccttgctgccatcgtggacgctatcaaactggatgctatcgagccttaccattcagatagagctaacccttattttgaatacctgcagattagaaagaaaatagaagagaaaagaaagattctgtgttgtatcacgccccaggcccctcagtgctacgcagaatatgtgacatatactggctcgtacttgcttgatggaaagcctctgtcaaaacttcatatacccgtcattgccccaccaccatcattggccgaacccttaaaggagctctttaggcagcaggaggcagtacgagggaagcttagactgcagcatagtatcgaacgagaaaaactgatcgtgtcgtgcgaacaggaaatactgagagtgcactgtagagccgctagaaccattgcaaaccaggctgtgccgttttctgcctgcacaatgttactagattcagaggtttataacatgcctttagagtcacaaggcgacgaaaataaatcggtcagggatcgcttcaatgctcgtcagtttatcagttggctccaggatgttgatgacaagtacgatagaatgaagacttgcttgctcatgcgccagcagcacgaagccgctgccctgaacgccgtgcagcggatggagtggcaactgaaagtccaagaactcgaccctgcaggacataaaagcctgtgtgtgaacgaagtcccttccttctacgtgcctatggtggacgtaaatgacgatttcgttttgctgccagccta

SEQ ID NO: 175352 - DNA, 7992 bp, Artificial Sequence
  derived and/or modified sequence
atgcccaagggcggctgccccaaggccccccagcaggaggagctgcccctgagcagcgacatggtggagaagcagaccggcaagaaggacaaggacaaggtgagcctgaccaagacccccaagctggagagaggcgacggcggcaaggaggtgagagagagagccagcaagagaaagctgcccttcaccgccggcgccaacggcgagcagaaggacagcgacaccgagaagcagggccccgagagaaagagaatcaagaaggagcccgtgaccagaaaggccggcctgctgttcggcatgggcctgagcggcatcagagccggctaccccctgagcgagagacagcaggtggccctgctgatgcagatgaccgccgaggagagcgccaacagccccgtggacaccacccccaagcaccccagccagagcaccgtgtgccagaagggcacccccaacagcgccagcaagaccaaggacaaggtgaacaagagaaacgagagaggcgagaccagactgcacagagccgccatcagaggcgacgccagaagaatcaaggagctgatcagcgagggcgccgacgtgaacgtgaaggacttcgccggctggaccgccctgcacgaggcctgcaacagaggctactacgacgtggccaagcagctgctggccgccggcgccgaggtgaacaccaagggcctggacgacgacacccccctgcacgacgccgccaacaacggccactacaaggtggtgaagctgctgctgagatacggcggcaacccccagcagagcaacagaaagggcgagacccccctgaaggtggccaacagccccaccatggtgaacctgctgctgggcaagggcacctacaccagcagcgaggagagcagcaccgagagcagcgaggaggaggacgcccccagcttcgcccccagcagcagcgtggacggcaacaacaccgacagcgagttcgagaagggcctgaagcacaaggccaagaaccccgagccccagaaggccaccgcccccgtgaaggacgagtacgagttcgacgaggacgacgagcaggacagagtgccccccgtggacgacaagcacctgctgaagaaggactacagaaaggagaccaagagcaacagcttcatcagcatccccaagatggaggtgaagagctacaccaagaacaacaccatcgcccccaagaaggccagccacagaatcctgagcgacaccagcgacgaggaggacgccagcgtgaccgtgggcaccggcgagaagctgagactgagcgcccacaccatcctgcccggcagcaagaccagagagcccagcaacgccaagcagcagaaggagaagaacaaggtgaagaagaagagaaagaaggagaccaagggcagagaggtgagattcggcaagagaagcgacaagttctgcagcagcgagagcgagagcgagagcagcgagagcggcgaggacgacagagacagcctgggcagcagcggctgcctgaagggcagccccctggtgctgaaggaccccagcctgttcagcagcctgagcgccagcagcaccagcagccacggcagcagcgccgcccagaagcagaaccccagccacaccgaccagcacaccaagcactggagaaccgacaactggaagaccatcagcagccccgcctggagcgaggtgagcagcctgagcgacagcaccagaaccagactgaccagcgagagcgactacagcagcgagggcagcagcgtggagagcctgaagcccgtgagaaagagacaggagcacagaaagagagccagcctgagcgagaagaagagccccttcctgagcagcgccgagggcgccgtgcccaagctggacaaggagggcaaggtggtgaagaagcacaagaccaagcacaagcacaagaacaaggagaagggccagtgcagcatcagccaggagctgaagctgaagagcttcacctacgagtacgaggacagcaagcagaagagcgacaaggccatcctgctggagaacgacctgagcaccgagaacaagctgaaggtgctgaagcacgacagagaccacttcaagaaggaggagaagctgagcaagatgaagctggaggagaaggagtggctgttcaaggacgagaagagcctgaagagaatcaaggacaccaacaaggacatcagcagaagcttcagagaggagaaggacagaagcaacaaggccgagaaggagagaagcctgaaggagaagagccccaaggaggagaagctgagactgtacaaggaggagagaaagaagaagagcaaggacagacccagcaagctggagaagaagaacgacctgaaggaggacaagatcagcaaggagaaggagaagatcttcaaggaggacaaggagaagctgaagaaggagaaggtgtacagagaggacagcgccttcgacgagtactgcaacaagaaccagttcctggagaacgaggacaccaagttcagcctgagcgacgaccagagagacagatggttcagcgacctgagcgacagcagcttcgacttcaagggcgaggacagctgggacagccccgtgaccgactacagagacatgaagagcgacagcgtggccaagctgatcctggagaccgtgaaggaggacagcaaggagagaagaagagacagcagagccagagagaagagagactacagagagcccttcttcagaaagaaggacagagactacctggacaagaacagcgagaagagaaaggagcagaccgagaagcacaagagcgtgcccggctacctgagcgagaaggacaagaagagaagagagagcgccgaggccggcagagacagaaaggacgccctggagagctgcaaggagagaagagacggcagagccaagcccgaggaggcccacagagaggagctgaaggagtgcggctgcgagagcggcttcaaggacaagagcgacggcgacttcggcaagggcctggagccctgggagagacaccaccccgccagagagaaggagaagaaggacggccccgacaaggagagaaaggagaagaccaagcccgagagatacaaggagaagagcagcgacaaggacaagagcgagaagagcatcctggagaagtgccagaaggacaaggagttcgacaagtgcttcaaggagaagaaggacaccaaggagaagcacaaggacacccacggcaaggacaaggagagaaaggccagcctggaccagggcaaggagaagaaggagaaggccttccccggcatcatcagcgaggacttcagcgagaagaaggacgacaagaagggcaaggagaagagctggtacatcgccgacatcttcaccgacgagagcgaggacgacagagacagctgcatgggcagcggcttcaagatgggcgaggccagcgacctgcccagaaccgacggcctgcaggagaaggaggagggcagagaggcctacgccagcgacagacacagaaagagcagcgacaagcagcaccccgagagacagaaggacaaggagcccagagacagaagaaaggacagaggcgccgccgacgccggcagagacaagaaggagaaggtgttcgagaagcacaaggagaagaaggacaaggagagcaccgagaagtacaaggacagaaaggacagagccagcgtggacagcacccaggacaagaagaacaagcagaagctgcccgagaaggccgagaagaagcacgccgccgaggacaaggccaagagcaagcacaaggagaagagcgacaaggagcacagcaaggagagaaagagcagcagaagcgccgacgccgagaagagcctgctggagaagctggaggaggaggccctgcacgagtacagagaggacagcaacgacaagatcagcgaggtgagcagcgacagcttcaccgacagaggccaggagcccggcctgaccgccttcctggaggtgagcttcaccgagccccccggcgacgacaagcccagagagagcgcctgcctgcccgagaagctgaaggagaaggagagacacagacacagcagcagcagcagcaagaagagccacgacagagagagagccaagaaggagaaggccgagaagaaggagaagggcgaggactacaaggagggcggcagcagaaaggacagcggccagtacgagaaggacttcctggaggccgacgcctacggcgtgagctacaacatgaaggccgacatcgaggacgagctggacaagaccatcgagctgttcagcaccgagaagaaggacaagaacgacagcgagagagagcccagcaagaagatcgagaaggagctgaagccctacggcagcagcgccatcaacatcctgaaggagaagaagaagagagagaagcacagagagaagtggagagacgagaaggagagacacagagacagacacgccgacggcctgctgagacaccacagagacgagctgctgagacaccacagagacgagcagaagcccgccaccagagacaaggacagcccccccagagtgctgaaggacaagagcagagacgagggccccagactgggcgacgccaagctgaaggagaagttcaaggacggcgccgagaaggagaagggcgaccccgtgaagatgagcaacggcaacgacaaggtggcccccagcaaggaccccggcaagaaggacgccagacccagagagaagctgctgggcgacggcgacctgatgatgaccagcttcgagagaatgctgagccagaaggacctggagatcgaggagagacacaagagacacaaggagagaatgaagcagatggagaagctgagacacagaagcggcgaccccaagctgaaggagaaggccaagcccgccgacgacggcagaaagaagggcctggacatccccgccaagaagccccccggcctggacccccccttcaaggacaagaagctgaaggagagcacccccatcccccccgccgccgagaacaagctgcaccccgccagcggcgccgacagcaaggactggctggccggcccccacatgaaggaggtgctgcccgccagccccagacccgaccagagcagacccaccggcgtgcccacccccaccagcgtgctgagctgccccagctacgaggaggtgatgcacacccccagaacccccagctgcagcgccgacgactacgccgacctggtgttcgactgcgccgacagccagcacagcacccccgtgcccaccgcccccaccagcgcctgcagccccagcttcttcgacagattcagcgtggccagcagcggcctgagcgagaacgccagccaggcccccgccagacccctgagcaccaacctgtacagaagcgtgagcgtggacatcagaagaacccccgaggaggagttcagcgtgggcgacaagctgttcagacagcagagcgtgcccgccgccagcagctacgacagccccatgccccccagcatggaggacagagcccccctgccccccgtgcccgccgagaagttcgcctgcctgagccccggctactacagccccgactacggcctgcccagccccaaggtggacgccctgcactgcccccccgccgccgtggtgaccgtgacccccagccccgagggcgtgttcagcagcctgcaggccaagcccagccccagccccagagccgagctgctggtgcccagcctggagggcgccctgccccccgacctggacaccagcgaggaccagcaggccaccgccgccatcatcccccccgagcccagctacctggagcccctggacgagggccccttcagcgccgtgatcaccgaggagcccgtggagtgggcccaccccagcgagcaggccctggccagcagcctgatcggcggcaccagcgagaaccccgtgagctggcccgtgggcagcgacctgctgctgaagagcccccagagattccccgagagccccaagagattctgccccgccgaccccctgcacagcgccgcccccggccccttcagcgccagcgaggccccctaccccgccccccccgccagccccgccccctacgccctgcccgtggccgagcccggcctggaggacgtgaaggacggcgtggacgccgtgcccgccgccatcagcaccagcgaggccgccccctacgccccccccagcggcctggagagcttcttcagcaactgcaagagcctgcccgaggcccccctggacgtggcccccgagcccgcctgcgtggccgccgtggcccaggtggaggccctgggccccctggagaacagcttcctggacggcagcagaggcctgagccacctgggccaggtggagcccgtgccctgggccgacgccttcgccggccccgaggacgacctggacctgggccccttcagcctgcccgagctgcccctgcagaccaaggacgccgccgacggcgaggccgagcccgtggaggagagcctggccccccccgaggagatgccccccggcgcccccggcgtgatcaacggcggcgacgtgagcaccgtggtggccgaggagccccccgccctgccccccgaccaggccagcaccagactgcccgccgagctggagcccgagcccagcggcgagcccaagctggacgtggccctggaggccgccgtggaggccgagaccgtgcccgaggagagagccagaggcgaccccgacagcagcgtggagcccgcccccgtgccccccgagcagagacccctgggcagcggcgaccagggcgccgaggccgagggcccccccgccgccagcctgtgcgcccccgacggccccgcccccaacaccgtggcccaggcccaggccgccgacggcgccggccccgaggacgacaccgaggccagcagagccgccgcccccgccgagggcccccccggcggcatccagcccgaggccgccgagcccaagcccaccgccgaggcccccaaggcccccagagtggaggagatcccccagagaatgaccagaaacagagcccagatgctggccaaccagagcaagcagggccccccccccagcgagaaggagtgcgcccccacccccgcccccgtgaccagagccaaggccagaggcagcgaggacgacgacgcccaggcccagcaccccagaaagagaagattccagagaagcacccagcagctgcagcagcagctgaacaccagcacccagcagaccagagaggtgatccagcagaccctggccgccatcgtggacgccatcaagctggacgccatcgagccctaccacagcgacagagccaacccctacttcgagtacctgcagatcagaaagaagatcgaggagaagagaaagatcctgtgctgcatcaccccccaggccccccagtgctacgccgagtacgtgacctacaccggcagctacctgctggacggcaagcccctgagcaagctgcacatccccgtgatcgcccccccccccagcctggccgagcccctgaaggagctgttcagacagcaggaggccgtgagaggcaagctgagactgcagcacagcatcgagagagagaagctgatcgtgagctgcgagcaggagatcctgagagtgcactgcagagccgccagaaccatcgccaaccaggccgtgcccttcagcgcctgcaccatgctgctggacagcgaggtgtacaacatgcccctggagagccagggcgacgagaacaagagcgtgagagacagattcaacgccagacagttcatcagctggctgcaggacgtggacgacaagtacgacagaatgaagacctgcctgctgatgagacagcagcacgaggccgccgccctgaacgccgtgcagagaatggagtggcagctgaaggtgcaggagctggaccccgccggccacaagagcctgtgcgtgaacgaggtgcccagcttctacgtgcccatggtggacgtgaacgacgacttcgtgctgctgcccgcctag

SEQ ID NO: 175353 - protein, 478 aa, Artificial Sequence
  derived and/or modified sequence
MAARPITLGIDLGTTSVKAALLRAAPDDPSGFAVLASCARAARAEAAVESAVAGPQGREQDVSRILQALHECLAALPRPQLRSVVGIGVSGQMHGVVFWKTGQGCEWTEGGITPVFEPRAVSHLVTWQDGRCSSEFLASLPQPKSHLSVATGFGCATIFWLLKYRPEFLKSYDAAGTIHDYVVAMLCGLPRPLMSDQNAASWGYFNTQSQSWNVETLRSSGFPVHLLPDIAEPGSVAGRTSHMWFEIPKGTQVGVALGDLQASVYSCMAQRTDAVLNISTSVQLAASMPSGFQPAQTPDPTAPVAYFPYFNRTYLGVAASLNGGNVLATFVHMLVQWMADLGLEVEESTVYSRMIQAAVQQRDTHLTITPTVLGERHLPDQLASVTRISSSDLSLGHVTRALCRGIVQNLHSMLPIQQLQDWGVERVMGSGSALSRNDVLKQEVQRAFPLPMSFGQDVDAAVGAALVMLRRHLNQKES

SEQ ID NO: 175354 - DNA, 1437 bp, Artificial Sequence
  derived and/or modified sequence
atggctgccaggcccattacactgggaatcgatctcggaacaacatctgttaaagcagctcttctgcgggccgccccggatgacccgtccggattcgcagtgctggcatcttgtgcccgcgccgcacgggccgaagctgctgtggagtctgcagttgcgggcccgcagggccgggagcaggatgtgagtcggatcctgcaggcactgcacgaatgtcttgccgctctgcctagacctcagctccgatctgtagtgggcattggagtgtctggccaaatgcacggcgttgtcttctggaagacgggtcaagggtgtgaatggactgagggggggatcacacccgtatttgaacctcgtgccgtctcccatctggtcacttggcaggacgggcgctgcagttctgaattcctggcgtccctacctcagcctaagtctcacctgtcagtggcaactggatttgggtgcgcaaccattttttggctgttgaagtacagaccagagtttctgaaatcttacgacgctgcggggactattcacgattatgtggtagctatgctgtgcggcctgcctcggccactgatgtccgaccagaacgccgcgtcatgggggtacttcaatacacagtctcagtcgtggaatgtggaaaccctccgcagtagtggcttccctgtacatttgctgcctgacatagccgaacctggttcggtcgccggcagaaccagccacatgtggtttgagatcccgaagggaactcaagtaggggtcgcccttggagacctgcaggccagtgtatacagttgtatggcccagcggacagacgctgtcttgaacatttccaccagtgtgcaattggccgcttcgatgccatccggattccaacccgcacagacgcctgaccccacagcccctgtggcttactttccctattttaatcggacctacttaggggtggctgcttccttgaatggcggcaatgtcctcgcaacatttgtgcacatgctcgtccaatggatggctgatctgggcctggaggtcgaggagtctacagtttattccaggatgatccaggctgccgtgcagcaacgagacacccatttgactataacaccaacagtattgggggaaaggcacctcccggaccagctggctagcgtgacacggatctcctcctctgatcttagcctgggccacgtgacacgagctctgtgcagaggcattgtgcagaatttgcattccatgctccctatccagcagttgcaggattggggagtggagcgagtgatggggtccggctccgcgttaagtcggaatgacgtgttgaagcaggaagtacagcgagctttcccccttcctatgtcctttggacaggacgtcgacgcagctgtcggggctgcgctggtgatgttgcgacgacacttaaatcagaaagagtcatag

SEQ ID NO: 175355 - DNA, 1437 bp, Artificial Sequence
  derived and/or modified sequence
atggccgcccggcccatcaccctgggcatcgacctgggcaccacctctgtgaaggccgccctgctgcgggccgccccagatgaccccagcggctttgctgtgctggccagctgtgcccgggccgcccgggcagaggccgctgtggagagcgctgtggccggcccccagggccgggagcaggatgtgagccgcatcctgcaggccctgcatgaatgtctggccgccctgccccggccccagctgcggtctgtggtgggcattggagtgtctggccagatgcacggcgtggtgttctggaagacaggccagggctgtgagtggacagagggcggcatcacccctgtgtttgagcccagggctgtgagccacctggtgacctggcaggacggccgctgcagcagcgagttcctggccagcctgccccagcccaagagccacctgtctgtggccactggatttggctgtgccaccatcttctggctgctgaagtacagacctgagttcctgaagagctatgatgctgctggcaccatccatgactatgtggtggccatgctgtgtggcctgccccggcccctgatgtctgaccagaatgctgcctcctggggctacttcaacacccagagccagagctggaatgtggagaccctgcggagcagcggcttccctgtgcacctgctgcctgacattgctgagcccggctctgtggccggccgcaccagccacatgtggtttgagatccccaagggcacccaggtgggcgtggccctgggggacctgcaggcctctgtgtacagctgcatggcccagaggacagatgctgtgctgaacatcagcacctctgtgcagctggccgcctccatgcccagcggcttccagcctgcccagaccccagaccccacagcccctgtggcctacttcccctacttcaacagaacctacctgggcgtggccgccagcctgaatggaggaaatgtgctggccacctttgtgcacatgctggtgcagtggatggctgacctgggcctggaggtggaggagagcacagtgtacagcaggatgatccaggccgctgtgcagcagagggacacccacctgaccatcacccccaccgtgctgggggagcggcacctgcctgaccagctggcctctgtgacccgcatcagcagcagtgacctgagcctgggccacgtgacccgggccctgtgccggggcatcgtgcagaacctgcacagcatgctgcccatccagcagctgcaggactggggcgtggagcgggtgatgggcagcggcagcgccctgagcagaaatgatgtgctgaagcaggaggtgcagagggccttccccctgcccatgagctttggccaggatgtggatgctgctgtgggcgccgccctggtgatgctgcggcggcacctgaaccagaaggagagctag

SEQ ID NO: 175356 - DNA, 3501 bp, Artificial Sequence
  derived and/or modified sequence
gattggcaggcgactccccgcccctgccccgcccccctgggcgaagagcgcggacttgtggggccgctggctgcagactggagctgcgcgggtcagggagataatggctgcgcggccgatcaccctcggcattgacctgggcaccacatctgtgaaggcagctctgctgagggccgcgcccgacgacccatccgggttcgcagtgctggcgagctgtgcccgtgctgcgcgggcagaggcggcggtcgagagcgcggtggccgggccccaggggcgggagcaggatgtgagtagaatcctccaagccctacacgagtgccttgctgcccttccccgaccccagctccggagcgtcgtgggcatcggggtgtcgggccagatgcatggagtcgtgttttggaaaacaggccaaggctgtgaatggacagagggagggattaccccggtgttcgagccccgagctgttagccacctggtcacgtggcaggatggccgatgtagcagcgaattcctggcctctctgccccagccgaagtctcatctcagtgtggccacgggcttcggctgtgcaaccatcttctggcttttgaaatatcgcccagagttcctgaagtcctacgacgcagccggtaccatccacgactatgtggttgccatgctgtgtggcttgccaagacctctgatgtccgaccagaatgctgccagctggggctatttcaacacgcagagccaaagctggaacgtagagacactgaggagctcgggttttcctgtccacctgctcccagacatcgccgagcctggcagtgtggcgggcagaacttcccacatgtggtttgaaatcccaaaggggacgcaggtgggagtggccttgggtgatttacaggcctctgtctattcctgcatggcccagaggacagatgcagttctcaacatcagcacctcggttcagctggcagcctccatgccttcaggattccagcctgcacagactccagaccctacggccccagtcgcctacttcccatacttcaacaggacctacctgggggtggccgcgtcactcaacgggggcaatgtgctggccacgttcgtccacatgctggttcagtggatggcagatctaggcctggaggttgaagaatccactgtgtattcacgcatgattcaggcagctgtgcagcagagagatacccacctgaccatcaccccgacagtgctgggggagaggcacctgccggaccagctggcctcagtgaccagaatctcctcctccgacctctccctggggcacgtgacccgggctctgtgccgaggcattgttcagaacctgcactccatgcttccgattcagcagctccaggactggggcgtggagagggtgatgggcagtgggagtgcgctgtccaggaatgacgtgctgaagcaggaggtgcagagggctttccctttgcccatgtcctttgggcaggatgtggatgcagctgtcggggcagctctggtcatgctccggagacacctcaaccagaaggaatcttagacagcaaactctttcgccaaacgactgctgtgaattttacctgattaacattcctgacaccatctgtgggtcatcctttccctggaccgttcagtggacagctttcaagcagtgcttgttgtgaggtcccatctcggccaagaacttaccttcagaacatactctaataatgcagccaggagccgtcagccagatcccaaatgagtgccttccgaaattgacccacctgggagctatttacaaatgtccatgtgggagagagagagcatgagagcacagtagcccagcctgctggtcagcaggctcatctgtggttcacctgtagacagagagcagatcaatgtgtacttcagacaccagaaagtctggtggctttggtcccaagtgggaaaagagaactgccccatgcccagcttgtgattatcgtttttggagacctgaagcccacactcgggtcgtatggacttctggaaaagttcttgtctcctggactgaaccatgtgaccggaggcccctttcctagtctcatcctcccctggctgcagatgcttagctgggccagggattgacccaagcgcgatgcagcaggcaggctcagaagacgatgcggggctgtgtgccggccttcttgctgcatgtactcagcctcaggagagcttgctgcacccaggccgcccaggtcttcacagcacaactgcctggaaggcaggttgcgagaaggagaggcggatggcatgagcagcaagggggaccgatgctgtgcagctcacaccactccagaacctgacaaggcaccagcaggaccccttgccaggagcatgtctgtgcagcagtgtttttgcccctgcacattccagaagccctcatgggaagggatgcagccaggcagactcctgccagatggggcaggtagtttattcaaagagaactctgtatcccataggcccaggctctcctttcgcttggcgtgggctttgctggcccagtgtgtgctcctggctcagcagaaacatccatttgagttggcatccctgtagggatcccagagcgttgtaagccttcttgtgattggtagggatggctgtggggtggcttccaggagggggccaccattgccgcatctacttctagactcccaaaggagcccaggctcaggcaggcctggcccagagtcacgctggcaaccacgagtttgggaagcagtcgtattctctctctctctctctctctctctctcagtatccatgacaggtatgaaacatattgtctctttataaatgtcattttacaaattatgtgattatctggaagctctaagatgagagcaaatgcctgatcactctggccaaatgtcagatactaaagcccattcttggccgggcatgttggctcccgcctgtaatcccagcactttgggaagcccaagtgggtgaatcacctgaggtcaggagttcaagaccagcctgaccaacatggggataccccgtctctactaaaaatacaagccgggcgtggtggcgcatgcctgtaatcccagctactcaggaggctgaggcaggaaaatcacttgaactcgggaggcagaggttgcagtgagctgagatcgcgccattgcactccagcctgggtgacagagcaagactctgtctcataaataaatacaaagcccattcttccagagtcttgtgccttaaataaaacacacctctctgctgtgggaagactgtgcaatggcacagccgcagagcttggtttgggaggttgaagtgctctggggagaattcgtagatcatcctcagaaaagccttgccctggtgttctaccagaaaaacgtctcccaatcacccaggaaagctgtccacagtagtccccccttatccacggtgtcactttccatgggttcagttatctgcggtcaaccacggtctgacaatattaaatggaaaattcttcaaacagtt

SEQ ID NO: 175357 - DNA, 1437 bp, Artificial Sequence
  derived and/or modified sequence
atggccgcccggcccatcaccctgggcatcgacctgggcaccaccagcgtgaaagcggcgctgctgagagcggcccccgatgacccaagtggctttgccgtgttggcctcttgcgcccgagctgcccgtgctgaagccgccgtggagagtgcggtggcgggaccacagggtcgggagcaggatgtctcccgaatcctgcaggctctgcatgagtgtttggcagccctgcctaggccacagctgcggagtgtggttgggataggtgtgtcaggtcagatgcatggggtcgtattctggaagacgggccagggctgcgaatggacagaaggaggcattacccccgtgttcgagcctcgcgccgtgtctcacttggttacttggcaggacggacgatgttcctccgaatttctagctagtctgccacagccaaagagtcatttgtccgtcgcaacaggattcggctgcgcaaccatcttctggctgcttaagtatcggccagaattcttaaagagctatgacgccgccggcaccatccatgactacgtcgtggccatgctgtgcggcctaccccgtcctctgatgagtgatcaaaatgctgcctcctggggatacttcaatacccaatctcaatcatggaatgtggagactctacgtagttctggtttccctgtgcacctgttgcctgacatcgctgagcccggatcagtggccggccgcacttcccacatgtggtttgagataccgaaaggcacacaggttggtgtggccctgggcgacctgcaggcttcagtctactcatgcatggctcagcgaacagacgccgtgctgaatattagtacttccgtacaactggccgcgtctatgccctcgggcttccagcctgcccagacccctgatccgacagcccccgtggcatattttccttacttcaacagaacgtacctgggggtggccgccagcctcaacggcggaaacgttcttgccacttttgttcacatgctggttcaatggatggctgatctcgggctcgaagtggaagaaagtaccgtatatagccggatgattcaggcggcagtgcagcagagggatacacatttgacaatcacccccacagtgctgggtgagagacatttgcccgaccaactcgccagcgttactcgaatatccagctctgatctgagtctggggcacgtgacccgggccctctgcagagggatcgtgcaaaacttgcactctatgctgccaatccagcagttgcaggattggggcgtggagcgcgtaatgggttccgggagtgctctcagccgtaacgacgttttgaagcaagaggttcagcgtgctttccccctgccgatgtcttttgggcaggacgtggatgcggctgtgggcgccgctttagtcatgctgagacggcaccttaaccagaaggagtcgtag

SEQ ID NO: 175358 - DNA, 1437 bp, Artificial Sequence
  derived and/or modified sequence
atggcagcgaggcctataactctgggtatcgatctgggcaccacttccgtgaaggcagccctgttgcgcgcagcgcctgacgacccgagtggtttcgcagtgttagcgagttgtgccagagcagcccgtgcagaggccgctgtcgagagtgccgtagctggcccacagggacgagagcaggatgttagtaggatccttcaggcactgcacgagtgcttagctgccttacctcggcctcaattgagatctgtggtcggcatcggggtttccggccagatgcatggcgtcgtgttctggaagacagggcagggatgcgaatggaccgaaggtggcatcactcctgtgttcgagccaagagcggtttctcacctggtgacctggcaggacggcaggtgttcatccgaattcctggcatcactgcctcagccaaagtcccacctctcggtggcaaccggattcggctgcgccacgattttctggcttctcaagtatagacccgagttcctgaagagctacgatgcagcgggaaccatccacgactatgttgtggctatgctgtgcggtctgccgaggccccttatgtcagatcagaacgccgcttcttggggttactttaatacccagtcccaatcgtggaatgtcgaaactctaagatcttctggattcccggtgcacctgctcccagatattgccgagcctggctcagtcgccggacgcacttcccacatgtggtttgagataccaaagggtacccaagtgggagtcgccttgggcgacctgcaagcctctgtctactcctgtatggctcagcggacagacgcggtgctcaacatcagcacatcagttcagctcgcagcatcaatgcctagtgggttccagccagcccagacccctgatcctaccgctccggtagcgtactttccgtatttcaaccgaacttacctgggagtagcagccagcctgaatgggggaaatgtgctcgcgacattcgtccatatgctggtgcagtggatggcggatctgggtctggaagtcgaggaatcaaccgtgtactcccgaatgatccaggctgccgtgcagcagagggatacacatttaacaatcaccccaaccgtgctgggcgaacgccacctgccagaccaattagcaagtgtgacacggatatcttccagcgatctgtccctggggcatgtaaccagggccttgtgtcgcggtattgtgcagaatctccacagtatgctgccaatccagcagctgcaggattggggggttgagcgcgttatgggaagcgggagtgccctatctagaaatgatgtgctcaagcaagaggttcagagagcttttccactgcctatgagttttggccaagatgtggatgccgctgtgggggcagctctggtcatgctccgtcgccatctgaatcagaaggaaagctag

SEQ ID NO: 175359 - DNA, 1437 bp, Artificial Sequence
  derived and/or modified sequence
atggccgccagacccatcaccctgggcatcgacctgggcaccaccagcgtgaaggccgccctgctgagagccgcccccgacgaccccagcggcttcgccgtgctggccagctgcgccagagccgccagagccgaggccgccgtggagagcgccgtggccggcccccagggcagagagcaggacgtgagcagaatcctgcaggccctgcacgagtgcctggccgccctgcccagaccccagctgagaagcgtggtgggcatcggcgtgagcggccagatgcacggcgtggtgttctggaagaccggccagggctgcgagtggaccgagggcggcatcacccccgtgttcgagcccagagccgtgagccacctggtgacctggcaggacggcagatgcagcagcgagttcctggccagcctgccccagcccaagagccacctgagcgtggccaccggcttcggctgcgccaccatcttctggctgctgaagtacagacccgagttcctgaagagctacgacgccgccggcaccatccacgactacgtggtggccatgctgtgcggcctgcccagacccctgatgagcgaccagaacgccgccagctggggctacttcaacacccagagccagagctggaacgtggagaccctgagaagcagcggcttccccgtgcacctgctgcccgacatcgccgagcccggcagcgtggccggcagaaccagccacatgtggttcgagatccccaagggcacccaggtgggcgtggccctgggcgacctgcaggccagcgtgtacagctgcatggcccagagaaccgacgccgtgctgaacatcagcaccagcgtgcagctggccgccagcatgcccagcggcttccagcccgcccagacccccgaccccaccgcccccgtggcctacttcccctacttcaacagaacctacctgggcgtggccgccagcctgaacggcggcaacgtgctggccaccttcgtgcacatgctggtgcagtggatggccgacctgggcctggaggtggaggagagcaccgtgtacagcagaatgatccaggccgccgtgcagcagagagacacccacctgaccatcacccccaccgtgctgggcgagagacacctgcccgaccagctggccagcgtgaccagaatcagcagcagcgacctgagcctgggccacgtgaccagagccctgtgcagaggcatcgtgcagaacctgcacagcatgctgcccatccagcagctgcaggactggggcgtggagagagtgatgggcagcggcagcgccctgagcagaaacgacgtgctgaagcaggaggtgcagagagccttccccctgcccatgagcttcggccaggacgtggacgccgccgtgggcgccgccctggtgatgctgagaagacacctgaaccagaaggagagctag

SEQ ID NO: 175360 - protein, 197 aa, Artificial Sequence
  derived and/or modified sequence
MTLLPGLLFLTWLHTCLAHHDPSLRGHPHSHGTPHCYSAEELPLGQAPPHLLARGAKWGQALPVALVSSLEAASHRGRHERPSATTQCPVLRPEEVLEADTHQRSISPWRYRVDTDEDRYPQKLAFAECLCRGCIDARTGRETAALNSVRLLQSLLVLRRRPCSRDGSGLPTPGAFAFHTEFIHVPVGCTCVLPRSV

SEQ ID NO: 175361 - DNA, 594 bp, Artificial Sequence
  derived and/or modified sequence
atgaccctgctgcccggcctgctgttcctgacctggctgcacacctgcctggcccaccacgaccccagcctgagaggccacccccacagccacggcaccccccactgctacagcgccgaggagctgcccctgggccaggcccccccccacctgctggccagaggcgccaagtggggccaggccctgcccgtggccctggtgagcagcctggaggccgccagccacagaggcagacacgagagacccagcgccaccacccagtgccccgtgctgagacccgaggaggtgctggaggccgacacccaccagagaagcatcagcccctggagatacagagtggacaccgacgaggacagatacccccagaagctggccttcgccgagtgcctgtgcagaggctgcatcgacgccagaaccggcagagagaccgccgccctgaacagcgtgagactgctgcagagcctgctggtgctgagaagaagaccctgcagcagagacggcagcggcctgcccacccccggcgccttcgccttccacaccgagttcatccacgtgcccgtgggctgcacctgcgtgctgcccagaagcgtgtag

SEQ ID NO: 175362 - DNA, 594 bp, Artificial Sequence
  derived and/or modified sequence
atgaccttgctgcccggtctgctatttctgacatggctccacacctgtctcgcccaccatgatcccagcctgagaggtcatccccactcccacggcaccccgcactgttacagtgccgaagagttacctctagggcaggctccccctcacctgttagccagaggggcgaaatggggccaagctttaccggttgctctggtatcctctctggaggcagcctctcaccgcggacggcacgagaggccctcagctactactcagtgccccgtgcttagaccagaagaagttctggaggccgatactcatcaaagatccatctcgccttggaggtaccgagtcgataccgatgaggaccgttacccacagaaactcgcctttgccgagtgtctctgcaggggttgcattgacgcaaggaccggacgagagacagcagctctcaattccgttagactgctgcagagtctccttgttctcaggcgcaggccatgttcccgtgacgggtccggattgcctacccccggagctttcgccttccacaccgaatttattcacgtgcctgttgggtgcacctgtgtgctccccaggtcagtgtag

SEQ ID NO: 175363 - DNA, 594 bp, Artificial Sequence
  derived and/or modified sequence
atgaccctgctgcccggcctgctcttcctgacctggctgcacacctgcctggcccaccacgaccccagcctgcggggccacccccacagccacggcaccccccactgctacagcgctgaggagctgcccctgggccaggccccaccccacctgctggcccggggggccaagtggggccaggccctgcctgtggccctggtgagcagcctggaggccgccagccaccggggcagacatgagcggcccagcgccaccacccagtgccctgtgctgcggcctgaggaggtgctggaggccgacacccaccagaggagcatcagcccctggagatacagagtggacacagatgaagatcgctacccccagaagctggcctttgctgagtgcctgtgccggggctgcattgatgccaggacaggccgggagacagctgccctgaacagcgtgcggctgctgcagagcctgctggtgctgcggcggcggccctgcagcagagatggcagcggcctgcccacccctggggcctttgccttccacacagagttcatccacgtgcctgtgggctgcacctgtgtgctgcccaggtctgtgtag

SEQ ID NO: 175364 - DNA, 594 bp, Artificial Sequence
  derived and/or modified sequence
atgaccctgctgcccggcctgctgttcctgacctggctgcacacctgtctggctcaccatgatccttcgttacggggacacccacattcccacggaacccctcattgttattccgccgaagaactgccgctggggcaagcgccacctcacctcttggcgaggggggctaagtgggggcaggcgttgccagtcgcactcgtgtcatccctggaggcagcatcccacaggggccggcatgagcgcccttccgccacaactcagtgtccagttttgcggcccgaggaggtattagaggctgatacgcaccagcgatctattagcccctggagataccgggtcgacaccgatgaagatcgctatccacagaagcttgcattcgccgagtgcttatgcagagggtgcattgacgccaggaccgggagagagaccgcagctttaaattccgtgcgactgctgcagtccctgctcgtgctgcgtcgtaggccatgcagccgagacggaagtggtctgcccacccccggagcttttgcattccatactgagttcatccacgtgcccgtcgggtgtacctgtgtgctaccccggtccgtgtag

SEQ ID NO: 175365 - DNA, 594 bp, Artificial Sequence
  derived and/or modified sequence
atgacacttctaccaggtctgctgtttcttacatggctgcacacgtgtctcgcccatcatgatccaagccttagagggcatccgcatagccacggcaccccccattgttattcagctgaggaactgcccctgggtcaggcgcctccacacttgctggcccgtggtgcaaaatgggggcaggctctgcctgttgccctggtgagcagcctcgaagcggcaagccaccgaggcaggcatgaaagaccgagtgcaaccactcagtgtcccgttctccgaccggaggaggtgctggaagctgacacgcatcagagaagtataagcccctggagatacagagtagacacagacgaagatcgctatccacagaagttggcttttgccgagtgcctgtgtcgcggatgcatcgacgcacggactggaagagaaacagccgctcttaatagcgtacgtctgcttcagtcactgttagtattacggagaagaccatgcagccgggatggcagtggcttgcctactcctggggcatttgcctttcacacagagttcattcacgtgccggtcggatgcacctgtgtgctgccgagatcagtgtag

SEQ ID NO: 175366 - DNA, 1047 bp, Artificial Sequence
  derived and/or modified sequence
gccaggtgtgcaggccgctccaagcccagcctgccccgctgccgccaccatgacgctcctccccggcctcctgtttctgacctggctgcacacatgcctggcccaccatgacccctccctcagggggcacccccacagtcacggtaccccacactgctactcggctgaggaactgcccctcggccaggcccccccacacctgctggctcgaggtgccaagtgggggcaggctttgcctgtagccctggtgtccagcctggaggcagcaagccacagggggaggcacgagaggccctcagctacgacccagtgcccggtgctgcggccggaggaggtgttggaggcagacacccaccagcgctccatctcaccctggagataccgtgtggacacggatgaggaccgctatccacagaagctggccttcgccgagtgcctgtgcagaggctgtatcgatgcacggacgggccgcgagacagctgcgctcaactccgtgcggctgctccagagcctgctggtgctgcgccgccggccctgctcccgcgacggctcggggctccccacacctggggcctttgccttccacaccgagttcatccacgtccccgtcggctgcacctgcgtgctgccccgttcagtgtgaccgccgaggccgtggggcccctagactggacacgtgtgctccccagagggcaccccctatttatgtgtatttattgttatttatatgcctcccccaacactacccttggggtctgggcattccccgtgtctggaggacagccccccactgttctcctcatctccagcctcagtagttgggggtagaaggagctcagcacctcttccagcccttaaagctgcagaaaaggtgtcacacggctgcctgtaccttggctccctgtcctgctcccggcttcccttaccctatcactggcctcaggcccccgcaggctgcctcttcccaacctccttggaagtacccctgtttcttaaacaattatttaagtgtacgtgtattattaaactgatgaacacatccccaga

SEQ ID NO: 175367 - protein, 1111 aa, Artificial Sequence
  derived and/or modified sequence
MHWLPAGHDINGALEPSNIDTSILEEYISKEDASDLCFPDISAPASSASYSHGQPAMPGSSGVHHLSPPGGGPSPGRHGPLPPPGYGTPLNCNNNNGMGAAPKPFPGGTGPPIKAEPKAPYAPGTLPDSPPDSGSEAYSPQQVNEPHLLRTITPETLCHVGVPSRLEHPPPPPAHLPGPPPPPPPPPHYPVLQRDLYMKAEPPIPHYAAMGQGLVPTDLHHTQQSQMLHQLLQQHGAELPTHPSKKRKHSESPPSTLNAQMLNGMIKQEPGTVTALPLHPTRAPSPPWPPQGPLSPGPGSLPLSIARVQTPPWHPPGAPSPGLLQDSDSLSGSYLDPNYQSIKWQPHQQNKWATLYDANYKELPMLTYRVDADKGFNFSVGDDAFVCQKKNHFQVTVYIGMLGEPKYVKTPEGLKPLDCFYLKLHGVKLEALNQSINIEQSQSDRSKRPFNPVTVNLPPEQVTKVTVGRLHFSETTANNMRKKGKPNPDQRYFMLVVALQAHAQNQNYTLAAQISERIIVRASNPGQFESDSDVLWQRAQVPDTVFHHGRVGINTDRPDEALVVHGNVKVMGSLMHPSDLRAKEHVQEVDTTEQLKRISRMRLVHYRYKPEFAASAGIEATAPETGVIAQEVKEILPEAVKDTGDMVFANGKTIENFLVVNKERIFMENVGAVKELCKLTDNLETRIDELERWSHKLAKLRRLDSLKSTGSSGAFSHAGSQFSRAGSVPHKKRPPKVASKSSSVVPDQACISQRFLQGTIIALVVVMAFSVVSMSTLYVLSLRTEEDLVDTDGRSSQSFGTTQLRQSPLTTGLPGIQPSLLLVTTSLTSSAPGSAVRTLDMCSSHPCPVICCSSPTTNPTTGPSLGPSFNPGHVLSPSPSPSTNRSGPSQMALLPVTNIRAKSWGLSVNGIGHSKHHKSLEPLASPAVPFPGGQGKAKNSPSLGFHGRARRGALQSSVGPAEPTWAQGQSEPVPSLTSIQVLENSMSITSQYCAPGDACRPGNFTYHIPVSSGTPLHLSLTLQMNSSSPVSVVLCSLRSKEEPCEEGSLPQSLHTHQDTQGTSHRWPITILSFREFTYHFRVALLGQANCSSEALAQPATDYHFHFYRLCD

SEQ ID NO: 175368 - DNA, 5745 bp, Artificial Sequence
  derived and/or modified sequence
cacagggcctgcagagaggggacccaccgggcaggatgcactggcttccagcaggccacgacatcaacggtgccctggagccctccaacatagacaccagcatcctggaggagtacatcagcaaggaggatgcctccgacctctgcttccctgacatctctgctccagccagctcggcctcctactcccacgggcagcctgcgatgcctggctccagcggggtccaccacctgagcccccctgggggtggaccctccccggggcgccatggtcccctcccacccccgggctacggcaccccgctgaactgcaacaacaacaacggcatgggcgctgcccccaagcccttcccggggggcaccgggccccccatcaaggctgagcccaaggctccctatgccccaggcacactgccggactctcccccagactcgggctccgaggcctactccccccagcaggtgaatgagccccacctcctgcgcacgataacccctgagacactgtgccacgtgggagtgccctcccgcctggagcatccgcccccacctccagcccacttgccaggccccccgccacccccaccacccccacctcactaccctgtcctgcagcgggatctgtacatgaaggccgagcccccgatcccccactacgctgccatggggcaggggctggtgcccactgatcttcaccacacccagcagtcccagatgctgcaccagctcctgcagcagcacggagctgagctccctacacacccctccaagaagaggaagcactctgaatccccccccagcaccctcaatgcccagatgctgaatggaatgatcaaacaggagcctgggaccgtgacagccctgcctctgcaccccactcgagccccatcgccaccctggcctccccagggtccgctctccccgggccctggttccttgcctctcagcattgcccgtgtccagacaccgccttggcacccgccaggtgccccctccccaggcctcctgcaggacagtgacagcctcagtggctcctacctggaccccaactaccagtccatcaagtggcagcctcatcagcagaacaagtgggcgaccctgtacgatgctaactacaaggagctgcccatgctcacctaccgcgtggatgcggacaagggcttcaacttttcggtgggcgacgacgcctttgtgtgccagaagaagaaccacttccaggtgacagtgtacatcggcatgctgggcgagcccaagtacgtcaagacgcccgagggcctcaagcccctcgactgcttctatctgaagctgcacggagtgaagctggaggccctgaaccagtccattaacatcgagcagtcccagtcagaccggagcaagcggcccttcaacccggtcacggtcaatctgccccctgagcaggtcacgaaggtgactgtggggcggctgcacttcagcgagaccaccgctaacaacatgcgtaagaagggcaagcccaacccggaccagaggtacttcatgctggtggtggccctccaggctcatgcacagaaccagaactacacgctggccgcccagatctcagagcgcatcattgtgcgggcctccaacccaggccagttcgagagcgacagcgatgtgttgtggcagcgggcacaggtgcccgacaccgtcttccaccacggccgcgtgggcatcaacacagaccggccggatgaggcgctggttgtgcacgggaatgtcaaggtcatgggctcgcttatgcacccctccgacctgcgcgccaaggaacacgtgcaggaggtggacaccaccgagcaattgaagaggatctcgcgcatgcggctggtgcactacagatacaagcccgagttcgccgccagcgcgggcatcgaggccaccgcgccagagacaggtgtcatcgctcaggaggtgaaggagatcttgcctgaggctgtgaaagacaccggagacatggtctttgccaatgggaaaaccatagagaacttcctggtggtgaacaaggagcgcatcttcatggagaacgtaggggccgtgaaggagctgtgcaagctgacagacaacctggagacgcgcattgatgagctggagcgctggagccacaagctggccaagctgcggcggctcgacagcctcaagtccaccggcagctcgggcgccttcagccatgcagggagccagttcagtcgggcgggcagcgtcccccacaagaagaggccccccaaggtggccagcaagtcatcgtccgtggttccggaccaggcctgcatcagccagcgcttcctgcagggaaccatcattgccctggtggtggtcatggccttcagcgtggtgtccatgtccacactgtacgtgctgagcctgcgcacagaggaggacctggtagacactgatggcaggtccagccagagctttgggaccacgcagctccgacagtcccccttgaccacggggctaccaggcatacagccctctttgctgctggtgaccaccagcctcaccagctcggccccaggttctgctgtccgcaccttggacatgtgttccagccacccctgccctgtcatctgctgttcctcacccactaccaaccctaccactggtcctagtcttggccccagctttaaccctggccatgttctcagcccaagtcccagccccagcaccaaccgctcaggccccagccagatggcccttctgccagtcaccaacatcagagccaagtcctggggtctttcagtcaatggcattggccactccaagcatcacaagagtctggagcctctggccagccctgcagtccccttccctggggggcagggcaaagccaagaacagtcccagccttggtttccatggccgggcccgccgaggggccctccagtccagcgtgggccctgctgagcccacctgggcccagggccagtcagagccagtgccctccctgacctccatccaggtgctggagaattcgatgtccatcacctcccagtactgtgctccaggggatgcctgcaggcctgggaacttcacctaccacatccctgtcagtagtggcaccccactgcacctcagcctgactctgcagatgaactcctcctcccccgtgtctgtggtgctgtgcagcctgaggtcaaaggaggaaccatgtgaggaggggagccttccacagagtctccacacccaccaggacacccagggcacctctcaccggtggccaataaccatcctgtccttccgtgaattcacctaccacttccgggtggcactgctgggtcaggccaactgcagttcagaggctctcgcccagccagccacagactaccacttccacttctaccgcctgtgtgactgagctgccctcctgaggcagcaccacaccagggaccaggggtgcccaggcaccccccaacactggatgcaatggtgttacactggagcccgctgcaggccagctctgctgttcactggccctacccgagactggtgaaactggaagtcttcacactggagttgctgttccagctggtcgcccctcacggcacagagggaacctgagagccagagacttcttgggccttcctgcctgccaccccctaggggccaggacaggaccagtttacctctttccagatatggtggttggagggctggttcaggtgccctggagggaaggggaagcctgtggccctgatttgttcagagcccattctcccttgcctccccttttgagactggagccaacccttttggagagaggacctgcccacctttgagatcagcagggggctcggatccagccctaagagacttgggtggacccccatgagtcaatggagggcagacggctctcccccttaaagctgttccctgggggatggcttggtagtggactttctggggtttgcctgttacgccagactcggacttctaagctttaagtgtggcccaggaggtttcttctccctgggagggcttggctcccaagaagtcccagggcagccgaggccagccctgcctgggttggagaaactgactttgtgccttaagtctactcagtgcctggtgaagccaccctcagcccttcacaggcctgaaccagtaggggccagtgggccaggtaagccctagagccttgaaccaggaatatccaggaagaggaaattccctttgagcccccagatggtattgcagcttcactgcctgcgttcctgggagcgtctggagctcacagtgatcagtgaccacatcattctctctgagcagaggagcaggaatccctcaagcagcagcctggtcttggctggtgggcagatgcaaatagcttttgctgttattaatgaagtaattactaaatgcacttaaaccagggcaggaaggaatggaaggatggagctagaaagctcagagtgggccagagcaggggtgtgacacttgcaaagacagggctctgactctgatccctcccagggagcctccgacacccatcccactcccaaccaccaagaccctgggttagggaagaagttgtatcttaagtgccaccttcaagtttcttagtggtgcctggtgcattccgaggctacatccaggctcatggaaggagtgtagtattcatttagccatgtctgccatgggtccagaaatgggaaagggaattgctgtccttgccctgtggtatgctgccacctctttgggaagcaggccttgcccctgtcccaccactcattctcagctttgaatgggaggcctttctatagtggaggcctttccttgaagcctatgaactgcaggcccccttttgccattgatctcaaagcacttgtcctcaggatagggaagagcagggggatgcaggaatagcagggatagcttgctcccagccccctccccaatttggttccgttgacataggaattttacgattcccaaaccatgcaggggctgagccttccttatgatgactttgttctccctcccactgggggaatcctccctatgccttaaaactgccgagccccactccatgtaataggattcctgggcttcctcaatgggggttcatgttcttggactgcgggccctcagtccttaactggaaagtgaccgtccactgccccatggagcccatctggacacagcacagccccaaaaccgttagcagctggctctgtttccaagcctggggaggggttcctcagtgcaggagttggggacaggctggggatccaagctgcttgagggggtcaaccttggaccaaagttgccttaagcctgtggtaaaagggcttcagggaaggtaagtgggccacctgctggaagctgccagctgcccggctggcaatggtgtgagtgtcttggccctgtccctgccctggggtccagcaggtcatccctcccttcttctctctcctttggcgtttgttcctgtagtcactgggctaatctccccctagcttcaagctgtacatagggcctcccagtgcaaatcctcctgcccataccgtgcacccttagaagcctgcgtgtgcatagagcgccccctacttcccagttaactcccagttcttctccctgagcttggtatttgtcatgtgccaactctgactctgaggtgggcagtgagggaagcagccccgggcctgcttgcttcctgtccccgaaatgttcgtttcttctgaagtaaatatacatatataaataaatgtataaatactgctttgtatctg

SEQ ID NO: 175369 - DNA, 3336 bp, Artificial Sequence
  derived and/or modified sequence
atgcattggctgcctgccggccatgatattaatggagccctcgagcccagcaacatcgacacttcgattctggaagaatacatctctaaggaggacgcctctgatctctgttttcccgacatctcagcgcccgcttcctctgcaagctactcacatgggcagccagccatgcccggaagctcaggtgtacaccacttgtctcccccagggggtggccccagccctggaaggcacgggccactgccccccccgggctatggaacgccacttaactgcaacaacaacaatggaatgggggcggcccccaagcccttcccagggggcacaggcccccccatcaaagcagaaccaaaggctccctacgccccaggtactttgcccgactcgcctcccgactcaggtagcgaagcctacagtcctcagcaggtgaatgaacctcacttgcttcgtactattactccggaaaccctctgccatgtgggcgttccttctcgcctggagcacccaccccccccacccgcccacctgccaggcccaccccccccgccgccgccccctccgcattatcccgttctccagagagatctttatatgaaggcagagccacccatccctcattacgccgcgatggggcaaggcctcgtccctacagacttgcaccacacccaacagtcccagatgctgcatcagctactgcagcagcatggtgccgagttgccaacccacccttcaaagaaaaggaaacattccgaatcgcccccctctactctcaacgctcagatgttaaatggaatgattaagcaggaaccgggcactgtgacggccctccccctccatccaacccgcgccccctcgcctccttggcctccacaggggccactttctcctggcccaggctcgctgccgctcagcattgcccgcgtgcaaactccaccttggcatcctcctggcgcgccgagtcctggtctgctccaagatagcgatagcctaagcgggagttatctggacccaaactatcaatctatcaaatggcagccacatcaacaaaacaaatgggccacgctgtatgacgcgaactataaagagctgcccatgctgacttaccgcgtggacgccgacaagggatttaacttttctgtgggggacgatgccttcgtttgtcagaagaagaaccatttccaagtcactgtgtatattgggatgcttggcgaacctaagtatgtgaaaacccccgaaggtctgaaaccattggactgcttttacttgaagttgcacggagtcaagttggaggctctgaaccagagtatcaatattgaacagtcgcaatcagatcgaagcaaaagaccattcaaccctgtcactgtgaaccttccgcccgagcaagtgaccaaggtaactgtcggccggctccacttctcggaaacaacagccaacaacatgcgcaagaaggggaaacccaaccctgatcagcgctattttatgttagtcgttgccctgcaggcacatgcccagaatcagaactatactctagctgcccagataagtgaacgcataattgtgcgggccagcaaccccggtcagtttgaaagcgatagcgacgtactctggcagcgagcccaagtcccagacacagtattccaccacggacgcgtgggaattaacaccgaccgacctgatgaggccctggtcgtccatggcaacgtcaaagttatgggatctctaatgcaccctagtgatctgcgggctaaagaacatgtgcaggaggtggacacgaccgagcagcttaaacgtatctctcggatgaggctggtgcactataggtacaaaccagagttcgctgcctctgccggcattgaggccacagctccggaaaccggggtgatagcacaagaagtgaaagaaatactccctgaagccgtcaaggatactggcgatatggtcttcgccaacggtaaaaccattgaaaatttcctggtggtaaataaggagcggatctttatggaaaacgtgggagctgtgaaagagctgtgtaaactgactgataatctcgaaactcgaattgatgagctagagaggtggtcacataaactggccaaacttagaagattggactccttgaaatctacgggctcatctggggcctttagtcatgccgggagccagtttagccgggccggtagcgtgccacacaagaagaggcctcccaaggtcgcttctaagagctcatcagtggttcccgaccaggcctgcatatctcagagatttctgcaagggactattatagcgctggtggtagtcatggcgttctcagtagtctccatgtcaacgctgtatgtgctgtcactaaggaccgaagaagatctggttgacaccgatgggcgctcctcacagagcttcggaacaactcaactgcggcagtcccccctgaccacgggactcccaggcattcagccttccttgttgctggtgaccacgtcgctgacctcatcggcccctggatctgcggtccgcactctggatatgtgctccagtcatccttgtccagtgatttgctgctcttctcccacgacaaatcccaccaccggacccagcttgggaccatctttcaaccccggacatgtgctctctcccagccctagcccgtcaacgaacaggtcggggccgagccagatggcgctcctacctgtaactaacattagggctaagagttgggggctcagcgtcaatggcattggacactcaaagcaccacaaatctctggaaccacttgcttcgcccgccgtgcccttcccagggggtcagggaaaggcgaagaatagtccttcattggggttccatggccgcgcgcggcgaggagctctgcagagtagtgtggggccagcggaacctacctgggcacagggccagtctgaacccgtaccttcacttacgtcaatacaagttctcgaaaactccatgagcatcacttctcaatactgtgctccgggagatgcctgtaggccggggaactttacgtaccacattccagtttcatccggcacccctctccatttgagtctgacactccagatgaattcctcctcccctgtgagtgttgtcctgtgttccctgaggagcaaggaagaaccatgcgaggaaggaagtctaccacagagtctgcacacccatcaggatactcagggtacaagccacagatggcccattactattttatcttttagggagtttacataccactttcgtgtggctctgctcgggcaggcaaattgctcaagtgaggcattggcccagcccgcaaccgattatcacttccatttttacaggctttgcgactag

SEQ ID NO: 175370 - DNA, 3336 bp, Artificial Sequence
  derived and/or modified sequence
atgcactggctgcctgctggccatgacatcaatggagccctggagcccagcaacatcgacaccagcatcctggaggagtacatcagcaaagaagatgccagtgacctgtgcttcccagacatcagcgccccagccagcagcgccagctacagccacggccagcctgccatgcctggcagcagtggagtgcaccacctgagccccccaggcggcggccccagccctggccgccacggccccctgcccccacctggctacggcacccccctgaactgcaacaacaacaacggcatgggcgccgcccccaagcccttccctgggggcactggaccacccatcaaggccgagcccaaggccccctatgcccctggcaccctgcctgacagccccccagattctggcagcgaggcctacagcccccagcaggtgaatgagccccacctgctgcggaccatcaccccagagaccctgtgccacgtgggcgtgcccagccggctggagcaccccccacctcctccagcccacctgcccggccccccacctcctcctcctcctccaccccactaccctgtgctgcagagggacctgtacatgaaggccgagccccccatcccccactacgccgccatgggccagggcctggtgcccacagacctgcaccacacccagcagagccagatgctgcaccagctgctgcagcagcacggggctgagctgcccacccaccccagcaagaagaggaagcacagcgagagcccccccagcaccctgaatgcccagatgctgaatggcatgatcaagcaggagcccggcaccgtgacagccctgcccctgcaccccacccgggcccccagccccccctggccaccccagggccccctgagccctggccctggcagcctgcccctgagcatcgcccgggtgcagaccccaccctggcaccccccaggggcccccagccctggcctgctgcaggacagcgacagcctgagcggcagctacctggaccccaactaccagagcatcaagtggcagccccaccagcagaacaagtgggccaccctgtatgatgccaactacaaggagctgcccatgctgacctacagagtggatgctgacaagggcttcaacttctctgtgggagatgatgcctttgtgtgccagaagaagaaccacttccaggtgacagtgtacatcggcatgctgggggagcccaagtatgtgaagaccccagagggcctgaagcccctggactgcttctacctgaagctgcatggagtgaagctggaggccctgaaccagagcatcaacatcgagcagagccagagcgacaggagcaagaggcccttcaaccctgtgacagtgaacctgcccccagagcaggtgaccaaggtgacagtgggccgcctgcacttcagcgagaccacagccaacaacatgaggaagaagggcaagcccaacccagaccagcgctacttcatgctggtggtggccctgcaggcccacgcccagaaccagaactacaccctggccgcccagatcagcgagcgcatcatcgtgcgggccagcaaccctggccagtttgaaagtgacagtgatgtgctgtggcagagggcccaggtgcctgacaccgtcttccaccacggccgggtgggcatcaacacagacagaccagatgaggccctggtggtgcatggaaatgtgaaggtgatgggcagcctgatgcaccccagcgacctgcgggccaaggagcacgtgcaggaggtggacaccacagagcagctgaagaggatcagcaggatgaggctggtgcactaccgctacaagccagagtttgctgccagcgctggcatcgaggccacagcccctgagactggagtcatcgcccaggaggtgaaggagatcctgcctgaggccgtgaaggacacaggagacatggtgtttgccaacgggaagaccatcgagaacttcctggtggtgaacaaggagcgcatcttcatggagaatgtgggcgctgtgaaggagctgtgcaagctgacagacaacctggagaccagaattgatgagctggagcgctggagccacaagctggccaagctgcggcggctggacagcctgaagagcacaggcagcagcggggccttcagccacgccggcagccagttcagcagagctggctctgtgccccacaagaagaggcctcccaaggtggccagcaagagcagctctgtggtgcctgaccaggcctgcatcagccagcgcttcctgcagggcaccatcatcgccctggtggtggtgatggccttctctgtggtgtccatgagcaccctgtatgtgctgagcctgaggacagaggaggacctggtggacacagatggccgcagcagccagagctttggcaccacccagctgcggcagagccccctgaccaccggcctgcccggcatccagcccagcctgctgctggtgaccaccagcctgaccagcagcgcccctggcagcgctgtgaggaccctggacatgtgcagcagccacccctgccctgtgatctgctgcagcagccccaccaccaaccccaccaccggccccagcctgggccccagcttcaaccctggccacgtgctgagccccagccccagccccagcaccaacagaagtggccccagccagatggccctgctgcctgtgaccaacatccgggccaagtcctggggcctgtctgtgaatggaattggccacagcaagcaccacaagagcctggagcccctggccagccctgctgtgcccttccctgggggccagggcaaggccaagaacagccccagcctgggcttccacggccgggcccggcggggggccctgcagagctctgtgggccctgctgagcccacctgggcccagggccagagcgagcctgtgcccagcctgaccagcatccaggtgctggagaacagcatgagcatcaccagccagtactgtgcccctggagatgcctgcaggcctggcaacttcacctaccacatccctgtgagcagcggcacccccctgcacctgagcctgaccctgcagatgaacagcagcagccctgtgtctgtggtgctgtgcagcctgcggagcaaggaggagccctgtgaggagggcagcctgccccagagcctgcacacccaccaggacacccagggcaccagccaccgctggcccatcaccatcctgtccttccgggagttcacctaccacttccgggtggccctgctgggccaggccaactgcagcagcgaggccctggcccagcctgccacagactaccacttccacttctaccgcctgtgtgactag

SEQ ID NO: 175371 - DNA, 3336 bp, Artificial Sequence
  derived and/or modified sequence
atgcactggctgcccgccggccacgacatcaacggcgccctggagcccagcaacattgacacctcaatcttagaggagtatatctccaaagaggacgcatcagacctgtgcttcccagacatatcagctcctgcgtcatcggcttcctatagtcacggtcaacctgctatgcccggctctagtggggtgcatcacctctccccccccggcgggggtccaagtcccggtagacacgggcctttgcccccaccgggctacggcaccccactgaattgtaataataataatggaatgggagcagcccctaagccatttcccggagggaccggacctcccattaaggccgaaccaaaagcaccctatgccccagggactctccctgatagtcctccggactctgggtcagaagcttacagtccccagcaggtgaacgagccccaccttctgaggacgatcactcccgagactctctgtcatgttggtgtcccaagccggcttgagcacccaccacctccccccgcccacctgcctggacctcctcctccccccccaccgcctcctcactaccccgtgctccaacgggacctgtacatgaaagctgagcctccgattccacattacgccgccatgggtcagggactggtacccacagaccttcatcacactcaacagagccaaatgctccaccagttactgcagcaacacggagctgagctcccaactcaccccagtaagaagcgaaaacacagtgagagcccaccgagcaccttaaatgcccagatgctgaacggaatgatcaaacaagagccgggaactgtaaccgctttacccttgcatccgacacgggccccgagtcccccttggccaccccagggcccgttgagtcccggaccaggctctctccccttatcaatcgccagggtgcagacccccccctggcatccacccggtgccccgtcgcccggcttgctgcaggacagcgattccctgagtgggtcttatctggaccctaactaccaatccatcaagtggcaacctcaccagcagaataagtgggccacactctatgatgccaattacaaggagctgccaatgctgacttatagggtcgatgcagacaaagggtttaactttagcgtcggtgacgatgccttcgtttgccagaagaaaaatcactttcaggttacagtctacattggcatgctgggcgaacccaagtacgtgaaaaccccagaggggctgaagcctctcgactgtttttatttgaagctgcatggagtgaaacttgaagccttaaaccagtcaattaatatcgagcaatcgcaaagtgacaggtcaaagcggcccttcaatcctgtcacggtgaacctgccacctgaacaggtcacaaaagtgaccgttggccggcttcacttctcagaaactacagcgaacaatatgaggaagaaggggaagccaaacccagatcagcggtatttcatgttggtggtggctctgcaggcacatgcccagaaccagaactacacactcgctgcacagatctcagaaagaattattgttagggccagcaatcctgggcagtttgagagcgattccgatgttctatggcagagagctcaggtgccggacaccgtatttcatcacggtcgtgtcggcattaataccgacaggcccgatgaagctctggtcgtccacggaaatgtcaaagtaatgggctcactgatgcaccccagcgatttacgggccaaagagcatgttcaagaggtggatacaacagagcagttgaagaggatcagtcgaatgaggctcgttcattacaggtataagccggagttcgccgcctctgctggtatcgaagcgaccgcacctgaaaccggcgtgatcgcacaggaggtaaaagaaatcctgccggaggccgtgaaggacactggagatatggtttttgcaaatggaaaaacaatagagaatttcctggtagtcaacaaggagaggatctttatggaaaatgttggagctgtgaaggagctctgcaaactcaccgacaaccttgagacaaggattgatgagctggagcggtggtctcacaaactggcaaaactgcgtcgccttgacagtctaaagtcaacaggctcatctggtgccttttcccatgccggatctcaatttagcagggccggatcggtacctcacaagaagaggccccctaaagttgcctcgaagagctcttctgtggtgccagatcaggcatgcattagccagcgtttcctccaggggactattatcgcactcgtggtcgtcatggctttttcagtggtcagcatgagtactctctatgtactcagtcttcgcacagaggaagatctggtggatacagatggcaggagctcccagagttttggcactacgcagctgagacagagccccttaaccaccgggctgcctggcatacagccatctctgctccttgtgacaaccagcctgacatcctccgcacccggaagcgccgtgagaacattggatatgtgttcatctcacccgtgcccggtgatttgttgtagctctccaacaaccaatcccaccaccggtccctcactcggtcccagctttaatccaggccacgtcctgagtcccagcccaagtcccagtactaatagatccggcccgtcccagatggcactgcttccagtcaccaatatacgtgcaaaatcatggggcctgagcgtaaacggcatcggccacagcaagcatcataagtcactggaacccctggcctctccggccgtgccctttccaggggggcagggcaaggccaagaattcaccttctctgggcttccatggaagggcccggaggggcgccttgcagtccagtgtggggcccgctgaaccaacctgggctcaaggccagtcagaacctgtgccatcacttacttcgatccaggtgctggagaatagtatgtcgataaccagccaatattgtgcaccaggagacgcttgccgacctgggaacttcacataccacatacctgtgagctctggcacacctctccatctatctcttacacttcaaatgaactcctctagtccagttagtgtggttttatgcagtctcaggtctaaggaagagccatgtgaagagggaagcctacctcaaagtctgcacactcatcaagatacccagggcacctcacacagatggccaatcaccatactgtcctttagagagttcacataccatttcagagtggctttgttgggccaggctaattgttccagcgaggcccttgcgcagccagctaccgactatcacttccacttttaccggctctgtgattag

SEQ ID NO: 175372 - DNA, 3336 bp, Artificial Sequence
  derived and/or modified sequence
atgcactggctgcccgcaggccatgacattaatggagcgttggagccttcaaacattgacaccagcattctggaagagtacattagcaaagaagacgcctccgacttatgtttccccgacatcagtgccccagctagttcagcttcttactctcacggtcagccggcaatgcccggtagctccggggtgcaccacctgtccccccctggcggaggcccatctccagggcgacatgggcctctcccccctcctggatatggtaccccactgaattgtaataataacaacgggatgggggctgctcctaagcctttcccaggcggaaccggcccacccatcaaagctgaacctaaagcaccgtacgcaccgggaacactgcccgactctccccctgatagcggttctgaggcttacagtcctcaacaggtgaatgaacctcacttgttacgtaccatcactccagagaccctatgccatgtaggagtccccagtcgactcgagcaccctcctcctcctcctgctcatttgccaggccctcctccaccacctcccccacccccacattatccagtcctgcaacgggatctctacatgaaggcagaaccgcctattccccactacgctgcaatgggccagggccttgtccccaccgacctgcatcatacccagcaatcccaaatgctccaccagttgctgcagcagcacggcgctgagctgcctacgcaccctagcaagaaacgcaagcactctgaatccccaccatccacccttaacgcccagatgcttaacggtatgatcaagcaggagccaggcactgtcactgccctccccttgcaccccacaagagcgccttctccaccgtggccacctcagggtcctctctcacctggccctggtagcctgcctttgagcatcgccagggttcaaactccgccatggcatccccctggagccccaagccctggcctgctccaggattctgatagtctgagtgggtcatacctcgaccccaattatcaatccatcaaatggcagccacaccagcagaataaatgggccactctctatgacgctaactataaggagctgcctatgttgacctatagagtcgacgccgacaagggcttcaattttagcgtgggcgatgatgcctttgtgtgtcaaaagaagaaccattttcaggtcaccgtgtacattggtatgcttggggagccgaagtacgtgaaaactcctgaaggattgaaacctttagactgtttctatctcaaacttcatggtgttaagttggaggctttaaatcagagtatcaatattgagcaatcacaaagtgacagaagtaaacgacctttcaatccggtgactgtcaacctgcccccagaacaggtgaccaaggtgaccgtcggacggctccatttctccgagaccaccgctaataatatgcggaaaaaagggaagccaaaccctgatcagcggtacttcatgctggtggtggctctccaggcccatgcccagaaccagaattataccctggccgctcagataagtgagcgtatcatcgtgagggcttcaaatcccggacaattcgagtcagatagcgacgtgctctggcagcgggcacaagttcccgacaccgtcttccaccatggtagagtgggtattaacactgatcgcccagacgaggctctggtcgtccacggtaatgtgaaagttatggggagtctgatgcatccaagcgatcttagagccaaggagcatgtccaggaggtcgatactaccgagcaactgaagcggatcagcagaatgaggttggtgcattatcgctataagcccgagttcgctgcctctgccggaatagaagccaccgctcccgagacaggggtgattgctcaggaggttaaagagatattgccagaagccgtcaaggacaccggagacatggtgtttgcaaacgggaagactatcgagaacttcttggtggtgaataaggaacgcatttttatggaaaatgtgggtgcagtgaaggagctgtgtaaactcactgacaaccttgaaacccgaatcgatgagctggagaggtggagccacaagttggctaaactgcggagactagatagtcttaaatctacagggagcagcggcgcattcagccatgccggatcccagttctctagggccggttcagtgccccataagaagcggccacccaaagtggctagcaagtcttcttccgtggtgccagatcaggcgtgcatttcgcagcggttcctgcaaggaactattattgcccttgtggttgtcatggccttcagtgtggtatctatgagtacactttatgttctttccctccggacggaagaggatttagtggataccgacggaagatcaagccagagctttggcactactcaattaaggcagagtcccctaaccaccggactgccaggaatccagccctcactattactcgtaactacatccttgactagctcagcccctggttcggccgttcggaccctggatatgtgctcatcacatccctgcccggtcatttgctgctcctctcctactacaaacccaacgaccgggccaagtctgggaccttcgttcaacccgggtcacgtactctcgccaagcccatccccgagcactaaccgttcgggaccctcgcagatggccttgctgcccgtgactaatataagagctaagtcatggggcctgtctgttaatggcattggacatagcaagcaccacaagtccctggagccactggcttcccccgcagtgcccttccccggaggacaaggcaaggccaaaaatagcccgtctttgggattccacggacgcgctaggaggggtgctctgcagagctctgtgggacctgctgaacctacctgggcacagggacagtccgagccggtacccagtctgacatccatccaggtgctggaaaattcaatgtctattaccagccagtattgcgcgccaggcgatgcctgtcgccctggaaacttcacttaccacattcccgtgagctcaggaacaccgctccatctttcgctcactctgcagatgaacagtagttctccagtgtccgttgtgctgtgtagcctaaggagcaaagaagaaccgtgcgaggaggggtccctgccacaaagtctacatacccaccaggatacccagggcactagccaccgatggccaattaccatacttagctttagggaattcacataccacttccgagtggcgctgctgggccaagcgaattgcagctcagaagcgcttgcccaaccagccacagactaccacttccacttttaccgtctctgtgattag

SEQ ID NO: 175373 - DNA, 3336 bp, Artificial Sequence
  derived and/or modified sequence
atgcactggctgcccgccggccacgacatcaacggcgccctggagcccagcaacatcgacaccagcatcctggaggagtacatcagcaaggaggacgccagcgacctgtgcttccccgacatcagcgcccccgccagcagcgccagctacagccacggccagcccgccatgcccggcagcagcggcgtgcaccacctgagcccccccggcggcggccccagccccggcagacacggccccctgcccccccccggctacggcacccccctgaactgcaacaacaacaacggcatgggcgccgcccccaagcccttccccggcggcaccggcccccccatcaaggccgagcccaaggccccctacgcccccggcaccctgcccgacagcccccccgacagcggcagcgaggcctacagcccccagcaggtgaacgagccccacctgctgagaaccatcacccccgagaccctgtgccacgtgggcgtgcccagcagactggagcaccccccccccccccccgcccacctgcccggcccccccccccccccccccccccccccccactaccccgtgctgcagagagacctgtacatgaaggccgagccccccatcccccactacgccgccatgggccagggcctggtgcccaccgacctgcaccacacccagcagagccagatgctgcaccagctgctgcagcagcacggcgccgagctgcccacccaccccagcaagaagagaaagcacagcgagagcccccccagcaccctgaacgcccagatgctgaacggcatgatcaagcaggagcccggcaccgtgaccgccctgcccctgcaccccaccagagcccccagccccccctggcccccccagggccccctgagccccggccccggcagcctgcccctgagcatcgccagagtgcagacccccccctggcacccccccggcgcccccagccccggcctgctgcaggacagcgacagcctgagcggcagctacctggaccccaactaccagagcatcaagtggcagccccaccagcagaacaagtgggccaccctgtacgacgccaactacaaggagctgcccatgctgacctacagagtggacgccgacaagggcttcaacttcagcgtgggcgacgacgccttcgtgtgccagaagaagaaccacttccaggtgaccgtgtacatcggcatgctgggcgagcccaagtacgtgaagacccccgagggcctgaagcccctggactgcttctacctgaagctgcacggcgtgaagctggaggccctgaaccagagcatcaacatcgagcagagccagagcgacagaagcaagagacccttcaaccccgtgaccgtgaacctgccccccgagcaggtgaccaaggtgaccgtgggcagactgcacttcagcgagaccaccgccaacaacatgagaaagaagggcaagcccaaccccgaccagagatacttcatgctggtggtggccctgcaggcccacgcccagaaccagaactacaccctggccgcccagatcagcgagagaatcatcgtgagagccagcaaccccggccagttcgagagcgacagcgacgtgctgtggcagagagcccaggtgcccgacaccgtgttccaccacggcagagtgggcatcaacaccgacagacccgacgaggccctggtggtgcacggcaacgtgaaggtgatgggcagcctgatgcaccccagcgacctgagagccaaggagcacgtgcaggaggtggacaccaccgagcagctgaagagaatcagcagaatgagactggtgcactacagatacaagcccgagttcgccgccagcgccggcatcgaggccaccgcccccgagaccggcgtgatcgcccaggaggtgaaggagatcctgcccgaggccgtgaaggacaccggcgacatggtgttcgccaacggcaagaccatcgagaacttcctggtggtgaacaaggagagaatcttcatggagaacgtgggcgccgtgaaggagctgtgcaagctgaccgacaacctggagaccagaatcgacgagctggagagatggagccacaagctggccaagctgagaagactggacagcctgaagagcaccggcagcagcggcgccttcagccacgccggcagccagttcagcagagccggcagcgtgccccacaagaagagaccccccaaggtggccagcaagagcagcagcgtggtgcccgaccaggcctgcatcagccagagattcctgcagggcaccatcatcgccctggtggtggtgatggccttcagcgtggtgagcatgagcaccctgtacgtgctgagcctgagaaccgaggaggacctggtggacaccgacggcagaagcagccagagcttcggcaccacccagctgagacagagccccctgaccaccggcctgcccggcatccagcccagcctgctgctggtgaccaccagcctgaccagcagcgcccccggcagcgccgtgagaaccctggacatgtgcagcagccacccctgccccgtgatctgctgcagcagccccaccaccaaccccaccaccggccccagcctgggccccagcttcaaccccggccacgtgctgagccccagccccagccccagcaccaacagaagcggccccagccagatggccctgctgcccgtgaccaacatcagagccaagagctggggcctgagcgtgaacggcatcggccacagcaagcaccacaagagcctggagcccctggccagccccgccgtgcccttccccggcggccagggcaaggccaagaacagccccagcctgggcttccacggcagagccagaagaggcgccctgcagagcagcgtgggccccgccgagcccacctgggcccagggccagagcgagcccgtgcccagcctgaccagcatccaggtgctggagaacagcatgagcatcaccagccagtactgcgcccccggcgacgcctgcagacccggcaacttcacctaccacatccccgtgagcagcggcacccccctgcacctgagcctgaccctgcagatgaacagcagcagccccgtgagcgtggtgctgtgcagcctgagaagcaaggaggagccctgcgaggagggcagcctgccccagagcctgcacacccaccaggacacccagggcaccagccacagatggcccatcaccatcctgagcttcagagagttcacctaccacttcagagtggccctgctgggccaggccaactgcagcagcgaggccctggcccagcccgccaccgactaccacttccacttctacagactgtgcgactag

SEQ ID NO: 175374 - protein, 792 aa, Artificial Sequence
  derived and/or modified sequence
MWIQVRTMDGRQTHTVDSLSRLTKVEELRRKIQELFHVEPGLQRLFYRGKQMEDGHTLFDYEVRLNDTIQLLVRQSLVLPHSTKERDSELSDTDSGCCLGQSESDKSSTHGEAAAETDSRPADEDMWDETELGLYKVNEYVDARDTNMGAWFEAQVVRVTRKAPSRDEPCSSTSRPALEEDVIYHVKYDDYPENGVVQMNSRDVRARARTIIKWQDLEVGQVVMLNYNPDNPKERGFWYDAEISRKRETRTARELYANVVLGDDSLNDCRIIFVDEVFKIERPGEGSPMVDNPMRRKSGPSCKHCKDDVNRLCRVCACHLCGGRQDPDKQLMCDECDMAFHIYCLDPPLSSVPSEDEWYCPECRNDASEVVLAGERLRESKKKAKMASATSSSQRDWGKGMACVGRTKECTIVPSNHYGPIPGIPVGTMWRFRVQVSESGVHRPHVAGIHGRSNDGAYSLVLAGGYEDDVDHGNFFTYTGSGGRDLSGNKRTAEQSCDQKLTNTNRALALNCFAPINDQEGAEAKDWRSGKPVRVVRNVKGGKNSKYAPAEGNRYDGIYKVVKYWPEKGKSGFLVWRYLLRRDDDEPGPWTKEGKDRIKKLGLTMQYPEGYLEALANREREKENSKREEEEQQEGGFASPRTGKGKWKRKSAGGGPSRAGPRRTSKKTKVEPYSLTAQQSSLIREDKSNAKLWNEVLASLKDRPASGSPFQLFLSKVEETFQCICCQELVFRPITTVCQHNVCKDCLDRSFRAQVFSCPACRYDLGRSYAMQVNQPLQTVLNQLFPGYGNGR

SEQ ID NO: 175375 - protein, 407 aa, Artificial Sequence
  derived and/or modified sequence
MASATSSSQRDWGKGMACVGRTKECTIVPSNHYGPIPGIPVGTMWRFRVQVSESGVHRPHVAGIHGRSNDGAYSLVLAGGYEDDVDHGNFFTYTGSGGRDLSGNKRTAEQSCDQKLTNTNRALALNCFAPINDQEGAEAKDWRSGKPVRVVRNVKGGKNSKYAPAEGNRYDGIYKVVKYWPEKGKSGFLVWRYLLRRDDDEPGPWTKEGKDRIKKLGLTMQYPEGYLEALANREREKENSKREEEEQQEGGFASPRTGKGKWKRKSAGGGPSRAGPRRTSKKTKVEPYSLTAQQSSLIREDKSNAKLWNEVLASLKDRPASGSPFQLFLSKVEETFQCICCQELVFRPITTVCQHNVCKDCLDRSFRAQVFSCPACRYDLGRSYAMQVNQPLQTVLNQLFPGYGNGR

SEQ ID NO: 175376 - protein, 805 aa, Artificial Sequence
  derived and/or modified sequence
MGVFAVPPLSADTMWIQVRTMDGRQTHTVDSLSRLTKVEELRRKIQELFHVEPGLQRLFYRGKQMEDGHTLFDYEVRLNDTIQLLVRQSLVLPHSTKERDSELSDTDSGCCLGQSESDKSSTHGEAAAETDSRPADEDMWDETELGLYKVNEYVDARDTNMGAWFEAQVVRVTRKAPSRDEPCSSTSRPALEEDVIYHVKYDDYPENGVVQMNSRDVRARARTIIKWQDLEVGQVVMLNYNPDNPKERGFWYDAEISRKRETRTARELYANVVLGDDSLNDCRIIFVDEVFKIERPGEGSPMVDNPMRRKSGPSCKHCKDDVNRLCRVCACHLCGGRQDPDKQLMCDECDMAFHIYCLDPPLSSVPSEDEWYCPECRNDASEVVLAGERLRESKKKAKMASATSSSQRDWGKGMACVGRTKECTIVPSNHYGPIPGIPVGTMWRFRVQVSESGVHRPHVAGIHGRSNDGAYSLVLAGGYEDDVDHGNFFTYTGSGGRDLSGNKRTAEQSCDQKLTNTNRALALNCFAPINDQEGAEAKDWRSGKPVRVVRNVKGGKNSKYAPAEGNRYDGIYKVVKYWPEKGKSGFLVWRYLLRRDDDEPGPWTKEGKDRIKKLGLTMQYPEGYLEALANREREKENSKREEEEQQEGGFASPRTGKGKWKRKSAGGGPSRAGPRRTSKKTKVEPYSLTAQQSSLIREDKSNAKLWNEVLASLKDRPASGSPFQLFLSKVEETFQCICCQELVFRPITTVCQHNVCKDCLDRSFRAQVFSCPACRYDLGRSYAMQVNQPLQTVLNQLFPGYGNGR

SEQ ID NO: 175377 - DNA, 4086 bp, Artificial Sequence
  derived and/or modified sequence
ggccacttggcccgggcctcctttctcctctggtcgtggggaaggagggatgggttggaccttctgcttttctttcaattccctcttttcattctccttcctcctcaatcttcaacacttggctagtcgttaatgccttaagtgcttaatttgttgtgtctggtcctggccagggtctggctgtacaggaggactggaagggcatcctgggagtttcctggtgtccacaggccggacaaaagcaaccccgactccttagagcatggcatggctcagaggtgctggtaaaactgatgggggtttttgctgtccctcccctcagcgccgacaccatgtggatccaggttcggaccatggacgggaggcagacccacacggtggactcgctgtccaggctgaccaaggtggaggagctgaggcggaagatccaggagctgttccacgtggagccaggcctgcagaggctgttctacaggggcaaacagatggaggacggccataccctcttcgactacgaggtccgcctgaatgacaccatccagctcctggtccgccagagcctcgtgctcccccacagcaccaaggagcgggactccgagctctccgacaccgactccggctgctgcctgggccagagtgagtcagacaagtcctccacccacggtgaggcggccgccgagactgacagcaggccagccgatgaggacatgtgggatgagacggaattggggctgtacaaggtcaatgagtacgtcgatgctcgggacacgaacatgggggcgtggtttgaggcgcaggtggtcagggtgacgcggaaggccccctcccgggacgagccctgcagctccacgtccaggccggcgctggaggaggacgtcatttaccacgtgaaatacgacgactacccggagaacggcgtggtccagatgaactccagggacgtccgagcgcgcgcccgcaccatcatcaagtggcaggacctggaggtgggccaggtggtcatgctcaactacaaccccgacaaccccaaggagcggggcttctggtacgacgcggagatctccaggaagcgcgagaccaggacggcgcgggaactctacgccaacgtggtgctgggggatgattctctgaacgactgtcggatcatcttcgtggacgaagtcttcaagattgagcggccgggtgaagggagccccatggttgacaaccccatgagacggaagagcgggccgtcctgcaagcactgcaaggacgacgtgaacagactctgccgggtctgcgcctgccacctgtgcgggggccggcaggaccccgacaagcagctcatgtgcgatgagtgcgacatggccttccacatctactgcctggacccgcccctcagcagtgttcccagcgaggacgagtggtactgccctgagtgccggaatgatgccagcgaggtggtactggcgggagagcggctgagagagagcaagaagaaggcgaagatggcctcggccacatcgtcctcacagcgggactggggcaagggcatggcctgtgtgggccgcaccaaggaatgtaccatcgtcccgtccaaccactacggacccatcccggggatccccgtgggcaccatgtggcggttccgagtccaggtcagcgagtcgggtgtccatcggccccacgtggctggcatacacggccggagcaacgacggagcgtactccctagtcctggcggggggctatgaggatgatgtggaccatgggaattttttcacatacacgggtagtggtggtcgagatctttccggcaacaagaggaccgcggaacagtcttgtgatcagaaactcaccaacaccaacagggcgctggctctcaactgctttgctcccatcaatgaccaagaaggggccgaggccaaggactggcggtcggggaagccggtcagggtggtgcgcaatgtcaagggtggcaagaatagcaagtacgcccccgctgagggcaaccgctacgatggcatctacaaggttgtgaaatactggcccgagaaggggaagtccgggtttctcgtgtggcgctaccttctgcggagggacgatgatgagcctggcccttggacgaaggaggggaaggaccggatcaagaagctggggctgaccatgcagtatccagaaggctacctggaagccctggccaaccgagagcgagagaaggagaacagcaagagggaggaggaggagcagcaggaggggggcttcgcgtcccccaggacgggcaagggcaagtggaagcggaagtcggcaggaggtggcccgagcagggccgggtccccgcgccggacatccaagaaaaccaaggtggagccctacagtctcacggcccagcagagcagcctcatcagagaggacaagagcaacgccaagctgtggaatgaggtcctggcgtcactcaaggaccggccggcgagcggcagcccgttccagttgttcctgagtaaagtggaggagacgttccagtgtatctgctgtcaggagctggtgttccggcccatcacgaccgtgtgccagcacaacgtgtgcaaggactgcctggacagatcctttcgggcacaggtgttcagctgccctgcctgccgctacgacctgggccgcagctatgccatgcaggtgaaccagcctctgcagaccgtcctcaaccagctcttccccggctacggcaatggccggtgatctccaagcacttctcgacaggcgttttgctgaaaacgtgtcggagggctcgttcatcggcactgattttgttcttagtgggcttaacttaaacaggtagtgtttcctccgttccctaaaaaggtttgtcttcctttttttttttatttttatttttcaaatctatacattttcaggaatttatgtattctggctaaaagttggacttctcagtattgtgtttagttctttgaaaacataaaagcctgcaatttctcgacaaaacaacacaagattttttaaagatggaatcagaaactacgtggtgtggaggctgttgatgtttctggtgtcaagttctcagaagttgctgccaccaactctttaagaaggcgacaggatcagtccttctctcgggttctggcccccaaggtcagagcaagcatcttcctgacagcattttgtcatctaaagtccagtgacatggttccccgtggtggcccgtggcagcccgtggcatggcgtggctcagctgtctgttgaagttgttgcaaggaaaagaggaaacatctcgggcctagttcaaacctttgcctcaaagccatcccccaccagactgcttagcgtctgagatccgcgtgaaaagtcctctgcccacgagagcagggagttggggccacgcagaaatggcctcaaggggactctgctccacgtggggccaggcgtgtgactgacgctgtccgacgaaggcggccacggacggacgccagcacacgaagtcacgtgcaagtgcctttgattcgttccttctttctaaagacgacagtctttgttgttagcactgaattattgaaaatgtcaaccagattctagaaactgcggtcatccagttcttcctgacaccggatgggtgcttgggaaccgtttgagccttatagatcatttacattcaatttttttaactcagcaagtgagaacttacaagagggtttttttaaaatttttttttctcttaatgaacacattttctaaatgaattttttttgtagttactgtatatgtaccaagaaagatataacgttagggtttggttgtttttgtttttgtattttttttcttttgaaagggtttgttaatttttctaattttaccaaagtttgcagcctatacctcaataaaacagggatattttaaatcacatacctgcagacaaactggagcaatgttatttttaaagggtttttttcacctccttattcttagattattaatgtattagggaagaatgagacaattttgtgtaggctttttctaaagtccagtactttgtccagattttagattctcagaataaatgtttttcacagatagaaaaaaaaaaaaaaaaaaaaaa

SEQ ID NO: 175378 - DNA, 2418 bp, Artificial Sequence
  derived and/or modified sequence
atgggcgtgttcgccgtgccccccctgagcgccgacaccatgtggatccaggtgagaaccatggacggcagacagacccacaccgtggacagcctgagcagactgaccaaggtggaggagctgagaagaaagatccaggagctgttccacgtggagcccggcctgcagagactgttctacagaggcaagcagatggaggacggccacaccctgttcgactacgaggtgagactgaacgacaccatccagctgctggtgagacagagcctggtgctgccccacagcaccaaggagagagacagcgagctgagcgacaccgacagcggctgctgcctgggccagagcgagagcgacaagagcagcacccacggcgaggccgccgccgagaccgacagcagacccgccgacgaggacatgtgggacgagaccgagctgggcctgtacaaggtgaacgagtacgtggacgccagagacaccaacatgggcgcctggttcgaggcccaggtggtgagagtgaccagaaaggcccccagcagagacgagccctgcagcagcaccagcagacccgccctggaggaggacgtgatctaccacgtgaagtacgacgactaccccgagaacggcgtggtgcagatgaacagcagagacgtgagagccagagccagaaccatcatcaagtggcaggacctggaggtgggccaggtggtgatgctgaactacaaccccgacaaccccaaggagagaggcttctggtacgacgccgagatcagcagaaagagagagaccagaaccgccagagagctgtacgccaacgtggtgctgggcgacgacagcctgaacgactgcagaatcatcttcgtggacgaggtgttcaagatcgagagacccggcgagggcagccccatggtggacaaccccatgagaagaaagagcggccccagctgcaagcactgcaaggacgacgtgaacagactgtgcagagtgtgcgcctgccacctgtgcggcggcagacaggaccccgacaagcagctgatgtgcgacgagtgcgacatggccttccacatctactgcctggacccccccctgagcagcgtgcccagcgaggacgagtggtactgccccgagtgcagaaacgacgccagcgaggtggtgctggccggcgagagactgagagagagcaagaagaaggccaagatggccagcgccaccagcagcagccagagagactggggcaagggcatggcctgcgtgggcagaaccaaggagtgcaccatcgtgcccagcaaccactacggccccatccccggcatccccgtgggcaccatgtggagattcagagtgcaggtgagcgagagcggcgtgcacagaccccacgtggccggcatccacggcagaagcaacgacggcgcctacagcctggtgctggccggcggctacgaggacgacgtggaccacggcaacttcttcacctacaccggcagcggcggcagagacctgagcggcaacaagagaaccgccgagcagagctgcgaccagaagctgaccaacaccaacagagccctggccctgaactgcttcgcccccatcaacgaccaggagggcgccgaggccaaggactggagaagcggcaagcccgtgagagtggtgagaaacgtgaagggcggcaagaacagcaagtacgcccccgccgagggcaacagatacgacggcatctacaaggtggtgaagtactggcccgagaagggcaagagcggcttcctggtgtggagatacctgctgagaagagacgacgacgagcccggcccctggaccaaggagggcaaggacagaatcaagaagctgggcctgaccatgcagtaccccgagggctacctggaggccctggccaacagagagagagagaaggagaacagcaagagagaggaggaggagcagcaggagggcggcttcgccagccccagaaccggcaagggcaagtggaagagaaagagcgccggcggcggccccagcagagccggccccagaagaaccagcaagaagaccaaggtggagccctacagcctgaccgcccagcagagcagcctgatcagagaggacaagagcaacgccaagctgtggaacgaggtgctggccagcctgaaggacagacccgccagcggcagccccttccagctgttcctgagcaaggtggaggagaccttccagtgcatctgctgccaggagctggtgttcagacccatcaccaccgtgtgccagcacaacgtgtgcaaggactgcctggacagaagcttcagagcccaggtgttcagctgccccgcctgcagatacgacctgggcagaagctacgccatgcaggtgaaccagcccctgcagaccgtgctgaaccagctgttccccggctacggcaacggcagatag

SEQ ID NO: 175379 - DNA, 2418 bp, Artificial Sequence
  derived and/or modified sequence
atgggggttttcgctgtacccccgttgagtgccgacaccatgtggattcaggtgcgcaccatggacggccgacaaacacacacagtagacagcctgtcccgcctgaccaaggtcgaggaactgcgacgcaaaatccaggagctgtttcacgtcgagcccggcttgcagcgcttattctatagaggcaaacagatggaggatggtcacacattgttcgactacgaagtgcggctgaatgacacaatacagctgctggtccgacagagcctggtacttccacactcaacgaaggagagagacagcgagctgagcgacacagactccggttgctgcctggggcagtctgaatctgataagtcaagtacccacggtgaggcagcagctgagactgattcgagacctgcagacgaagatatgtgggacgagacagagttgggactgtacaaagttaatgaatacgtggatgcccgagatactaatatgggggcatggtttgaggctcaagtggtgcgtgtgacccggaaagcacccagccgggacgagccctgctcaagtacgtcaagacctgcgctagaggaggacgtcatctaccatgtgaagtatgatgattacccggagaatggcgtggttcagatgaatagtcgagacgtacgtgcccgcgccagaactataataaagtggcaggacttagaggttggacaggtcgtgatgctgaactataaccctgataacccaaaagaacgcggtttttggtacgatgctgaaatctctcgcaagcgggagacgaggactgccagagaattgtatgcaaatgtggtgttgggggatgacagcctgaatgattgtaggatcattttcgtggatgaggtcttcaagatcgaaagaccaggtgaggggtctccaatggtggacaatcctatgcgccggaagtccggtccttcttgtaagcattgcaaggacgatgtgaacagactgtgcagggtttgcgcctgccacctgtgtggcggccgtcaagaccccgacaaacagcttatgtgtgatgagtgtgacatggcatttcacatttattgccttgacccacccctcagcagcgtgccttccgaggatgagtggtactgtcctgagtgccgtaatgatgcatcagaagtggttctcgccggcgaaaggctgcgggagtctaagaaaaaagctaaaatggcatccgcgacatctagttcccagcgagattgggggaagggaatggcctgtgttgggcgtacaaaagagtgcactattgtgccttcgaatcactacggccctatcccaggcattccagttggaacgatgtggagattcagggtacaagtatctgaatccggtgtccatcggccacacgtcgctgggattcacgggcggtctaatgacggcgcgtattctctcgtgctggctggtggatacgaggacgatgtcgatcatggaaatttctttacatatacagggtccgggggcagagacctgtcaggtaataaaagaaccgccgagcaatcctgtgatcagaagttaacaaataccaatcgcgcccttgcactgaactgctttgcccctattaacgaccaagaaggcgccgaggcaaaggactggcggtcgggtaaacctgtgagagtggtgcggaacgtcaaaggcggaaaaaactccaaatacgcgcctgccgagggtaaccgctatgacgggatctacaaggtggtgaagtattggccagagaaaggaaaatcaggcttcctggtgtggcgatatttactgagacgagacgacgatgagcccgggccctggacaaaagagggaaaagataggattaagaaactgggccttaccatgcagtaccccgagggctatttggaggcccttgccaaccgcgagagggagaaagagaattctaaacgtgaagaagaggagcaacaggaaggcgggttcgctagtccaagaacaggaaaaggcaaatggaaaaggaagagtgctggcggcgggccttctcgcgccggcccccggcgaacatctaagaagactaaggtggagccctacagtctcaccgctcagcaatcctccctgatcagagaagacaagagcaatgctaagttgtggaatgaggtactggccagccttaaggaccgccccgcgtctggttcgccatttcagctcttcctctccaaggtggaagagaccttccaatgtatttgttgtcaggagctcgtgttcagacctatcactaccgtgtgtcagcacaatgtctgcaaagattgtctggacaggtccttccgggctcaagtcttctcttgtccagcctgtcgttacgaccttggccgctcatacgccatgcaggtgaaccagcctctccaaaccgttctgaaccagctcttccccggctatggcaatgggcgctag

SEQ ID NO: 175380 - DNA, 2418 bp, Artificial Sequence
  derived and/or modified sequence
atgggcgtgtttgctgtgccccccctgtctgctgacaccatgtggatccaggtgaggaccatggatggccggcagacccacacagtggacagcctgagccggctgaccaaggtggaggagctgcggaggaagatccaggagctgttccacgtggagcccggcctgcagaggctcttctaccggggcaagcagatggaggatggccacaccctgtttgattatgaggtgcggctgaatgacaccatccagctgctggtgcggcagagcctggtgctgccccacagcaccaaggagcgggacagcgagctgagtgacacagacagcggctgctgcctgggccagagcgagagtgacaagagcagcacccatggagaggccgctgctgagacagacagcaggcctgcagatgaggacatgtgggatgaaacagagctgggcctgtacaaggtgaatgaatatgtggatgcccgggacaccaacatgggcgcctggtttgaggcccaggtggtgcgggtgaccaggaaggcccccagcagagatgagccctgcagcagcaccagcaggcctgccctggaggaggatgtgatctaccacgtgaagtatgatgactacccagaaaatggagtggtgcagatgaacagcagagatgtgcgggcccgggcccggaccatcatcaagtggcaggacctggaggtgggccaggtggtgatgctgaactacaacccagacaaccccaaggagcggggcttctggtatgatgctgagatcagcaggaagcgggagaccaggacagcccgggagctgtatgccaacgtggtgctgggagatgacagcctgaatgactgccgcatcatctttgtggatgaggtgttcaagattgaaagacctggagagggcagccccatggtggacaaccccatgaggaggaagagcggccccagctgcaagcactgcaaggatgatgtgaaccggctgtgccgggtgtgtgcctgccacctgtgtggcggccggcaggaccctgacaagcagctgatgtgtgatgaatgtgacatggccttccacatctactgcctggacccccccctgagctctgtgcccagtgaagatgagtggtactgcccagaatgtagaaatgatgccagcgaggtggtgctggccggggagcggctgcgggagagcaagaagaaggccaagatggccagcgccaccagcagcagccagagggactggggcaagggcatggcctgtgtgggccgcaccaaggagtgcaccatcgtgcccagcaaccactacggccccatccctggcatccctgtgggcaccatgtggaggttccgggtgcaggtgtctgagagcggcgtgcaccggccccacgtggccggcatccacggccgcagcaatgatggagcctacagcctggtgctggccggcggctatgaagatgatgtggaccacggcaacttcttcacctacacaggcagcggcggccgggacctgagcggcaacaagaggacagctgagcagagctgtgaccagaagctgaccaacaccaacagagccctggccctgaactgctttgcccccatcaatgaccaggagggcgctgaggccaaggactggaggtctgggaagcctgtgcgggtggtgagaaatgtgaagggcggcaagaacagcaaatatgccccagctgagggcaacagatatgatggcatctacaaggtggtgaagtactggccagagaagggcaagagcggcttcctggtgtggagatacctgctgcggagagatgatgatgagcccggcccctggaccaaggagggcaaggaccgcatcaagaagctgggcctgaccatgcagtacccagagggctacctggaggccctggccaaccgggagcgggagaaggagaacagcaagcgggaggaggaggagcagcaggagggcggctttgccagccccaggacaggcaagggcaagtggaagaggaagtctgctgggggcggccccagccgggccggccccaggaggaccagcaagaagaccaaggtggagccctacagcctgacagcccagcagagcagcctcatccgggaggacaagagcaatgccaagctgtggaatgaggtgctggccagcctgaaggacaggcctgccagcggcagccccttccagctgttcctgagcaaggtggaggagaccttccagtgcatctgctgccaggagctggtgttccggcccatcaccaccgtgtgccagcacaacgtgtgcaaggactgcctggaccgctccttccgggcccaggtgttcagctgcccagcctgccgctatgacctgggccgctcctatgccatgcaggtgaaccagcccctgcagacagtgctgaaccagctgtttcctggctatggaaatggaagatag

SEQ ID NO: 175381 - DNA, 2418 bp, Artificial Sequence
  derived and/or modified sequence
atgggcgtgttcgccgtgccccccctgagcgccgacaccatgtggatacaagttagaaccatggacgggaggcaaacccatacggtcgacagtctctcaagactgaccaaggtagaggagttgcgccggaagatccaggaactgttccatgtggagcctgggctacagcgcctattttaccggggtaaacagatggaggacgggcatacgctgtttgattacgaggtgcgattgaacgacaccattcagttgcttgtccgacagagtctagtcttgccccactctactaaggaaagagattctgaactttcagatactgatagcggatgctgccttgggcagtcagagtcggacaagtcttccacccatggtgaggccgcggctgaaacagatagtcggcccgcagatgaagacatgtgggatgagacagagctgggattatacaaagtgaacgaatatgtggatgctagagatacaaacatgggggcatggttcgaagcgcaggtcgtccgcgtaactcggaaggccccgtctcgcgatgagccctgtagttccacaagtaggcctgccctggaggaggacgtgatctaccatgtcaaatatgacgactatcctgagaacggagtggtccaaatgaattcccgcgatgtacgggcaagggctagaaccattatcaagtggcaggacctggaagtggggcaggtcgtgatgctgaactacaacccggacaatccaaaggagagaggcttttggtacgacgctgaaatttctcggaagagggagacgcgcacggctcgcgagctctatgccaatgtggtacttggggatgattcactgaatgattgtcgcattattttcgtggacgaggtttttaaaatcgaacgacccggagaaggatcccctatggtcgataatcctatgaggcgtaagagtggcccgagctgcaagcattgcaaggacgacgtgaatcgcctttgtcgggtgtgtgcatgccatctctgtggaggtcgtcaagaccctgataaacagcttatgtgcgacgaatgcgacatggcgtttcacatctactgtcttgatcctcctctgagctcggttccaagtgaagacgagtggtactgccccgagtgtagaaatgacgcctctgaggtggtgctcgcgggcgaaaggttgcgcgaatcaaaaaagaaggccaagatggcttccgctacgtcatccagccagagagactggggcaaagggatggcatgcgtggggaggaccaaggagtgcacaatcgtgccatctaatcactatggccccatccccgggattccagtaggaactatgtggaggttcagggtgcaggtctccgaaagcggagtgcaccggccgcatgtagcgggtatacacggccgtagtaacgacggggcctatagtctggttcttgcagggggctatgaggatgatgttgaccacggtaatttcttcacatataccgggtccggcgggcgagacctgtccggcaacaaacgaacagcagagcagagctgcgaccaaaagctcactaacaccaatagagctcttgccctgaactgtttcgctcccataaatgatcaggagggtgcggaagccaaggattggcgctctggaaagcccgttcgtgtcgtgaggaatgtaaaaggaggcaagaatagcaaatacgcacctgcagagggcaataggtacgatggcatctacaaggttgtgaaatactggcctgagaaaggcaagtctggattcctggtgtggagatatctcctacggcgggacgacgatgaacccggcccctggaccaaagaaggaaaagatcggatcaaaaaactgggtctcaccatgcaataccctgaaggctatctggaggcacttgctaatcgggagcgcgagaaggagaattccaagagagaagaggaagagcagcaggaaggcggtttcgccagcccgcggacgggaaagggaaagtggaaacggaaaagcgccgggggaggcccctccagggcaggaccccgacggacctcaaagaaaaccaaagttgaaccctatagcttaactgcccagcaatctagtctgattagagaggacaagtctaatgccaaactctggaacgaagtgctggcaagtctgaaggatagacctgccagtggttctcctttccagttattcctctcgaaagtggaagaaactttccagtgcatttgttgccaggagttagtgttcaggcccatcacgaccgtatgccagcataacgtatgcaaagattgcctggacagaagtttccgggcccaagttttttcctgtcccgcatgcaggtatgaccttgggcggagctacgcaatgcaggtgaatcagccgctccagacggtgctgaaccaacttttccctggatacggcaacggtaggtag

SEQ ID NO: 175382 - DNA, 2418 bp, Artificial Sequence
  derived and/or modified sequence
atgggggtatttgcggtaccaccactctcagccgataccatgtggatacaggtgcgcactatggacggtcggcagactcatacagtggattctctctctcgcttgaccaaggtcgaggagctccggaggaaaattcaggagctgtttcacgtggagccgggattgcagagactgttctaccgaggaaaacaaatggaggatggccatactctctttgattatgaggtgcggctgaacgacaccatacagctgttagtgcgacagagcctcgtgctcccacactccacgaaggagagagacagcgaattgtctgatacggattccggctgttgcttgggtcagagcgaatccgacaaatcttcaacccacggcgaggccgcagctgaaaccgatagccgcccagcagacgaagatatgtgggacgagacagaactgggactctacaaagtcaacgaatacgtggacgcacgggacaccaatatgggcgcttggtttgaagcgcaggtggtgagggtgactcgcaaagctccctcccgcgacgagccatgcagctccacttcccgacccgcactggaggaggacgtgatttaccatgtgaagtatgatgactaccccgaaaacggggtggtccagatgaacagccgagatgtccgggctagggctagaaccatcatcaaatggcaagacctggaagtggggcaggttgtcatgctcaattataatccagacaaccccaaggaaaggggcttttggtatgacgccgagatcagccggaagcgggagaccagaacggcccgagagctgtatgccaacgtggtgttaggagatgatagcttgaacgattgtcgtatcatttttgtggatgaagtatttaaaattgaaaggccaggagaaggctcgcccatggtggataaccccatgcggcgaaaatcaggaccatcttgcaaacactgcaaagacgatgttaacagactatgccgggtgtgcgcttgtcatctttgtggagggaggcaagatccagataaacagctgatgtgcgatgaatgtgacatggccttccacatctactgcctggatccccctctgagcagcgtaccctcagaagatgagtggtactgtcccgagtgccggaatgacgcctccgaagtcgttctggccggtgaaagactgcgggagagcaagaagaaggccaagatggcctcagctacttcatccagtcagagagactggggaaaaggcatggcttgcgtcggccgaacaaaagaatgtacaattgtgcctagcaaccattatgggccaatcccaggcattcccgtaggcaccatgtggcgattccgggtccaggtcagtgaaagtggtgtgcacaggccgcacgtagccggtatccatgggaggtctaatgacggtgcatattctctggtgctggcagggggatatgaggatgacgttgaccacggcaattttttcacttataccggctccggcggaagagatttgagcgggaacaaaaggacagccgaacagtcatgtgaccaaaagctgacaaacaccaacagggctcttgccttaaactgctttgctccaatcaacgaccaggagggcgctgaggcaaaagactggcgtagcggcaaacctgttagggtggtgaggaacgtcaaaggagggaaaaactccaagtacgcaccggcagaaggtaatagatatgacggcatctataaggtggtgaaatactggcctgagaaaggaaaatcaggatttctggtctggcgatacctgctgagacgggacgacgacgagccgggtccctggaccaaagagggcaaggacaggataaagaagctcgggctgactatgcagtaccctgagggctatctcgaggcccttgcaaatagggagcgcgagaaggagaactctaaacgggaagaggaggaacagcaagaggggggttttgcctcgcctagaacgggcaaaggtaagtggaagcggaaaagtgctggcggagggccaagccgtgcaggaccaaggaggaccagtaagaaaactaaggtggaaccttattccctgaccgcccagcagtccagtctgataagagaggacaaatctaacgcaaagctgtggaatgaggtcctggcctctctgaaagaccggcctgcaagcggttcaccattccagctgtttctgtcaaaagttgaggagacattccaatgcatctgctgccaggaactcgtcttccggcctatcactacagtctgtcaacataatgtgtgcaaagactgtttggatcgatcgtttagggcgcaggttttctcatgcccagcgtgccggtatgatttagggaggagttacgctatgcaagtcaaccagccactgcagactgtgttgaaccaactgttccccggatacgggaatggcagatag

SEQ ID NO: 175383 - DNA, 3895 bp, Artificial Sequence
  derived and/or modified sequence
atcagagcagctggcagcgcggcgggcagcgtttgccgagcgggcgctccgggtcgcacgcaagtccgcgcggggtccgggccacgcacgcggtttcatcgccatccccagccgggccacgcgcgcaggcagacaagctgttcgcggcgaccggagagcgccgacaccatgtggatccaggttcggaccatggacgggaggcagacccacacggtggactcgctgtccaggctgaccaaggtggaggagctgaggcggaagatccaggagctgttccacgtggagccaggcctgcagaggctgttctacaggggcaaacagatggaggacggccataccctcttcgactacgaggtccgcctgaatgacaccatccagctcctggtccgccagagcctcgtgctcccccacagcaccaaggagcgggactccgagctctccgacaccgactccggctgctgcctgggccagagtgagtcagacaagtcctccacccacggtgaggcggccgccgagactgacagcaggccagccgatgaggacatgtgggatgagacggaattggggctgtacaaggtcaatgagtacgtcgatgctcgggacacgaacatgggggcgtggtttgaggcgcaggtggtcagggtgacgcggaaggccccctcccgggacgagccctgcagctccacgtccaggccggcgctggaggaggacgtcatttaccacgtgaaatacgacgactacccggagaacggcgtggtccagatgaactccagggacgtccgagcgcgcgcccgcaccatcatcaagtggcaggacctggaggtgggccaggtggtcatgctcaactacaaccccgacaaccccaaggagcggggcttctggtacgacgcggagatctccaggaagcgcgagaccaggacggcgcgggaactctacgccaacgtggtgctgggggatgattctctgaacgactgtcggatcatcttcgtggacgaagtcttcaagattgagcggccgggtgaagggagccccatggttgacaaccccatgagacggaagagcgggccgtcctgcaagcactgcaaggacgacgtgaacagactctgccgggtctgcgcctgccacctgtgcgggggccggcaggaccccgacaagcagctcatgtgcgatgagtgcgacatggccttccacatctactgcctggacccgcccctcagcagtgttcccagcgaggacgagtggtactgccctgagtgccggaatgatgccagcgaggtggtactggcgggagagcggctgagagagagcaagaagaaggcgaagatggcctcggccacatcgtcctcacagcgggactggggcaagggcatggcctgtgtgggccgcaccaaggaatgtaccatcgtcccgtccaaccactacggacccatcccggggatccccgtgggcaccatgtggcggttccgagtccaggtcagcgagtcgggtgtccatcggccccacgtggctggcatacacggccggagcaacgacggagcgtactccctagtcctggcggggggctatgaggatgatgtggaccatgggaattttttcacatacacgggtagtggtggtcgagatctttccggcaacaagaggaccgcggaacagtcttgtgatcagaaactcaccaacaccaacagggcgctggctctcaactgctttgctcccatcaatgaccaagaaggggccgaggccaaggactggcggtcggggaagccggtcagggtggtgcgcaatgtcaagggtggcaagaatagcaagtacgcccccgctgagggcaaccgctacgatggcatctacaaggttgtgaaatactggcccgagaaggggaagtccgggtttctcgtgtggcgctaccttctgcggagggacgatgatgagcctggcccttggacgaaggaggggaaggaccggatcaagaagctggggctgaccatgcagtatccagaaggctacctggaagccctggccaaccgagagcgagagaaggagaacagcaagagggaggaggaggagcagcaggaggggggcttcgcgtcccccaggacgggcaagggcaagtggaagcggaagtcggcaggaggtggcccgagcagggcgggtccccgccggacatccaagaaaaccaaggtggagccctacagtctcacggcccagcagagcagcctcatcagagaggacaagagcaacgccaagctgtggaatgaggtcctggcgtcactcaaggaccggccggcgagcggcagcccgttccagttgttcctgagtaaagtggaggagacgttccagtgtatctgctgtcaggagctggtgttccggcccatcacgaccgtgtgccagcacaacgtgtgcaaggactgcctggacagatcctttcgggcacaggtgttcagctgccctgcctgccgctacgacctgggccgcagctatgccatgcaggtgaaccagcctctgcagaccgtcctcaaccagctcttccccggctacggcaatggccggtgatctccaagcacttctcgacaggcgttttgctgaaaacgtgtcggagggctcgttcatcggcactgattttgttcttagtgggcttaacttaaacaggtagtgtttcctccgttccctaaaaaggtttgtcttcctttttttttttatttttatttttcaaatctatacattttcaggaatttatgtattctggctaaaagttggacttctcagtattgtgtttagttctttgaaaacataaaagcctgcaatttctcgacaaaacaacacaagattttttaaagatggaatcagaaactacgtggtgtggaggctgttgatgtttctggtgtcaagttctcagaagttgctgccaccaactctttaagaaggcgacaggatcagtccttctctcgggttctggcccccaaggtcagagcaagcatcttcctgacagcattttgtcatctaaagtccagtgacatggttccccgtggtggcccgtggcagcccgtggcatggcgtggctcagctgtctgttgaagttgttgcaaggaaaagaggaaacatctcgggcctagttcaaacctttgcctcaaagccatcccccaccagactgcttagcgtctgagatccgcgtgaaaagtcctctgcccacgagagcagggagttggggccacgcagaaatggcctcaaggggactctgctccacgtggggccaggcgtgtgactgacgctgtccgacgaaggcggccacggacggacgccagcacacgaagtcacgtgcaagtgcctttgattcgttccttctttctaaagacgacagtctttgttgttagcactgaattattgaaaatgtcaaccagattctagaaactgcggtcatccagttcttcctgacaccggatgggtgcttgggaaccgtttgagccttatagatcatttacattcaatttttttaactcagcaagtgagaacttacaagagggtttttttaaaatttttttttctcttaatgaacacattttctaaatgaattttttttgtagttactgtatatgtaccaagaaagatataacgttagggtttggttgtttttgtttttgtattttttttcttttgaaagggtttgttaatttttctaattttaccaaagtttgcagcctatacctcaataaaacagggatattttaaatcacatacctgcagacaaactggagcaatgttatttttaaagggtttttttcacctccttattcttagattattaatgtattagggaagaatgagacaattttgtgtaggctttttctaaagtccagtactttgtccagattttagattctcagaataaatgtttttcacagat

SEQ ID NO: 175384 - DNA, 4059 bp, Artificial Sequence
  derived and/or modified sequence
ggccacttggcccgggcctcctttctcctctggtcgtggggaaggagggatgggttggaccttctgcttttctttcaattccctcttttcattctccttcctcctcaatcttcaacacttggctagtcgttaatgccttaagtgcttaatttgttgtgtctggtcctggccagggtctggctgtacaggaggactggaagggcatcctgggagtttcctggtgtccacaggccggacaaaagcaaccccgactccttagagcatggcatggctcagaggtgctggtaaaactgatgggggtttttgctgtccctcccctcagcgccgacaccatgtggatccaggttcggaccatggacgggaggcagacccacacggtggactcgctgtccaggctgaccaaggtggaggagctgaggcggaagatccaggagctgttccacgtggagccaggcctgcagaggctgttctacaggggcaaacagatggaggacggccataccctcttcgactacgaggtccgcctgaatgacaccatccagctcctggtccgccagagcctcgtgctcccccacagcaccaaggagcgggactccgagctctccgacaccgactccggctgctgcctgggccagagtgagtcagacaagtcctccacccacggtgaggcggccgccgagactgacagcaggccagccgatgaggacatgtgggatgagacggaattggggctgtacaaggtcaatgagtacgtcgatgctcgggacacgaacatgggggcgtggtttgaggcgcaggtggtcagggtgacgcggaaggccccctcccgggacgagccctgcagctccacgtccaggccggcgctggaggaggacgtcatttaccacgtgaaatacgacgactacccggagaacggcgtggtccagatgaactccagggacgtccgagcgcgcgcccgcaccatcatcaagtggcaggacctggaggtgggccaggtggtcatgctcaactacaaccccgacaaccccaaggagcggggcttctggtacgacgcggagatctccaggaagcgcgagaccaggacggcgcgggaactctacgccaacgtggtgctgggggatgattctctgaacgactgtcggatcatcttcgtggacgaagtcttcaagattgagcggccgggtgaagggagccccatggttgacaaccccatgagacggaagagcgggccgtcctgcaagcactgcaaggacgacgtgaacagactctgccgggtctgcgcctgccacctgtgcgggggccggcaggaccccgacaagcagctcatgtgcgatgagtgcgacatggccttccacatctactgcctggacccgcccctcagcagtgttcccagcgaggacgagtggtactgccctgagtgccggaatgatgccagcgaggtggtactggcgggagagcggctgagagagagcaagaagaaggcgaagatggcctcggccacatcgtcctcacagcgggactggggcaagggcatggcctgtgtgggccgcaccaaggaatgtaccatcgtcccgtccaaccactacggacccatcccggggatccccgtgggcaccatgtggcggttccgagtccaggtcagcgagtcgggtgtccatcggccccacgtggctggcatacacggccggagcaacgacggagcgtactccctagtcctggcggggggctatgaggatgatgtggaccatgggaattttttcacatacacgggtagtggtggtcgagatctttccggcaacaagaggaccgcggaacagtcttgtgatcagaaactcaccaacaccaacagggcgctggctctcaactgctttgctcccatcaatgaccaagaaggggccgaggccaaggactggcggtcggggaagccggtcagggtggtgcgcaatgtcaagggtggcaagaatagcaagtacgcccccgctgagggcaaccgctacgatggcatctacaaggttgtgaaatactggcccgagaaggggaagtccgggtttctcgtgtggcgctaccttctgcggagggacgatgatgagcctggcccttggacgaaggaggggaaggaccggatcaagaagctggggctgaccatgcagtatccagaaggctacctggaagccctggccaaccgagagcgagagaaggagaacagcaagagggaggaggaggagcagcaggaggggggcttcgcgtcccccaggacgggcaagggcaagtggaagcggaagtcggcaggaggtggcccgagcagggcgggtccccgccggacatccaagaaaaccaaggtggagccctacagtctcacggcccagcagagcagcctcatcagagaggacaagagcaacgccaagctgtggaatgaggtcctggcgtcactcaaggaccggccggcgagcggcagcccgttccagttgttcctgagtaaagtggaggagacgttccagtgtatctgctgtcaggagctggtgttccggcccatcacgaccgtgtgccagcacaacgtgtgcaaggactgcctggacagatcctttcgggcacaggtgttcagctgccctgcctgccgctacgacctgggccgcagctatgccatgcaggtgaaccagcctctgcagaccgtcctcaaccagctcttccccggctacggcaatggccggtgatctccaagcacttctcgacaggcgttttgctgaaaacgtgtcggagggctcgttcatcggcactgattttgttcttagtgggcttaacttaaacaggtagtgtttcctccgttccctaaaaaggtttgtcttcctttttttttttatttttatttttcaaatctatacattttcaggaatttatgtattctggctaaaagttggacttctcagtattgtgtttagttctttgaaaacataaaagcctgcaatttctcgacaaaacaacacaagattttttaaagatggaatcagaaactacgtggtgtggaggctgttgatgtttctggtgtcaagttctcagaagttgctgccaccaactctttaagaaggcgacaggatcagtccttctctcgggttctggcccccaaggtcagagcaagcatcttcctgacagcattttgtcatctaaagtccagtgacatggttccccgtggtggcccgtggcagcccgtggcatggcgtggctcagctgtctgttgaagttgttgcaaggaaaagaggaaacatctcgggcctagttcaaacctttgcctcaaagccatcccccaccagactgcttagcgtctgagatccgcgtgaaaagtcctctgcccacgagagcagggagttggggccacgcagaaatggcctcaaggggactctgctccacgtggggccaggcgtgtgactgacgctgtccgacgaaggcggccacggacggacgccagcacacgaagtcacgtgcaagtgcctttgattcgttccttctttctaaagacgacagtctttgttgttagcactgaattattgaaaatgtcaaccagattctagaaactgcggtcatccagttcttcctgacaccggatgggtgcttgggaaccgtttgagccttatagatcatttacattcaatttttttaactcagcaagtgagaacttacaagagggtttttttaaaatttttttttctcttaatgaacacattttctaaatgaattttttttgtagttactgtatatgtaccaagaaagatataacgttagggtttggttgtttttgtttttgtattttttttcttttgaaagggtttgttaatttttctaattttaccaaagtttgcagcctatacctcaataaaacagggatattttaaatcacatacctgcagacaaactggagcaatgttatttttaaagggtttttttcacctccttattcttagattattaatgtattagggaagaatgagacaattttgtgtaggctttttctaaagtccagtactttgtccagattttagattctcagaataaatgtttttcacagat

SEQ ID NO: 175385 - DNA, 2614 bp, Artificial Sequence
  derived and/or modified sequence
agtgcgggagggacgccgagggtccagggtttggaggggcgcgagctgccgggggttggaggtcgagcgccgacaccatgtggatccaggttcggaccatggacgggaggcagacccacacggtggactcgctgtccaggctgaccaaggtggaggagctgaggcggaagatccaggagctgttccacgtggagccaggcctgcagaggctgttctacaggggcaaacagatggaggacggccataccctcttcgactacgaggtccgcctgaatgacaccatccagctcctggtccgccagagcctcgtgctcccccacagcaccaaggagcgggactccgagctctccgacaccgactccggctgctgcctgggccagagtgagtcagacaagtcctccacccacggtgaggcggccgccgagactgacagcaggccagccgatgaggacatgtgggatgagacggaattggggctgtacaaggtcaatgagtacgtcgatgctcgggacacgaacatgggggcgtggtttgaggcgcaggtggtcagggtgacgcggaaggccccctcccgggacgagccctgcagctccacgtccaggccggcgctggaggaggacgtcatttaccacgtgaaatacgacgactacccggagaacggcgtggtccagatgaactccagggacgtccgagcgcgcgcccgcaccatcatcaagtggcaggacctggaggtgggccaggtggtcatgctcaactacaaccccgacaaccccaaggagcggggcttctggtacgacgcggagatctccaggaagcgcgagaccaggacggcgcgggaactctacgccaacgtggtgctgggggatgattctctgaacgactgtcggatcatcttcgtggacgaagtcttcaagattgagcggccgggtgaagggagccccatggttgacaaccccatgagacggaagagcgggccgtcctgcaagcactgcaaggacgacgtgaacagactctgccgggtctgcgcctgccacctgtgcgggggccggcaggaccccgacaagcagctcatgtgcgatgagtgcgacatggccttccacatctactgcctggacccgcccctcagcagtgttcccagcgaggacgagtggtactgccctgagtgccggaatgatgccagcgaggtggtactggcgggagagcggctgagagagagcaagaagaaggcgaagatggcctcggccacatcgtcctcacagcgggactggggcaagggcatggcctgtgtgggccgcaccaaggaatgtaccatcgtcccgtccaaccactacggacccatcccggggatccccgtgggcaccatgtggcggttccgagtccaggtcagcgagtcgggtgtccatcggccccacgtggctggcatacacggccggagcaacgacggagcgtactccctagtcctggcggggggctatgaggatgatgtggaccatgggaattttttcacatacacgggtagtggtggtcgagatctttccggcaacaagaggaccgcggaacagtcttgtgatcagaaactcaccaacaccaacagggcgctggctctcaactgctttgctcccatcaatgaccaagaaggggccgaggccaaggactggcggtcggggaagccggtcagggtggtgcgcaatgtcaagggtggcaagaatagcaagtacgcccccgctgagggcaaccgctacgatggcatctacaaggttgtgaaatactggcccgagaaggggaagtccgggtttctcgtgtggcgctaccttctgcggagggacgatgatgagcctggcccttggacgaaggaggggaaggaccggatcaagaagctggggctgaccatgcagtatccagaaggctacctggaagccctggccaaccgagagcgagagaaggagaacagcaagagggaggaggaggagcagcaggaggggggcttcgcgtcccccaggacgggcaagggcaagtggaagcggaagtcggcaggaggtggcccgagcagggcgggtccccgccggacatccaagaaaaccaaggtggagccctacagtctcacggcccagcagagcagcctcatcagagaggacaagagcaacgccaagctgtggaatgaggtcctggcgtcactcaaggaccggccggcgagcggcagcccgttccagttgttcctgagtaaagtggaggagacgttccagtgtatctgctgtcaggagctggtgttccggcccatcacgaccgtgtgccagcacaacgtgtgcaaggactgcctggacagatcctttcgggcacaggtgttcagctgccctgcctgccgctacgacctgggccgcagctatgccatgcaggtgaaccagcctctgcagaccgtcctcaaccagctcttccccggctacggcaatggccggtgatctccaagcacttctcgacaggcgttttgctgaaaacgtgtcggagggctcgttcatcggcactgattttgttcttagtgggcttaacttaaacaggtagtgtttcctccgttccctaaaaaggtttgtcttcctttttttttttatttttatttttc

SEQ ID NO: 175386 - DNA, 2660 bp, Artificial Sequence
  derived and/or modified sequence
gaggggtcccggggtccgcggatctcgggtggggtttttccctctcagtggcacttggttgagttcccccgggacttctgaagttccggcccgcgctggacttctgggattccctcttcccgccgacaccatgtggatccaggttcggaccatggacgggaggcagacccacacggtggactcgctgtccaggctgaccaaggtggaggagctgaggcggaagatccaggagctgttccacgtggagccaggcctgcagaggctgttctacaggggcaaacagatggaggacggccataccctcttcgactacgaggtccgcctgaatgacaccatccagctcctggtccgccagagcctcgtgctcccccacagcaccaaggagcgggactccgagctctccgacaccgactccggctgctgcctgggccagagtgagtcagacaagtcctccacccacggtgaggcggccgccgagactgacagcaggccagccgatgaggacatgtgggatgagacggaattggggctgtacaaggtcaatgagtacgtcgatgctcgggacacgaacatgggggcgtggtttgaggcgcaggtggtcagggtgacgcggaaggccccctcccgggacgagccctgcagctccacgtccaggccggcgctggaggaggacgtcatttaccacgtgaaatacgacgactacccggagaacggcgtggtccagatgaactccagggacgtccgagcgcgcgcccgcaccatcatcaagtggcaggacctggaggtgggccaggtggtcatgctcaactacaaccccgacaaccccaaggagcggggcttctggtacgacgcggagatctccaggaagcgcgagaccaggacggcgcgggaactctacgccaacgtggtgctgggggatgattctctgaacgactgtcggatcatcttcgtggacgaagtcttcaagattgagcggccgggtgaagggagccccatggttgacaaccccatgagacggaagagcgggccgtcctgcaagcactgcaaggacgacgtgaacagactctgccgggtctgcgcctgccacctgtgcgggggccggcaggaccccgacaagcagctcatgtgcgatgagtgcgacatggccttccacatctactgcctggacccgcccctcagcagtgttcccagcgaggacgagtggtactgccctgagtgccggaatgatgccagcgaggtggtactggcgggagagcggctgagagagagcaagaagaaggcgaagatggcctcggccacatcgtcctcacagcgggactggggcaagggcatggcctgtgtgggccgcaccaaggaatgtaccatcgtcccgtccaaccactacggacccatcccggggatccccgtgggcaccatgtggcggttccgagtccaggtcagcgagtcgggtgtccatcggccccacgtggctggcatacacggccggagcaacgacggagcgtactccctagtcctggcggggggctatgaggatgatgtggaccatgggaattttttcacatacacgggtagtggtggtcgagatctttccggcaacaagaggaccgcggaacagtcttgtgatcagaaactcaccaacaccaacagggcgctggctctcaactgctttgctcccatcaatgaccaagaaggggccgaggccaaggactggcggtcggggaagccggtcagggtggtgcgcaatgtcaagggtggcaagaatagcaagtacgcccccgctgagggcaaccgctacgatggcatctacaaggttgtgaaatactggcccgagaaggggaagtccgggtttctcgtgtggcgctaccttctgcggagggacgatgatgagcctggcccttggacgaaggaggggaaggaccggatcaagaagctggggctgaccatgcagtatccagaaggctacctggaagccctggccaaccgagagcgagagaaggagaacagcaagagggaggaggaggagcagcaggaggggggcttcgcgtcccccaggacgggcaagggcaagtggaagcggaagtcggcaggaggtggcccgagcagggcgggtccccgccggacatccaagaaaaccaaggtggagccctacagtctcacggcccagcagagcagcctcatcagagaggacaagagcaacgccaagctgtggaatgaggtcctggcgtcactcaaggaccggccggcgagcggcagcccgttccagttgttcctgagtaaagtggaggagacgttccagtgtatctgctgtcaggagctggtgttccggcccatcacgaccgtgtgccagcacaacgtgtgcaaggactgcctggacagatcctttcgggcacaggtgttcagctgccctgcctgccgctacgacctgggccgcagctatgccatgcaggtgaaccagcctctgcagaccgtcctcaaccagctcttccccggctacggcaatggccggtgatctccaagcacttctcgacaggcgttttgctgaaaacgtgtcggagggctcgttcatcggcactgattttgttcttagtgggcttaacttaaacaggtagtgtttcctccgttccctaaaaaggtttgtcttcctttttttttttattttt

SEQ ID NO: 175387 - protein, 334 aa, Artificial Sequence
  derived and/or modified sequence
MVGREKELSIHFVPGSCRLVEEEVNIPNRRVLVTGATGLLGRAVHKEFQQNNWHAVGCGFRRARPKFEQVNLLDSNAVHHIIHDFQPHVIVHCAAERRPDVVENQPDAASQLNVDASGNLAKEAAAVGAFLIYISSDYVFDGTNPPYREEDIPAPLNLYGKTKLDGEKAVLENNLGAAVLRIPILYGEVEKLEESAVTVMFDKVQFSNKSANMDHWQQRFPTHVKDVATVCRQLAEKRMLDPSIKGTFHWSGNEQMTKYEMACAIADAFNLPSSHLRPITDSPVLGAQRPRNAQLDCSKLETLGIGQRTPFRIGIKESLWPFLIDKRWRQTVFH

SEQ ID NO: 175388 - protein, 228 aa, Artificial Sequence
  derived and/or modified sequence
MQLAVVSEEQDQNLNRLICWILMQFIYISSDYVFDGTNPPYREEDIPAPLNLYGKTKLDGEKAVLENNLGAAVLRIPILYGEVEKLEESAVTVMFDKVQFSNKSANMDHWQQRFPTHVKDVATVCRQLAEKRMLDPSIKGTFHWSGNEQMTKYEMACAIADAFNLPSSHLRPITDSPVLGAQRPRNAQLDCSKLETLGIGQRTPFRIGIKESLWPFLIDKRWRQTVFH

SEQ ID NO: 175389 - protein, 259 aa, Artificial Sequence
  derived and/or modified sequence
MVGREKELSIHFVPGSCRLVEEEVNIPNRRVLVTGATGLLGRAVHKEFQQNNWHAVGCGFRRARPKFEQVNLLDSNAVHHIIHDFQPHVIVHCAAERRPDVVENQPDAASQLNVDASGNLAKEAAAVGAFLIYISSDYVFDGTNPPYREEDIPAPLNLYGKTKLDGEKAVLENNLGAAVLRIPILYGEVEKLEESAVTVMFDKVQFSNKSANMDHWQQRFPTHVKDVATVCRQLAEKRMLVRRIPESCLSEGPLCLFHA

SEQ ID NO: 175390 - DNA, 780 bp, Artificial Sequence
  derived and/or modified sequence
atggtgggcagagagaaggagctgagcatccacttcgtgcccggcagctgcagactggtggaggaggaggtgaacatccccaacagaagagtgctggtgaccggcgccaccggcctgctgggcagagccgtgcacaaggagttccagcagaacaactggcacgccgtgggctgcggcttcagaagagccagacccaagttcgagcaggtgaacctgctggacagcaacgccgtgcaccacatcatccacgacttccagccccacgtgatcgtgcactgcgccgccgagagaagacccgacgtggtggagaaccagcccgacgccgccagccagctgaacgtggacgccagcggcaacctggccaaggaggccgccgccgtgggcgccttcctgatctacatcagcagcgactacgtgttcgacggcaccaaccccccctacagagaggaggacatccccgcccccctgaacctgtacggcaagaccaagctggacggcgagaaggccgtgctggagaacaacctgggcgccgccgtgctgagaatccccatcctgtacggcgaggtggagaagctggaggagagcgccgtgaccgtgatgttcgacaaggtgcagttcagcaacaagagcgccaacatggaccactggcagcagagattccccacccacgtgaaggacgtggccaccgtgtgcagacagctggccgagaagagaatgctggtgagaagaatccccgagagctgcctgagcgagggccccctgtgcctgttccacgcctag

SEQ ID NO: 175391 - DNA, 1005 bp, Artificial Sequence
  derived and/or modified sequence
atggttggacgggaaaaggagctgtccatccacttcgtgcccggcagctgcagactcgtggaggaggaggttaatatccctaaccgcagggtgcttgtcactggagccacggggctcttaggccgggccgtccataaggaatttcaacagaacaactggcatgccgttggctgcggtttccgcagagcccggcctaagtttgaacaggtcaaccttctggattcaaatgcggtgcaccacataatacacgacttccagccccacgtgatcgtgcactgcgccgcagagagacggcccgacgtcgttgagaatcaaccagacgctgcaagccagcttaacgtggatgctagtgggaatctcgccaaggaagcagctgccgttggcgcgtttttgatttacatctcttctgactacgttttcgatgggaccaacccaccatatcgcgaagaagatatccccgcacctctgaacctctatgggaagacaaagctagatggcgaaaaagcagtacttgaaaacaatctgggcgccgctgtactcaggatccccattctctacggtgaggtggaaaaactggaggagagcgccgtaacagtgatgtttgataaagtacagttctcgaacaaaagtgctaacatggatcattggcaacagcgatttccgacacacgtgaaggatgtggcgacagtctgcagacagctcgctgaaaaacgcatgctggatccctctattaaggggacttttcactggtctggaaatgaacagatgacaaagtacgaaatggcttgtgctattgctgacgcgtttaacctgccctcttcccatttgcgtccaattaccgatagtccagtgctaggcgcacaacgtccgcgaaacgctcagcttgactgctccaaactcgaaacattggggattggccagaggaccccatttaggatcggaatcaaggagagcttgtggcctttcctgatagacaagcggtggaggcagaccgtcttccactag

SEQ ID NO: 175392 - DNA, 780 bp, Artificial Sequence
  derived and/or modified sequence
atggttggcagggaaaaggagttgtccatccacttcgttcctgggtcctgcaggctcgttgaagaagaagtgaatattcctaaccgtcgggtcctggtcacgggtgccactggactactgggcagggccgtgcataaggaattccagcagaacaactggcacgcagtgggctgtggctttcggcgcgccaggcctaaatttgaacaggtgaatttactggatagcaatgccgtgcaccatattatccatgacttccagccacatgttatcgttcattgtgcagctgagcgacggcccgacgtggtcgaaaatcaacccgatgctgcatctcagttaaacgtggacgctagcgggaatctcgccaaggaggccgcagctgtgggagcgttcctgatttacatcagctcggactatgtcttcgatggcactaacccgccctacagggaggaagatattcccgcccccctgaatttgtacggaaagacaaaactggacggggaaaaagccgtcctggaaaataaccttggggcggctgtcctgcgcatccccattctatatggtgaggttgaaaagctcgaggaaagcgccgtgacagtgatgtttgataaggtccagttttctaacaaaagtgctaatatggaccattggcagcagaggttcccaactcacgttaaagacgtggctacagtttgtcgccagctggcagaaaagcggatgcttgtcagaaggatcccggagtcctgtctgtccgaagggcccctctgcctatttcatgcctag

SEQ ID NO: 175393 - DNA, 1005 bp, Artificial Sequence
  derived and/or modified sequence
atggtgggccgggagaaggagctgagcatccactttgtgcccggcagctgccgcctggtggaggaggaggtgaacatccccaacagaagagtgctggtgactggagccaccggcctgctgggccgggctgtgcacaaggagttccagcagaacaactggcatgctgtgggctgcggcttcagaagagcccggcccaagtttgagcaggtgaacctgctggacagcaatgctgtgcaccacatcatccatgacttccagccccacgtgattgtgcactgtgccgctgagaggaggccagatgtggtggagaaccagccagatgctgccagccagctgaatgtggatgccagcggcaacctggccaaggaggccgctgctgtgggcgccttcctgatctacatcagcagtgactatgtgtttgatggcaccaaccccccctaccgggaggaggacatcccagcccccctgaacctgtatggcaagaccaagctggatggagagaaggctgtgctggagaacaacctgggcgctgctgtgctgcgcatccccatcctgtatggagaggtggagaagctggaggagagcgctgtgacagtgatgtttgacaaggtgcagttcagcaacaagagcgccaacatggaccactggcagcagcgcttccccacccacgtgaaggatgtggccaccgtgtgccggcagctggccgagaagaggatgctggaccccagcatcaagggcaccttccactggagcggaaatgagcagatgaccaagtatgagatggcctgtgccatcgcagatgccttcaacctgcccagcagccacctgcggcccatcacagacagccctgtgctgggcgcccagaggcccagaaatgcccagctggactgcagcaagctggagaccctgggcatcggccagaggacccccttcagaattggcatcaaggagagcctgtggcccttcctgattgacaagcgctggaggcagacagtgttccactag

SEQ ID NO: 175394 - DNA, 780 bp, Artificial Sequence
  derived and/or modified sequence
atggtgggccgggagaaggagctgagcatccactttgtgcccggcagctgccgcctggtggaggaggaggtgaacatccccaacagaagagtgctggtgactggagccaccggcctgctgggccgggctgtgcacaaggagttccagcagaacaactggcatgctgtgggctgcggcttcagaagagcccggcccaagtttgagcaggtgaacctgctggacagcaatgctgtgcaccacatcatccatgacttccagccccacgtgattgtgcactgtgccgctgagaggaggccagatgtggtggagaaccagccagatgctgccagccagctgaatgtggatgccagcggcaacctggccaaggaggccgctgctgtgggcgccttcctgatctacatcagcagtgactatgtgtttgatggcaccaaccccccctaccgggaggaggacatcccagcccccctgaacctgtatggcaagaccaagctggatggagagaaggctgtgctggagaacaacctgggcgctgctgtgctgcgcatccccatcctgtatggagaggtggagaagctggaggagagcgctgtgacagtgatgtttgacaaggtgcagttcagcaacaagagcgccaacatggaccactggcagcagcgcttccccacccacgtgaaggatgtggccaccgtgtgccggcagctggccgagaagaggatgctggtgcggcgcatccctgagagctgcctgtctgagggccccctgtgcctcttccacgcctag

SEQ ID NO: 175395 - DNA, 1005 bp, Artificial Sequence
  derived and/or modified sequence
atggtgggccgggagaaggagctgagcatccacttcgtgcccggctcctgcaggctggttgaagaggaggtaaacatcccaaaccgccgcgttcttgtcacgggggcaacagggctgctgggtcgagcggttcacaaggagttccaacagaacaattggcacgctgtgggatgcggtttccggagggctcgtcccaaatttgaacaagtcaaccttctagattctaacgctgtccatcacattattcacgactttcaaccccatgtgattgtgcactgcgcagctgagcggcggcccgacgttgttgaaaaccagccagatgcagccagccagttgaatgtcgatgcatccggcaatctggcaaaagaagcagccgctgtgggagcattcttgatctacatttcctcggactatgtatttgatggcacaaatcctccttatcgggaggaagacatcccggcccctctcaacctttacgggaaaaccaaattggatggggagaaggcagtcttagagaataacctaggagccgcagttctcaggatacccattctgtatggtgaagttgaaaagctcgaggaatctgccgtgacggtcatgttcgataaggtacagttctctaacaaaagcgccaatatggaccactggcaacagcggtttccaactcacgtgaaagatgtggcgacagtctgccggcagctggccgagaagcgcatgctcgacccctctatcaaggggacatttcactggagcggtaatgagcagatgactaaatacgaaatggcctgtgcaattgccgatgcattcaacctgccaagttcccacctgaggccaattacagattcgccagttctgggggcccaacgccctcgaaatgctcagctcgattgcagtaagctcgagacattgggcatcggtcagcgaactccttttagaattggaattaaggagagcctttggcctttcttgatcgacaagaggtggcgtcagaccgtgttccactag

SEQ ID NO: 175396 - DNA, 780 bp, Artificial Sequence
  derived and/or modified sequence
atggtgggccgggagaaggagctgagcatccacttcgtgcccggctcttgtaggctcgtagaagaggaagtgaacattcctaataggagagtgctcgttacgggagctactggactcctgggccgagcggtacacaaagaatttcagcaaaacaattggcatgctgtggggtgcggtttccggcgcgcacggcctaagttcgaacaagtcaacctgcttgattccaacgccgttcatcatattatccacgactttcaaccacatgtcattgtgcactgcgcggccgagaggaggcccgatgtggtggaaaaccagcccgatgctgctagtcaattgaacgtggacgcctccggcaacctggccaaagaggccgccgcagtgggcgcctttctcatttacatttctagcgactatgtgttcgatggaactaatcccccataccgggaggaggacatccccgctcccttgaacctttatgggaagacaaaactggatggggagaaagctgttctggaaaataaccttggggccgctgtgttaagaattcctatactgtacggtgaagtggagaaactggaagaatccgcagtgacagttatgttcgacaaagtccagttttcaaacaagtcggcaaatatggaccattggcagcagagatttcccactcatgtaaaggacgttgctacagtgtgtcgacagttagccgagaagcgcatgctggtgcgcagaataccagaatcctgtctctctgaggggcctctgtgcctcttccacgcttag

SEQ ID NO: 175397 - DNA, 1005 bp, Artificial Sequence
  derived and/or modified sequence
atggtcggcagagaaaaagagctctcaattcactttgtcccgggtagttgtagacttgtagaggaagaagtgaatattccgaatcgcagagtactggtgaccggcgcaaccggactcttggggagggccgttcacaaggagttccaacagaataactggcacgctgtggggtgtggctttagaagagccaggcccaaattcgagcaagtaaaccttttggactcgaatgccgtccatcacataatccacgatttccagccccatgtgatagtccattgcgccgcagagaggcgccctgatgtcgttgaaaatcagcctgatgccgcatcccagcttaatgtcgacgcatccgggaacctggccaaggaggctgcggctgtgggcgcatttctgatttacatctctagcgattacgtcttcgacgggaccaaccccccataccgtgaggaggacatcccagcacctttaaacctgtacggcaagaccaagctagacggtgaaaaggctgttctggagaacaacctaggcgcagctgttctgcgcattcccatcttgtacggcgaggttgagaagctcgaggaaagcgctgtaactgtgatgttcgacaaagtgcaattttctaacaagagcgcaaatatggatcactggcagcagagattcccaacacacgtgaaagatgttgcaacagtgtgccgccagctagcggagaagaggatgctggatcctagtatcaaggggacattccattggtcagggaacgaacagatgacaaaatacgagatggcttgtgctatcgccgatgcatttaatttgcccagtagccatctccgtcctatcacagatagtcccgtcctcggggctcaacgaccgagaaacgctcaactggattgttccaagctcgagaccctcgggattggccagagaactccttttaggatcgggataaaggaaagcttgtggccgttcctgattgacaaaaggtggcgtcagacagtgtttcactag

SEQ ID NO: 175398 - DNA, 780 bp, Artificial Sequence
  derived and/or modified sequence
atggtgggacgcgaaaaagagttgtccattcactttgtgccaggctcctgtcggctggtggaggaagaggtgaacattccaaacaggcgtgttctagtgactggagctacagggctgctgggcagagctgtgcacaaagaatttcagcagaataattggcatgccgtggggtgcggctttcggagagcccgaccgaagtttgagcaggtcaatttattggactccaacgccgttcatcacattatccacgattttcagccccatgtgattgtccactgcgcagcggaacggaggccggacgtggtagagaatcaaccagacgccgcatcgcagctgaacgtggacgcctcagggaatctggctaaagaggccgctgctgtcggagcctttctcatctatatctcttcagactatgtcttcgatgggaccaaccccccatatagggaggaggatatacctgcacctctgaatctctacggaaagacaaagctggacggtgaaaaggccgtcctggaaaataaccttggtgctgccgttctgcgtatcccgatcctttatggagaagttgaaaaactcgaagagagtgctgtgacggtaatgttcgataaggtgcagttcagtaataagtccgcgaatatggatcactggcaacagaggtttcccacccatgttaaggacgtagccaccgtttgtcggcagcttgccgaaaagagaatgctggtgaggaggatccctgaatcctgcttaagtgaaggacccctctgcctcttccacgcctag

SEQ ID NO: 175399 - DNA, 3409 bp, Artificial Sequence
  derived and/or modified sequence
gagctgaggcccgcgtcgatcctgggttggaggaggtggcggccgctgaggctgcggcgtgaagacggcgggcatggtggggcgggagaaagagctctctatacactttgttcccgggagctgtcggctggtggaggaggaagttaacatccctaataggagggttctggttactggtgccactgggcttcttggcagagctgtacacaaagaatttcagcagaataattggcatgcagttggctgtggtttcagaagagcaagaccaaaatttgaacaggttaatctgttggattctaatgcagttcatcacatcattcatgattttcagccccatgttatagtacattgtgcagcagagagaagaccagatgttgtagaaaatcagccagatgctgcctctcaacttaatgtggatgcttctgggaatttagcaaaggaagcagctgctgttggagcatttctcatctacattagctcagattatgtatttgatggaacaaatccaccttacagagaggaagacataccagctcccctaaatttgtatggcaaaacaaaattagatggagaaaaggctgtcctggagaacaatctaggagctgctgttttgaggattcctattctgtatggggaagttgaaaagctcgaagaaagtgctgtgactgttatgtttgataaagtgcagttcagcaacaagtcagcaaacatggatcactggcagcagaggttccccacacatgtcaaagatgtggccactgtgtgccggcagctagcagagaagagaatgctggtaagaaggattcctgagtcctgtcttagcgaaggtccgctttgtcttttccatgcttgaactttcacagctgtacttggagtgttactgagtgaaagccaaaagtgcttttttaaaactaggagaccaaacaaaagtagtttacatatacactgtattcatgaagaataaaaatattatgctcttctgtttgaatttatttcttatgtactatagatcccatcatttcttttattgcaaagtgttaggaaacttcaaaataatcatctaaggtcttttaagaagatactctttgggggctgggcgtgatggctcacacctgtaatcccagcacatttgaaaaagttggtattaaatataatatccatacaaagaaagatgagactgatttagtttagaatattaataggatgaccacagttttttaatatatgagaattatattttgtaatatataacatgacaatatttaagaaagtttagctcaacttgaaaaatggttctattaagtttttgttgtagcttgggataattaaaaatactcattaaattgtactgttttcataaaaatttgtaatgcttttttatattcccactaattaagtaaaattggagcctttttttgattttaaaaattcttaaggtttaaattctagaaattgctcttttaagtgttttgctaagagtattagtaggaatttgattttagatatcttgtggagacctttccagaaaaagagggttgccttttagttcctggaccttattttaagtaagctttttggtcaaacctattctactcagctcaaaaagttgaaactattgaatttattgtgtcatcgttcttaggatccatcaattaagggaacctttcactggtctggcaatgaacagatgactaagtatgaaatggcatgtgcaattgcagatgccttcaacctccccagcagtcacttaagacctgtaagtacatggctgtaaaaacctttagatccattgctatggtatatattattgctgtgttgggtaacttcatttctcagtactaatcaaagtgaactttgcttgtatgctggctgttcatagtgctacttttctctaaattatcatctgtagagaagatcatgagtattgaagtttgtagaaaatgtattattgtcttgatcatgacaggcatttggtttatttttccagggatgatcaaatcagatttcttacactaagagcaaaaataagtagcaaatataaaacctcaaaatggccaggcacaatggctcatgcctgtaatcccaacactttgggaggctgacgcaggaggatcccttgagcccaggaatttgagactagcctgggcaatggagggagatctcatctctgtttaaaaatatatacatatttaaaaaaaggtcagggggaacaaagccctcaaaatatagcctttcacttacttttgatttttttgtgtttatctttctttaaagattactgacagccctgtcctaggagcacaacgtccgagaaatgctcagcttgactgctccaaattggagaccttgggcattggccaacgaacaccatttcgaattggaatcaaagaatcactttggcctttcctcattgacaagagatggagacaaacggtctttcattagtttatttgtgttgggttcttttttttttttaaatgaaaagtatagtatgtggcactttttaaagaacaaaggaaatagttttgtatgagtactttaattgtgactcttaggatctttcaggtaaatgatgctcttgcactagtgaaattgtctaaagaaactaaagggcagtcatgccctgtttgcagtaatttttctttttatcattttgtttgtcctggctaaacttggagtttgagtatagtaaattatgatccttaaatatttgagagtcaggatgaagcagatctgctgtagacttttcagatgaaattgttcattctcgtaacctccatattttcaggatttttgaagctgttgaccttttcatgttgattattttaaattgtgtgaaatagtataaaaatcattggtgttcattatttgctttgcctgagctcagatcaaaatgtttgaagaaaggaactttatttttgcaagttacgtacagtttttatgcttgagatatttcaacatgttatgtatattggaacttctacagcttgatgcctcctgcttttatagcagtttatggggagcacttgaaagagcgtgtgtacatgtattttttttctaggcaaacattgaatgcaaacgtgtatttttttaatataaatatataactgtccttttcatcccatgttgccgctaagtgatatttcatatgtgtggttatactcataataatgggccttgtaagtcttttcaccattcatgaataataataaatatgtactgctggcatgtaatgcttagttttcttgtatttacttctttttttaaatgtaaggaccaaacttctaaactaattgttcttttgttgctttaatttttaaaaattacattcttctgatgtaacatgtgatacatacaaaagaatatagtttaatatgtattgaaataaaacacaataaaattaacactt

SEQ ID NO: 175400 - DNA, 2103 bp, Artificial Sequence
  derived and/or modified sequence
gcagcggaagccggaagcggcgagcggggtcgttctgggcctaggggaggcgggccgagggcgtctgagctgaggcccgcgtcgatcctgggttggaggaggtggcggccgctgaggctgcggcgtgaagacggcgggcatggtggggcgggagaaagagctctctatacactttgttcccgggagctgtcggctggtggaggaggaagttaacatccctaataggagggttctggttactggtgccactgggcttcttggcagagctgtacacaaagaatttcagcagaataattggcatgcagttggctgtggtttcagaagagcaagaccaaaatttgaacaggttaatctgttggattctaatgcagttcatcacatcattcatgattttcagccccatgttatagtacattgtgcagcagagagaagaccagatgttgtagaaaatcagccagatgctgcctctcaacttaatgtggatgcttctgggaatttagcaaaggaagcagctgctgttggagcatttctcatctacattagctcagattatgtatttgatggaacaaatccaccttacagagaggaagacataccagctcccctaaatttgtatggcaaaacaaaattagatggagaaaaggctgtcctggagaacaatctaggagctgctgttttgaggattcctattctgtatggggaagttgaaaagctcgaagaaagtgctgtgactgttatgtttgataaagtgcagttcagcaacaagtcagcaaacatggatcactggcagcagaggttccccacacatgtcaaagatgtggccactgtgtgccggcagctagcagagaagagaatgctggatccatcaattaagggaacctttcactggtctggcaatgaacagatgactaagtatgaaatggcatgtgcaattgcagatgccttcaacctccccagcagtcacttaagacctattactgacagccctgtcctaggagcacaacgtccgagaaatgctcagcttgactgctccaaattggagaccttgggcattggccaacgaacaccatttcgaattggaatcaaagaatcactttggcctttcctcattgacaagagatggagacaaacggtctttcattagtttatttgtgttgggttcttttttttttttaaatgaaaagtatagtatgtggcactttttaaagaacaaaggaaatagttttgtatgagtactttaattgtgactcttaggatctttcaggtaaatgatgctcttgcactagtgaaattgtctaaagaaactaaagggcagtcatgccctgtttgcagtaatttttctttttatcattttgtttgtcctggctaaacttggagtttgagtatagtaaattatgatccttaaatatttgagagtcaggatgaagcagatctgctgtagacttttcagatgaaattgttcattctcgtaacctccatattttcaggatttttgaagctgttgaccttttcatgttgattattttaaattgtgtgaaatagtataaaaatcattggtgttcattatttgctttgcctgagctcagatcaaaatgtttgaagaaaggaactttatttttgcaagttacgtacagtttttatgcttgagatatttcaacatgttatgtatattggaacttctacagcttgatgcctcctgcttttatagcagtttatggggagcacttgaaagagcgtgtgtacatgtattttttttctaggcaaacattgaatgcaaacgtgtatttttttaatataaatatataactgtccttttcatcccatgttgccgctaagtgatatttcatatgtgtggttatactcataataatgggccttgtaagtcttttcaccattcatgaataataataaatatgtactgctggcatgtaatgcttagttttcttgtatttacttctttttttaaatgtaaggaccaaacttctaaactaattgttcttttgttgctttaatttttaaaaattacattcttctgatgtaacatgtgatacatacaaaagaatatagtttaatatgtattgaaataaaacacaataaaattaa

SEQ ID NO: 175401 - DNA, 1005 bp, Artificial Sequence
  derived and/or modified sequence
atggtgggcagagagaaggagctgagcatccacttcgtgcccggcagctgcagactggtggaggaggaggtgaacatccccaacagaagagtgctggtgaccggcgccaccggcctgctgggcagagccgtgcacaaggagttccagcagaacaactggcacgccgtgggctgcggcttcagaagagccagacccaagttcgagcaggtgaacctgctggacagcaacgccgtgcaccacatcatccacgacttccagccccacgtgatcgtgcactgcgccgccgagagaagacccgacgtggtggagaaccagcccgacgccgccagccagctgaacgtggacgccagcggcaacctggccaaggaggccgccgccgtgggcgccttcctgatctacatcagcagcgactacgtgttcgacggcaccaaccccccctacagagaggaggacatccccgcccccctgaacctgtacggcaagaccaagctggacggcgagaaggccgtgctggagaacaacctgggcgccgccgtgctgagaatccccatcctgtacggcgaggtggagaagctggaggagagcgccgtgaccgtgatgttcgacaaggtgcagttcagcaacaagagcgccaacatggaccactggcagcagagattccccacccacgtgaaggacgtggccaccgtgtgcagacagctggccgagaagagaatgctggaccccagcatcaagggcaccttccactggagcggcaacgagcagatgaccaagtacgagatggcctgcgccatcgccgacgccttcaacctgcccagcagccacctgagacccatcaccgacagccccgtgctgggcgcccagagacccagaaacgcccagctggactgcagcaagctggagaccctgggcatcggccagagaacccccttcagaatcggcatcaaggagagcctgtggcccttcctgatcgacaagagatggagacagaccgtgttccactag

SEQ ID NO: 175402 - protein, 494 aa, Artificial Sequence
  derived and/or modified sequence
MLPKRRRARVGSPSGDAASSTPPSTRFPGVAIYLVEPRMGRSRRAFLTGLARSKGFRVLDACSSEATHVVMEETSAEEAVSWQERRMAAAPPGCTPPALLDISWLTESLGAGQPVPVECRHRLEVAGPRKGPLSPAWMPAYACQRPTPLTHHNTGLSEALEILAEAAGFEGSEGRLLTFCRAASVLKALPSPVTTLSQLQGLPHFGEHSSRVVQELLEHGVCEEVERVRRSERYQTMKLFTQIFGVGVKTADRWYREGLRTLDDLREQPQKLTQQQKAGLQHHQDLSTPVLRSDVDALQQVVEEAVGQALPGATVTLTGGFRRGKLQGHDVDFLITHPKEGQEAGLLPRVMCRLQDQGLILYHQHQHSCCESPTRLAQQSHMDAFERSFCIFRLPQPPGAAVGGSTRPCPSWKAVRVDLVVAPVSQFPFALLGWTGSKLFQRELRRFSRKEKGLWLNSHGLFDPEQKTFFQAASEEDIFRHLGLEYLPPEQRNA

SEQ ID NO: 175403 - protein, 159 aa, Artificial Sequence
  derived and/or modified sequence
MLPKRRRARVGSPSGDAASSTPPSTRFPGVAIYLVEPRMGRSRRAFLTGLARSKGFRVLDACSSEATHVVMEETSAEEAVSWQERRMAAAPPGCTPPALLDISWLTESLGAGQPVPVECRHRLEEALEILAEAAGFEGSEGRLLTFCRAASVLKALPSP

SEQ ID NO: 175404 - protein, 242 aa, Artificial Sequence
  derived and/or modified sequence
MLPKRRRARVGSPSGDAASSTPPSTRFPGVAIYLVEPRMGRSRRAFLTGLARSKGFRVLDACSSEATHVVMEETSAEEAVSWQERRMAAAPPGCTPPALLDISWLTESLGAGQPVPVECRHRLEVAGPRKGPLSPAWMPAYACQRPTPLTHHNTGLSEALEILAEAAGFEGSEGRLLTFCRAASVLKALPSPVTTLSQLQGLPHFGEHSSRVVQELLEHGVCEEVERVRRSESSSPRSSGSV

SEQ ID NO: 175405 - protein, 270 aa, Artificial Sequence
  derived and/or modified sequence
MLPKRRRARVGSPSGDAASSTPPSTRFPGVAIYLVEPRMGRSRRAFLTGLARSKGFRVLDACSSEATHVVMEETSAEEAVSWQERRMAAAPPGCTPPALLDISWLTESLGAGQPVPVECRHRLEVAGPRKGPLSPAWMPAYACQRPTPLTHHNTGLSEALEILAEAAGFEGSEGRLLTFCRAASVLKALPSPVTTLSQLQGLPHFGEHSSRVVQELLEHGVCEEVERVRRSERYQTMKVRRAGLGPTPGMSCPGNDNTVHTMHGEANRGS

SEQ ID NO: 175406 - DNA, 1485 bp, Artificial Sequence
  derived and/or modified sequence
atgttgccaaaacggcgacgggcccgcgtcggatctccttcgggagacgctgctagcagcacccctccgtccacgcgctttcctggtgtggccatatacttggtggagcccaggatggggagaagcagacgagctttcctcaccggcctagccaggagcaaggggtttcgtgtgctggacgcgtgttcctctgaagccacccacgtcgtgatggaggaaacatcagccgaggaggctgtgtcctggcaagagcggcggatggcggcagccccccccggctgtactccaccagcacttctggatattagttggctgactgagtccttaggtgctggccagccagtgcctgtcgaatgcaggcacaggctagaagtggccggtcctagaaaaggacccctctcaccagcctggatgcccgcgtatgcctgtcagcgcccaacaccacttactcatcacaatacaggtctgagtgaggctcttgagatcttggcagaggcagctgggttcgagggatccgaggggagacttctgactttctgcagagcggcttctgttcttaaggcgttaccgagcccagtgaccacactgtctcagctgcagggcctgccccactttggggaacacagctcccgagtcgttcaggaactcttggaacacggcgtgtgcgaagaggtcgaaagagttcgaagatcagagaggtaccagacaatgaagctgttcacccagatcttcggtgtgggcgttaagacagccgatcggtggtatcgggagggactgcggacactcgatgatctcagggaacagccccagaaactgacccagcagcagaaagctggcttacagcatcatcaggatctgagcactccagtgctgcggtccgatgttgacgccctgcaacaagtcgtagaggaagcggtgggacaggccttgcctggtgcgaccgtgacactcaccgggggcttcagacgggggaaactgcagggacacgatgtggatttcctaatcactcaccctaaggagggccaggaggcaggactgcttccaagggtcatgtgtaggctgcaggatcaaggactgattctctaccatcagcatcagcatagctgttgtgaatcacccaccagactcgctcagcagtctcacatggacgccttcgagcgctctttttgtattttcagactaccccagccccccggtgctgccgttggcggctctactcgcccatgtcccagttggaaggccgtgagagtagacctggtcgtggcgccggttagccagttcccattcgcactgcttggttggaccggatctaagctgttccagcgagagctgagacgcttttccagaaaagaaaaggggctttggctcaatagccatggcttgtttgatcctgaacaaaagacgtttttccaggccgccagcgaagaggatattttccgccatctcgggctcgaatacttgcccccagagcagcgcaacgcttag

SEQ ID NO: 175407 - DNA, 1485 bp, Artificial Sequence
  derived and/or modified sequence
atgctgcccaagagaagaagagcccgggtgggcagccccagcggagatgctgccagcagcaccccacccagcacccgcttccctggggtggccatctacctggtggagcccaggatgggccgcagcagaagagccttcctgaccggcctggcccggagcaagggcttccgggtgctggatgcctgcagcagcgaggccacccacgtggtgatggaggagaccagcgctgaggaggccgtgtcctggcaggagaggaggatggctgctgcccctcctggctgcaccccaccagccctgctggacatctcctggctgacagagagcctgggcgccggccagcctgtgcctgtggagtgccgccaccggctggaggtggccggccccaggaagggccccctgagccctgcctggatgcctgcctatgcctgccagaggcccacccccctgacccaccacaacacaggcctgtctgaggccctggagatcctggccgaggccgccggctttgagggcagcgagggccgcctgctgaccttctgccgggccgcctctgtgctgaaggccctgcccagccctgtgaccaccctgagccagctgcagggcctgccccactttggagagcacagcagccgggtggtgcaggagctgctggagcacggcgtgtgtgaggaggtggagcgggtgagaagaagtgagcgctaccagaccatgaagctgttcacccagatcttcggcgtgggcgtgaagacagctgaccgctggtaccgggagggcctgcggaccctggatgacctgcgggagcagccccagaagctgacccagcagcagaaggccggcctgcagcaccaccaggacctgagcacccctgtgctgcggagtgatgtggatgccctgcagcaggtggtggaggaggccgtgggccaggccctgcccggggccaccgtgaccctgaccggcggcttccggcggggcaagctgcagggccatgatgtggacttcctgatcacccaccccaaggagggccaggaggccggcctgctgccccgggtgatgtgccgcctgcaggaccagggcctcatcctgtaccaccagcaccagcacagctgctgtgagagccccacccggctggcccagcagagccacatggatgcctttgagaggagcttctgcatcttccggctgccccagcccccaggagctgctgtgggcggcagcacccggccctgccccagctggaaggctgtgcgggtggacctggtggtggcccctgtgtcccagttcccctttgccctgctgggctggacaggcagcaagctgttccagcgggagctgcggcgcttcagcaggaaggagaagggcctgtggctgaacagccacggcctgtttgatcctgagcagaagaccttcttccaggccgccagcgaggaggacatcttccgccacctgggcctggagtacctgcccccagagcagagaaatgcctag

SEQ ID NO: 175408 - DNA, 2631 bp, Artificial Sequence
  derived and/or modified sequence
ccgcccgcccacccgcttccgtcagcctcactggggcttccttccgtctcgctcggagtttccctctgcgttcgctccgcgctgctggaggctgtcgtcccaatgctccccaaacggcggcgagcgcgggtcgggtcccctagcggcgatgccgcttcctccacgccgccctcgacgcgcttcccgggagtcgccatctacctggtcgagcctcgcatgggtcgcagccgccgggccttcctcacaggcctggcgcgctccaaaggcttccgcgtccttgacgcctgcagctccgaagcgacacatgttgtgatggaagagacctcagcagaggaggccgtcagctggcaggagcgcaggatggcagctgctcccccgggttgcacccccccagctctgctggacataagctggttaacagagagcctgggagctgggcagcctgtacctgtggagtgccggcaccgcctggaggtggctgggccaaggaaggggcctctgagcccagcatggatgcctgcctatgcctgccagcgccctacgcccctcacacaccacaacactggcctctccgaggctctggagatactggccgaggcagcaggctttgaaggcagtgagggccgcctcctcaccttctgcagagcagcctcggtgctcaaggcccttcccagccctgtcacaaccctgagccagctgcaggggcttccccactttggagaacactcctctagggttgtccaggagctgctggagcatggagtgtgtgaggaggtggagagagttcggcgctcagagaggtaccagaccatgaagctcttcacccagatcttcggggtcggtgtgaagactgctgaccggtggtaccgggaaggactgcgaaccttagatgacctccgagagcagccccagaaactaacccaacagcagaaagcggggctccagcaccaccaggacctgagcaccccagtcctgcggtccgatgtagatgccctgcagcaggtggtggaggaagctgtggggcaggccctgcctggggccaccgtcacgctgaccggcggcttccgcagggggaagttgcagggccatgacgtggacttcctcatcacccaccccaaggagggtcaggaggcggggctgctgcctagagtgatgtgccgcctgcaggaccagggcctcatcctgtaccaccagcaccagcacagctgctgtgagtcccctacccgcctggcccaacagagccacatggacgcttttgagagaagtttctgcattttccgcctaccacaacctccaggggctgctgtggggggatccacgaggccctgcccatcctggaaggccgtgagagtggacttggtagttgcacccgtcagccagttccctttcgccctgctcggttggactggctccaagcttttccagcgggagctgcgccgcttcagccggaaggagaagggcctgtggctgaacagccatgggctgtttgacccggagcagaagacatttttccaagcggcttcagaggaagacatcttcagacacctgggccttgagtaccttcctccagagcagagaaacgcctgagcctgcctgtgtcccccacttccactcaggaaattgggctgcccccaacctggccactgaatgtctccaggcagatatgctgccccctgacccccaccttcacccctccccgccaaggcctggctcttccggaggtcaattgtgcctgcaggatcagttgagcccctgctggtgtgctgcagggtgtgatgaggtgggagccctcagtgccagcctcatcactgtgtgaccctgggtctgctcttagcctccccatggctcacgttcctgccctggatgggatgtgagtggggcccacatcgtggagctgtggtggggcctgcagtcatgaatggcaagtggtccctgatgtgcagtgtctcattagttgcactgcagttaactgtggctcctgcagggcaccctgcccagaatgcccagaagagaaccatgcatacctgcactgcatttgagagccatgagctggaggctgtggttcgtgccagcaaggagcctactgtctggtgtgctgtaggcatctggagagggagagggcctgggtaggagctgggaggaagataattttcaactatggggcttcagtactgcagcgccccgagccaggctctgtgcttctgcctttaaggcctgttctcagcacaatgtctcaaaaataggtcatatcctgccactcccgtcgcagagccctttaatggttccaaaccctaagtccacacatagcccctggctctggcatctctccagccccactggccccgagctgcttgactcaccggcttcctatttgatgcacccaggcccccttgtggccaactccctccccttctcactgaggcagaagcactgaggtgggctggacatgggtgccctccacgtccctcatatccccaggcacactctggcctcaggttttgccctggccatgtcatctacctggagtgggccctccccttcttcaggccttgaatcaaaagccactttgttaggcgaggatttcccagaccactcatcacattaaaaaatattttgaaaacatgcagtaaa

SEQ ID NO: 175409 - DNA, 1485 bp, Artificial Sequence
  derived and/or modified sequence
atgctgcccaagcggcggcgggcccgggtgggcagccccagcggcgacgcggcttctagcacgccgcctagtaccaggttccccggcgtcgctatctatttagtcgagccgcgaatgggaaggtctcgcagagcttttctgacaggtctcgcacgttctaaggggtttcgagttctggatgcttgctcttccgaagcaacacacgttgtgatggaagagacctcggccgaagaggccgtttcatggcaagagcgcaggatggctgccgcccctcccggttgtacaccacccgctctcttggatatctcctggttgactgagagtctaggcgcaggacaaccggtccccgtggagtgtcgccatcgcctggaggtggcagggccccggaagggtcctctcagccccgcatggatgccagcgtacgcctgccagcgtcccactccattgacacaccacaataccggtttaagcgaggccttggagatcctggcagaggcagctggatttgaaggtagcgaagggcggttgcttactttttgtagagccgcatccgtcttgaaggccctgcccagccccgttacgacactgagccaactgcaagggttaccccattttggcgagcactcctctcgggtggtccaggaattgctcgaacacggtgtgtgcgaagaggtagaacgggtcagacgctctgaacggtatcagacgatgaagctgttcacccagatttttggcgtgggcgtcaagactgccgatcggtggtatcgggaggggcttcgcacactggacgacttgcgcgagcaacctcagaaacttacccaacaacaaaaggcaggcctgcagcaccaccaggatttatctacacccgtgcttaggtcagacgtggacgccctccaacaggtggttgaggaagccgttggacaagctcttcctggggcgaccgtcacactgaccgggggattcaggagggggaaacttcaggggcatgatgtcgacttcctgatcactcaccccaaagaggggcaggaggcaggtctcctgccacgggtcatgtgtaggctacaggatcaaggacttattttatatcatcagcaccagcatagctgctgcgagagtcccactagactggcacaacagtcccatatggacgcttttgagcgttctttctgcatattccggctgcctcagcctcccggtgcagcagtgggagggagcacccggccctgtcctagctggaaagccgtgagagtggatctggtagtggcacccgtctctcaattccccttcgccctcctcgggtggacgggctccaaattgtttcagagagaattacgccgatttagccgaaaggaaaagggactatggctgaactcccacgggctgttcgatcccgaacagaaaacttttttccaggctgcttctgaagaggatatctttcgacatctggggctcgaatacctgcccccagagcagaggaatgcttag

SEQ ID NO: 175410 - DNA, 1485 bp, Artificial Sequence
  derived and/or modified sequence
atgttgccaaaacggaggcgggctcgagtcggatcaccttccggcgacgctgcttcttccacgcccccttcaaccaggttcccaggcgtagcaatttacctggtcgagccgcgaatgggcagaagccgacgcgctttcctcaccggcctagccaggagcaaaggctttcgagtgctcgatgcctgctcatccgaagctacccacgtcgtcatggaagaaacgtccgccgaggaggccgtctcatggcaggagagacggatggctgcggctccacccggttgcacaccacctgccttactggacatatcctggctgacagaaagtctgggtgcaggccagccagtgcctgtggagtgtcggcataggctcgaggtggccggaccaaggaaaggtcccctgtctccagcctggatgccagcatacgcctgtcagagacccactccccttacacaccacaatacaggactcagcgaggctcttgaaatactcgccgaagccgctgggtttgaagggagtgaaggtcgtttgctcaccttctgtcgggctgcatccgttctcaaagcactcccatcaccagttactacattgagtcagctccagggcctgccccactttggggaacattccagccgtgttgtgcaagaactcctggagcacggagtctgcgaggaggtggagagagtgcggaggtcagagcgataccaaacaatgaagttgttcacccagatcttcggagtcggcgtcaaaactgcagacagatggtacagagaaggcttgcgcactctcgatgatctgcgggaacagcctcagaaactgacccagcagcagaaagcagggttgcagcaccaccaagacctgagtacacccgtgctccgtagtgacgtggatgccctccagcaggtggtcgaggaggccgttggacaggcactcccaggggcaaccgttactttgaccggtgggtttcgtcgcggaaaactgcagggccatgatgtggacttcctgatcactcaccctaaggaaggccaagaagccggacttctgcctagggtcatgtgccgtctccaggaccagggactcatcctataccaccaacatcagcacagttgttgtgagagtcccactagactggctcagcaaagtcacatggatgcatttgaacgatccttttgtatctttcggctgccccagccgccaggagccgctgtcgggggttccacacgcccatgcccttcatggaaggctgtcagggtggacttggtggtagccccagtttctcagttcccatttgctttattaggctggaccggctccaagcttttccaaagagaactccgccgattttctagaaaagagaagggtttgtggctgaactcacacgggctttttgacccagagcagaagacattttttcaggcagcctccgaggaagacatcttccgtcacctgggattggagtacctgccacctgaacaacgcaacgcctag

SEQ ID NO: 175411 - DNA, 1485 bp, Artificial Sequence
  derived and/or modified sequence
atgctgcccaagagaagaagagccagagtgggcagccccagcggcgacgccgccagcagcaccccccccagcaccagattccccggcgtggccatctacctggtggagcccagaatgggcagaagcagaagagccttcctgaccggcctggccagaagcaagggcttcagagtgctggacgcctgcagcagcgaggccacccacgtggtgatggaggagaccagcgccgaggaggccgtgagctggcaggagagaagaatggccgccgccccccccggctgcaccccccccgccctgctggacatcagctggctgaccgagagcctgggcgccggccagcccgtgcccgtggagtgcagacacagactggaggtggccggccccagaaagggccccctgagccccgcctggatgcccgcctacgcctgccagagacccacccccctgacccaccacaacaccggcctgagcgaggccctggagatcctggccgaggccgccggcttcgagggcagcgagggcagactgctgaccttctgcagagccgccagcgtgctgaaggccctgcccagccccgtgaccaccctgagccagctgcagggcctgccccacttcggcgagcacagcagcagagtggtgcaggagctgctggagcacggcgtgtgcgaggaggtggagagagtgagaagaagcgagagataccagaccatgaagctgttcacccagatcttcggcgtgggcgtgaagaccgccgacagatggtacagagagggcctgagaaccctggacgacctgagagagcagccccagaagctgacccagcagcagaaggccggcctgcagcaccaccaggacctgagcacccccgtgctgagaagcgacgtggacgccctgcagcaggtggtggaggaggccgtgggccaggccctgcccggcgccaccgtgaccctgaccggcggcttcagaagaggcaagctgcagggccacgacgtggacttcctgatcacccaccccaaggagggccaggaggccggcctgctgcccagagtgatgtgcagactgcaggaccagggcctgatcctgtaccaccagcaccagcacagctgctgcgagagccccaccagactggcccagcagagccacatggacgccttcgagagaagcttctgcatcttcagactgccccagccccccggcgccgccgtgggcggcagcaccagaccctgccccagctggaaggccgtgagagtggacctggtggtggcccccgtgagccagttccccttcgccctgctgggctggaccggcagcaagctgttccagagagagctgagaagattcagcagaaaggagaagggcctgtggctgaacagccacggcctgttcgaccccgagcagaagaccttcttccaggccgccagcgaggaggacatcttcagacacctgggcctggagtacctgccccccgagcagagaaacgcctag

SEQ ID NO: 175412 - protein, 352 aa, Artificial Sequence
  derived and/or modified sequence
MAPKLITVLCLGFCLNQKICPHAGAQDKFSLSAWPSPVVPLGGRVTLSCHSHLRFVIWTIFQTTGTRSHELHTGLSNNITISPVTPEHAGTYRCVGIYKHASKWSAESNSLKIIVTGLFTKPSISAHPSSLVHAGARVSLRCHSELAFDEFILYKEGHIQHSQQLDQGMEAGIHYVEAVFSMGPVTPAHAGAYRCCGCFSHSRYEWSAPSDPLDIVITGKYKKPSLSTQVDPMMRLGEKLTLFCSSEISFDQYHLFRHGVAHGQWLSGGQRHREAFQANFSVGRATPVPGGTYRCYGSFNDSPYKPPVTRCNFTPQETLRVLLCHSQNPPLNLTHLALKDSPATCICSLDSQ

SEQ ID NO: 175413 - protein, 365 aa, Artificial Sequence
  derived and/or modified sequence
MAPKLITVLCLGFCLNQKICPHAGAQDKFSLSAWPSPVVPLGGRVTLSCHSHLRFVIWTIFQTTGTRSHELHTGLSNNITISPVTPEHAGTYRCVGIYKHASKWSAESNSLKIIVTGLFTKPSISAHPSSLVHAGARVSLRCHSELAFDEFILYKEGHIQHSQQLDQGMEAGIHYVEAVFSMGPVTPAHAGAYRCCGCFSHSRYEWSAPSDPLDIVITGKYKKPSLSTQVDPMMRLGEKLTLFCSSEISFDQYHLFRHGVAHGQWLSGGQRHREAFQANFSVGRATPVPGGTYRCYGSFNDSPYKPPVTRCNFTPQETLRVLLCHSQNPPLNLTPPWQTQSPRKANGRMKRSLQQKRHRRSYMPS

SEQ ID NO: 175414 - protein, 422 aa, Artificial Sequence
  derived and/or modified sequence
MGGQDKPFLSAWPSAVVPRGGHVTLRCHYRHRFNNFMLYKEDRIHIPIFHGRIFQESFNMSPVTTAHAGNYTCRGSHPHSPTGWSAPSNPVVIMVTGNHRKPSLLAHPGPLVKSGERVILQCWSDIMFEHFFLHKEGISKDPSRLVGQIHDGVSKANFSIGPMMLALAGTYRCYGSVTHTPYQLSAPSDPLDIVVTGPYEKPSLSAQPGPKVQAGESVTLSCSSRSSYDMYHLSREGGAHERRLPAVRKVNRTFQADFPLGPATHGGTYRCFGSFRHSPYEWSDPSDPLLVSVTGNPSSSWPSPTEPSSKSGNPRHLHILIGTSVVIILFILLLFFLLHLWCSNKKNAAVMDQEPAGNRTANSEDSDEQDPEEVTYAQLDHCVFTQRKITRPSQRPKTPPTDTILYTELPNAKPRSKVVSCP

SEQ ID NO: 175415 - protein, 349 aa, Artificial Sequence
  derived and/or modified sequence
MSLMVVSMACVGLFLVQRAGPHMGNHRKPSLLAHPGPLVKSGERVILQCWSDIMFEHFFLHKEGISKDPSRLVGQIHDGVSKANFSIGPMMLALAGTYRCYGSVTHTPYQLSAPSDPLDIVVTGPYEKPSLSAQPGPKVQAGESVTLSCSSRSSYDMYHLSREGGAHERRLPAVRKVNRTFQADFPLGPATHGGTYRCFGSFRHSPYEWSDPSDPLLVSVTGNPSSSWPSPTEPSSKSGNPRHLHILIGTSVVIILFILLLFFLLHLWCSNKKNAAVMDQEPAGNRTANSEDSDEQDPEEVTYAQLDHCVFTQRKITRPSQRPKTPPTDTILYTELPNAKPRSKVVSCP

SEQ ID NO: 175416 - protein, 444 aa, Artificial Sequence
  derived and/or modified sequence
MSLMVVSMACVGLFLVQRAGPHMGGQDKPFLSAWPSAVVPRGGHVTLRCHYRHRFNNFMLYKEDRIHIPIFHGRIFQESFNMSPVTTAHAGNYTCRGSHPHSPTGWSAPSNPVVIMVTGNHRKPSLLAHPGPLVKSGERVILQCWSDIMFEHFFLHKEGISKDPSRLVGQIHDGVSKANFSIGPMMLALAGTYRCYGSVTHTPYQLSAPSDPLDIVVTGPYEKPSLSAQPGPKVQAGESVTLSCSSRSSYDMYHLSREGGAHERRLPAVRKVNRTFQADFPLGPATHGGTYRCFGSFRHSPYEWSDPSDPLLVSVTGNPSSSWPSPTEPSSKSGNPRHLHILIGTSVVIILFILLLFFLLHLWCSNKKNAAVMDQEPAGNRTANSEDSDEQDPEEVTYAQLDHCVFTQRKITRPSQRPKTPPTDTILYTELPNAKPRSKVVSCP

SEQ ID NO: 175417 - protein, 455 aa, Artificial Sequence
  derived and/or modified sequence
MSLMVVSMACVGLFLVQRAGPHMGGQDKPFLSAWPSAVVPRGGHVTLRCHYRHRFNNFMLYKEDRIHIPIFHGRIFQESFNMSPVTTAHAGNYTCRGSHPHSPTGWSAPSNPVVIMVTGNHRKPSLLAHPGPLVKSGERVILQCWSDIMFEHFFLHKEGISKDPSRLVGQIHDGVSKANFSIGPMMLALAGTYRCYGSVTHTPYQLSAPSDPLDIVVTGPYEKPSLSAQPGPKVQAGESVTLSCSSRSSYDMYHLSREGGAHERRLPAVRKVNRTFQADFPLGPATHGGTYRCFGSFRHSPYEWSDPSDPLLVSVTGNPSSSWPSPTEPSSKSGICRHLHVLIGTSVVIFLFILLLFFLLYRWCSNKKNAAVMDQEPAGDRTVNRQDSDEQDPQEVTYAQLDHCVFIQRKISRPSQRPKTPLTDTSVYTELPNAEPRSKVVSCPRAPQSGLEGVF

SEQ ID NO: 175418 - protein, 427 aa, Artificial Sequence
  derived and/or modified sequence
MSLMVVSMACVGLFLVQRAGPHMGGQDKPFLSAWPSAVVPRGGHVTLRCHYRHRFNNFMLYKEDRIHIPIFHGRIFQESFNMSPVTTAHAGNYTCRGSHPHSPTGWSAPSNPVVIMVTGNHRKPSLLAHPGPLVKSGERVILQCWSDIMFEHFFLHKEGISKDPSRLVGQIHDGVSKANFSIGPMMLALAGTYRCYGSVTHTPYQLSAPSDPLDIVVTGPYEKPSLSAQPGPKVQAGESVTLSCSSRSSYDMYHLSREGGAHERRLPAVRKVNRTFQADFPLGPATHGGTYRCFGSFRHSPYEWSDPSDPLLVSVTGNPRHLHILIGTSVVIILFILLLFFLLHLWCSNKKNAAVMDQEPAGNRTANSEDSDEQDPEEVTYAQLDHCVFTQRKITRPSQRPKTPPTDTILYTELPNAKPRSKVVSCP

SEQ ID NO: 175419 - DNA, 1059 bp, Artificial Sequence
  derived and/or modified sequence
atggccccgaaacttattacggtgctgtgcttggggttctgcctcaatcagaagatttgtccacatgccggagcccaggataaatttagcctgagcgcttggccatcgccagtcgtccccctgggaggacgcgtcacgttgtcgtgccactcacatcttagatttgtgatctggacaatttttcagacaactggtacaaggagtcatgaactgcacactggactctcaaacaatataacgatcagtcctgtaactccagaacacgcgggaacgtatagatgcgtgggcatctacaagcatgcaagcaagtggtccgcagagtctaacagtctgaaaattattgttacgggcctgttcaccaagcctagcatttctgcacaccccagcagcctagtgcatgcgggcgccagagtctcacttcgttgccacagcgaactggcatttgacgagtttatcctgtataaggagggtcacatccagcactcacagcaacttgaccagggtatggaagcagggatccattacgtagaggctgtgttcagtatgggacccgtgacaccagcccacgctggagcgtaccggtgttgcggctgcttttctcactctagatatgaatggagcgcgcccagtgaccctctcgacattgtgattacaggcaagtacaaaaaacccagcctcagtacacaagttgatcctatgatgcggctaggcgagaagctcaccctcttctgtagcagtgaaattagctttgaccagtaccacctcttccgccacggagtggctcacggacagtggctgagtggcggccagcggcacagagaagcattccaggccaacttctctgtcggacgcgcaacccccgtcccaggcggcacatacagatgttatggcagcttcaacgattcaccttacaagccccctgtgacgcgatgcaatttcacccctcaagaaaccctgcgagtcctgctgtgccacagtcagaatcctccactgaacctcacacaccttgcgctgaaagactcacccgccacttgcatctgcagcctcgattcacaatag

SEQ ID NO: 175420 - DNA, 1059 bp, Artificial Sequence
  derived and/or modified sequence
atggcccccaagctgatcaccgtgctgtgcctgggcttctgcctgaaccagaagatctgcccccatgctggggcccaggacaagttcagcctgagcgcctggcccagccctgtggtgcccctgggcggccgggtgaccctgagctgccacagccacctgcgctttgtgatctggaccatcttccagaccaccggcaccaggagccatgagctgcacacaggcctgagcaacaacatcaccatcagccctgtgaccccagagcacgccggcacctaccgctgtgtgggcatctacaagcacgccagcaagtggagcgctgagagcaacagcctgaagatcatcgtgacaggcctcttcaccaagcccagcatcagcgcccaccccagcagcctggtgcacgccggggcccgggtgtccctgcgctgccacagcgagctggcctttgatgagttcatcctgtacaaggagggccacatccagcacagccagcagctggaccagggcatggaggccggcatccactacgtggaggccgtgttctccatgggccctgtgaccccagcccacgccggggcctaccgctgctgcggctgcttcagccacagccgctatgagtggagcgcccccagcgaccccctggacatcgtcatcaccgggaagtacaagaagcccagcctgagcacccaggtggaccccatgatgaggctgggggagaagctgaccctcttctgcagcagcgagatcagctttgaccagtaccacctgttcagacatggagtggcccacggccagtggctgagcggcggccagaggcaccgggaggccttccaggccaacttctctgtgggccgggccacccctgtgcctgggggcacctaccgctgctacggcagcttcaatgacagcccctacaagccccctgtgacccgctgcaacttcaccccccaggagaccctgcgggtgctgctgtgccacagccagaacccccccctgaacctgacccacctggccctgaaggacagccctgccacctgcatctgcagcctggacagccagtag

SEQ ID NO: 175421 - DNA, 1059 bp, Artificial Sequence
  derived and/or modified sequence
atggcccccaagctgatcaccgtgctgtgcctgggcttctgcctgaatcagaaaatttgcccacacgcaggcgctcaggataaatttagcctttccgcctggcccagccctgtggtacctctcggcggacgcgtgactctgtcctgtcacagtcacttgaggttcgtgatctggacaatcttccaaacgaccggaactcgatcacacgagctccacaccggcctgagtaacaacattacaattagtccagttactcccgagcacgcaggtacctaccgctgtgttgggatttacaagcacgccagtaagtggtctgccgagtctaattccttaaagattatagtgacagggttgttcactaagccgtcgatctcggcacatccaagctctctcgttcatgctggggctagggtgtcattgcggtgtcatagcgagctggcctttgatgagtttattttgtataaggaggggcatatccaacattcccagcaactggaccagggtatggaggcggggatccactatgtggaggccgtgttttccatgggaccagtgacccccgcgcatgccggcgcctaccgatgctgtgggtgtttctcccacagcagatacgaatggtccgccccctccgaccccttggacattgtcattactggtaaatataagaaacccagtttgtctacacaagtcgacccaatgatgagactaggggagaaactgactctattttgttccagcgagatttcctttgaccagtaccacctgtttagacacggggttgctcacggtcaatggctgtccggcggccaacggcaccgcgaggcttttcaagcaaacttctccgtggggagagcaacccccgttccaggcggcacgtatagatgctatggaagttttaatgacagtccttataaacctccagtaactaggtgcaatttcactccacaggaaacactgcgggtgctcctgtgccacagtcaaaacccaccattaaacttgacccatctggctttgaaagactcccctgccacatgtatctgttctctggactctcagtag

SEQ ID NO: 175422 - DNA, 1059 bp, Artificial Sequence
  derived and/or modified sequence
atggcccctaagctgattacagtactgtgcctcggattctgcctaaatcagaagatatgcccccacgccggagcccaggacaaattctcactgagcgcttggcccagtccagtggtgcctctgggcggtcgcgtgacattgtcctgccacagccacctgaggttcgtgatctggacaatcttccagactacgggaactcgttctcatgagctgcacaccggcctcagcaataacataactatctcacctgtgacaccagagcatgccggtacctaccggtgtgtgggcatctacaagcatgctagcaagtggagcgcagagtcaaattctctcaaaatcatcgttactgggttatttacaaagcctagtattagcgcccatccgagcagtctggtgcacgcaggcgctagagtgagcctccgttgtcacagcgaacttgcattcgacgaattcattctgtataaagagggccatatccagcacagccagcagcttgaccaggggatggaggcaggcattcattacgtggaggcggtgttcagcatgggcccagtgacaccagcccatgccggtgcttacaggtgttgtggctgtttctcccatagcagatatgagtggtccgcgccttccgatccactggatatcgtgattacaggcaagtataaaaaaccctcgctgtctacacaggtggatcccatgatgagactaggagagaagctgacacttttctgcagcagcgagattagctttgaccagtatcatttgttccggcatggcgtggcgcatggccaatggctctcgggtggacagagacacagggaagcgttccaggcaaattttagtgtcggcagggcaactccggtcccaggaggcacctataggtgctatggctctttcaatgacagtccttataagcccccagtgacgagatgcaattttactcctcaggagaccctgagggtgctgttatgtcacagccagaatccaccactgaatctgacccatttagctcttaaggatagcccagccacctgcatatgttccctcgatagccagtag

SEQ ID NO: 175423 - DNA, 1059 bp, Artificial Sequence
  derived and/or modified sequence
atggctcccaagttgattaccgtgctgtgccttggattctgcctaaatcagaagatttgccctcatgctggcgcccaggacaaattttcattgtccgcttggccatcccccgtagtgccactgggtggccgcgtgaccctgtcctgtcattcccatctcaggtttgttatttggaccatattccagacaaccggaacacgctctcatgagctgcatacagggctctctaacaatatcaccatttctccagtcacaccagaacacgccggcacgtatcgctgtgtcgggatttataaacatgcttccaaatggagcgctgaatccaactctttaaaaatcatcgttaccggactcttcactaagccttccatctccgctcatcccagctctttagtgcacgcaggtgcgagagtttcgttgagatgtcactcggaactggcattcgacgaattcatcttatacaaggagggccatattcagcattctcagcagttagatcagggcatggaagcgggaattcactacgtggaggcagtgtttagcatgggaccagtgacacccgcccacgctggcgcatacagatgctgcggttgtttttcccatagcagatatgaatggtccgccccatccgacccgcttgacatcgtgattaccgggaagtacaagaagcctagcctctccacacaagtcgacccaatgatgaggcttggagaaaagctgaccctcttttgttccagtgaaatttcgtttgaccagtaccacctgttccggcacggcgtcgcccatggacagtggcttagcggcggacagcgccatagagaggcattccaggcaaactttagcgttggacgggccacacccgtccccggtggcacttatcggtgttatggctccttcaatgactcaccatataagccacctgtgaccaggtgtaacttcacacctcaagaaactctgagggtccttctgtgccatagtcagaacccacccctgaatttaacacacctggcacttaaagattccccggccacctgtatctgttctctcgactcacaatag

SEQ ID NO: 175424 - DNA, 1059 bp, Artificial Sequence
  derived and/or modified sequence
atggcccctaaattgataacagtactgtgccttggattttgtttgaaccagaagatatgtccacacgcaggcgcccaagacaagttttccctatctgcatggccatcccccgttgttcccctcggcggcagggtcaccctctcttgccatagccacctccgttttgtaatctggacaatttttcagaccacgggcacgcggtcacacgagttgcataccgggctgagcaataatattacaatctcccccgttactcccgaacacgcaggtacctatcggtgcgttggtatatacaagcacgccagtaagtggagcgccgaaagtaactcactgaaaattatcgttacaggcctgttcacgaaacctagcatatcagcacacccctcatccctagtgcacgcgggcgcccgagtgtctcttcgctgtcattccgagttggccttcgatgaatttattctctataaggaaggtcacatccaacacagccagcagttggatcaagggatggaggccgggattcattacgtcgaggcagtattttccatgggcccagtgactcctgcacacgccggcgcatatcgttgttgcggctgtttttcccacagtcgctatgaatggagcgccccttcagacccactcgatatagtaatcacaggaaagtataagaagcctagtctgagcacccaagtggacccaatgatgagactaggcgagaagctcacattgttttgctcttctgaaatcagttttgaccagtatcacctctttagacacggagtcgcacacgggcaatggctaagcgggggacaacggcatcgcgaagcttttcaggctaatttttctgtgggaagagctacgcccgtcccgggaggaacataccgctgctacggttcatttaacgattctccttataagcccccagtgacacggtgcaattttactccccaggaaaccctgagagtgcttctctgtcatagccaaaatccgcctctcaaccttactcacctcgctctcaaagactcccccgccacttgtatttgctctctcgactcacagtag

SEQ ID NO: 175425 - DNA, 1059 bp, Artificial Sequence
  derived and/or modified sequence
atggcccccaagctgatcaccgtgctgtgcctgggcttctgcctgaaccagaagatctgcccccacgccggcgcccaggacaagttcagcctgagcgcctggcccagccccgtggtgcccctgggcggcagagtgaccctgagctgccacagccacctgagattcgtgatctggaccatcttccagaccaccggcaccagaagccacgagctgcacaccggcctgagcaacaacatcaccatcagccccgtgacccccgagcacgccggcacctacagatgcgtgggcatctacaagcacgccagcaagtggagcgccgagagcaacagcctgaagatcatcgtgaccggcctgttcaccaagcccagcatcagcgcccaccccagcagcctggtgcacgccggcgccagagtgagcctgagatgccacagcgagctggccttcgacgagttcatcctgtacaaggagggccacatccagcacagccagcagctggaccagggcatggaggccggcatccactacgtggaggccgtgttcagcatgggccccgtgacccccgcccacgccggcgcctacagatgctgcggctgcttcagccacagcagatacgagtggagcgcccccagcgaccccctggacatcgtgatcaccggcaagtacaagaagcccagcctgagcacccaggtggaccccatgatgagactgggcgagaagctgaccctgttctgcagcagcgagatcagcttcgaccagtaccacctgttcagacacggcgtggcccacggccagtggctgagcggcggccagagacacagagaggccttccaggccaacttcagcgtgggcagagccacccccgtgcccggcggcacctacagatgctacggcagcttcaacgacagcccctacaagccccccgtgaccagatgcaacttcaccccccaggagaccctgagagtgctgctgtgccacagccagaacccccccctgaacctgacccacctggccctgaaggacagccccgccacctgcatctgcagcctggacagccagtag

SEQ ID NO: 175426 - DNA, 1098 bp, Artificial Sequence
  derived and/or modified sequence
atggctcccaagcttataacagtgctgtgtttggggttttgtctgaaccagaagatatgccctcacgccggtgctcaagacaagttttcgctctctgcgtggccaagtcctgtggtgcctctggggggaagggtgacgctctcatgccacagtcacctgagatttgtaatttggacaatttttcagacgacaggaactagatcgcacgagctgcataccggcctgagtaataacattacgatctccccagtcactccggagcatgcaggtacataccggtgtgtcggtatctacaagcatgccagcaagtggtccgccgaaagtaattctctgaagattatcgtgacaggacttttcacgaaaccatctataagcgcccatcccagctctctggtacacgccggtgcacgtgtgagcctgcggtgtcattcagaactcgctttcgatgagtttatcctgtataaagaaggacatatccagcattcacaacagttggaccagggaatggaggccggtattcactacgtcgaggctgtgttcagcatgggtcccgtcaccccggcacacgccggtgcatatcggtgttgcggttgcttttctcacagccgctacgagtggtccgctccctctgaccctctagatatcgtcattaccggaaaatataagaagccgtccctgtcgactcaagttgatcctatgatgcgtctgggcgagaagctaaccctcttttgcagttccgagatatcctttgaccaatatcatctttttcgccatggcgtcgcccatggacagtggttatctggcggacagagacatagggaggcatttcaggcaaactttagcgtggggcgtgctacgccggtgcctggaggcacttaccgctgctacggatcattcaatgattctccgtataagccacctgtgactaggtgtaacttcacccctcaggaaacccttcgcgtgctgctgtgccattcgcagaacccacctcttaatctcactccaccttggcagacccagagccccaggaaggccaacggacgaatgaagagatcccttcagcaaaagagacacagacgttcttacatgcctagttag

SEQ ID NO: 175427 - DNA, 1098 bp, Artificial Sequence
  derived and/or modified sequence
atggcccctaaactgatcactgttctctgccttggcttttgtctcaatcagaagatttgccctcacgcaggagcccaagataagttttctcttagcgcttggccaagtcccgtggtcccactagggggtcgcgtgaccctctcatgtcattctcacttgaggttcgtcatttggaccatctttcaaactacaggaacccgtagtcatgaactgcataccggcctcagtaacaatatcactatctcaccagtgactcccgagcacgcaggaacatatcgttgcgtgggcatctataagcacgcaagcaagtggtcagccgagtctaatagcctgaagattatcgttacaggcctgttcacaaaaccttcaatctccgctcaccccagtagcctggtccacgcaggtgcaagggtctctctgcgctgtcattctgagttagccttcgacgagttcattttgtacaaagaagggcacatacaacactcacagcaattagaccagggaatggaagccgggatacattatgttgaagctgtattttccatgggacccgtcacacccgcccacgccggtgcctatcgctgttgcggctgcttttcacactccagatacgaatggagcgccccgagtgacccgctggatattgtgatcaccggcaagtataagaagcctagtctttcaacacaggtggatcccatgatgcggctgggagaaaaactgaccctcttttgctcttccgagatctcatttgatcagtaccacctgttcagacacggtgtggcgcatggccaatggctgagcggcggtcaaaggcacagagaagccttccaggcaaatttctctgtggggcgggctacaccagtcccaggaggaacatatagatgttacggatccttcaatgattccccttataagcccccagttacccggtgcaactttaccccccaggagactttgcgggtactcttatgtcacagccagaaccctcccctgaacctcaccccgccctggcagacccagagcccaagaaaggctaatgggcgcatgaagagatccctccagcaaaaacggcatagaagaagttacatgccctcatag

SEQ ID NO: 175428 - DNA, 1098 bp, Artificial Sequence
  derived and/or modified sequence
atggcccccaaactcatcactgttctttgcctcgggttctgcttgaaccagaagatctgtccacatgccggcgcacaagacaagttctctctatccgcgtggccatctccagtggttcccctaggaggcagggttaccctgtcttgtcactcccacctgaggtttgtgatttggaccatcttccagacaactggcacaagatcacacgaactacacaccggacttagcaataacattacaattagccctgtcacacccgagcacgccggtacctatcgctgcgtgggaatttataaacacgcaagcaagtggtcagccgagtctaatagcctgaagattatcgttacaggcctgttcacaaaaccttcaatctccgctcaccccagtagcctggtccacgcaggtgcaagggtctctctgcgctgtcattctgagttagccttcgacgagttcattttgtacaaagaagggcacatacaacactcacagcaattagaccagggaatggaagccgggatacattatgttgaagctgtattttccatgggacccgtcacacccgcccacgccggtgcctatcgctgttgcggctgcttttcacactctcgatatgagtggtctgctccaagcgatccactcgacattgttatcacaggcaaatataaaaaaccatctctgtccactcaggttgacccaatgatgcgtctgggtgaaaaactaaccctcttctgcagtagtgaaattagcttcgaccaataccatctgtttagacacggagttgctcatggccaatggctgtccggaggccagcgccacagagaggcgtttcaagcaaatttttcggtcggacgagcaacccccgtccctggtggcacgtatcggtgctatggcagtttcaacgattctccctataaacctccggtgacccggtgcaactttacgccacaagagaccttaagagtgctcctgtgccattcccagaatcccccactgaacctcacacctccatggcaaactcagtctcctaggaaagcaaatggacgaatgaagagatccctccaacagaagagacatcgaagatcctacatgccatcatag

SEQ ID NO: 175429 - DNA, 1378 bp, Artificial Sequence
  derived and/or modified sequence
tggcaccatggcccccaaactcatcaccgtcctgtgtctgggattctgcctgaaccagaagatctgcccacatgcgggtgctcaggacaagttctccctgtcagcctggccgagccctgtggttcccctaggaggacgtgtgactctctcctgtcattcccatcttcggtttgtcatatggacaatattccaaacaactgggacccgaagccatgagttgcacactggcctttccaacaacatcaccatcagccctgtgaccccagaacacgcagggacctacagatgtgttggaatttacaagcacgcctcaaagtggtcagctgagagcaactccctgaagatcatcgtcacaggcttgttcacaaaaccctccatctcagcgcacccaagctccctggtgcatgcaggagccagggtgagcctgcgctgtcactcagaactggcctttgatgaatttatcttatacaaagaggggcacatacagcattcccagcagcttgaccaggggatggaggctgggatccattacgtcgaggctgtcttttccatgggtcctgtaacgcctgcccatgcaggagcctacagatgctgtggttgtttcagtcactcccgctatgagtggtcggctcccagtgaccccctggacattgtgatcacaggaaaatacaaaaagccttctctctccacccaggtggaccccatgatgaggctgggagagaagttgaccctcttctgcagctctgaaatctcatttgaccagtaccatctgttcagacacggggttgctcatggacagtggctcagtggagggcagagacacagggaagcattccaggccaacttttctgtgggccgtgcaacgccagtccctggcgggacctatagatgctatggttccttcaatgactctccctataagcccccagtgacccgctgcaactttacaccacaggaaacactaagagtactcctctgtcattcacagaatccacccctgaatctgacacacctcgccctcaaggacagtccagcaacctgcatatgctcactggactctcagtagccatcatctccattggcgtttgcctctctgcttttattggtttctggtgttacataaaatatcacaccaccatggcaaacacagagcccacggaaggccaacggacggatgaagaggagcctgcagcagaagagacacaggagatcatatatgcccagttaaaccaccaggccctctcacagacaggattccctcctgcctcccagtgtccccactacctctcggaggatcctagtatctacatcactgtccaccaagcccaggctgaggccagagctgcccccagtctttggcacaaagggcattaatacg

SEQ ID NO: 175430 - DNA, 1098 bp, Artificial Sequence
  derived and/or modified sequence
atggcccccaagctgatcaccgtgctgtgcctgggcttctgcctgaaccagaagatctgcccccacgccggcgcccaggacaagttcagcctgagcgcctggcccagccccgtggtgcccctgggcggcagagtgaccctgagctgccacagccacctgagattcgtgatctggaccatcttccagaccaccggcaccagaagccacgagctgcacaccggcctgagcaacaacatcaccatcagccccgtgacccccgagcacgccggcacctacagatgcgtgggcatctacaagcacgccagcaagtggagcgccgagagcaacagcctgaagatcatcgtgaccggcctgttcaccaagcccagcatcagcgcccaccccagcagcctggtgcacgccggcgccagagtgagcctgagatgccacagcgagctggccttcgacgagttcatcctgtacaaggagggccacatccagcacagccagcagctggaccagggcatggaggccggcatccactacgtggaggccgtgttcagcatgggccccgtgacccccgcccacgccggcgcctacagatgctgcggctgcttcagccacagcagatacgagtggagcgcccccagcgaccccctggacatcgtgatcaccggcaagtacaagaagcccagcctgagcacccaggtggaccccatgatgagactgggcgagaagctgaccctgttctgcagcagcgagatcagcttcgaccagtaccacctgttcagacacggcgtggcccacggccagtggctgagcggcggccagagacacagagaggccttccaggccaacttcagcgtgggcagagccacccccgtgcccggcggcacctacagatgctacggcagcttcaacgacagcccctacaagccccccgtgaccagatgcaacttcaccccccaggagaccctgagagtgctgctgtgccacagccagaacccccccctgaacctgacccccccctggcagacccagagccccagaaaggccaacggcagaatgaagagaagcctgcagcagaagagacacagaagaagctacatgcccagctag

SEQ ID NO: 175431 - DNA, 3398 bp, Artificial Sequence
  derived and/or modified sequence
agctcaacccctgtgtcctgcccaatagaagtggcaccatggcccccaaactcatcaccgtcctgtgtctgggattctgcctgaaccagaagatctgcccacatgcgggtgctcaggacaagttctccctgtcagcctggccgagccctgtggttcccctaggaggacgtgtgactctctcctgtcattcccatcttcggtttgtcatatggacaatattccaaacaactgggacccgaagccatgagttgcacactggcctttccaacaacatcaccatcagccctgtgaccccagaacacgcagggacctacagatgtgttggaatttacaagcacgcctcaaagtggtcagctgagagcaactccctgaagatcatcgtcacaggcttgttcacaaaaccctccatctcagcgcacccaagctccctggtgcatgcaggagccagggtgagcctgcgctgtcactcagaactggcctttgatgaatttatcttatacaaagaggggcacatacagcattcccagcagcttgaccaggggatggaggctgggatccattacgtcgaggctgtcttttccatgggtcctgtaacgcctgcccatgcaggagcctacagatgctgtggttgtttcagtcactcccgctatgagtggtcggctcccagtgaccccctggacattgtgatcacaggaaaatacaaaaagccttctctctccacccaggtggaccccatgatgaggctgggagagaagttgaccctcttctgcagctctgaaatctcatttgaccagtaccatctgttcagacacggggttgctcatggacagtggctcagtggagggcagagacacagggaagcattccaggccaacttttctgtgggccgtgcaacgccagtccctggcgggacctatagatgctatggttccttcaatgactctccctataagcccccagtgacccgctgcaactttacaccacaggaaacactaagagtactcctctgtcattcacagaatccacccctgaatctgacaccaccatggcaaacacagagcccacggaaggccaacggacggatgaagaggagcctgcagcagaagagacacaggagatcatatatgcccagttaaaccaccaggccctctcacagacaggattccctcctgcctcccagtgtccccactacctctcggaggatcctagtatctacatcactgtccaccaagcccaggctgaggccagagctgcccccagtctttggcacaaagggcattaatacgcaaggacctggatctattcctaggaggattttttttccacggacattcttcctccttctggtaccatcttgacacctcgaagctggcaacagcagtgtctgaatgcttgtgggattatcttaaaattccagcactgctgaacagacaactagccattctacaattctattttgagcatccaaccatttaaggtgatttgactctacccacacactcatcctggatatctcattaatatcatctgagttatcctgaaactctacagacatgcttctggaaagccgatgtatatgctcagccagtttaatctctaaattactcaataaggtttttttaaaaaaatttttttaaagttctggggtacatgctcaggatgtgcaggtttgttacgtaggtaaacgtgtgccatggtggtttgctgcacctatcaaaccgtcacctaggtattaagcccagcaggcattagctctcttccctaatgctctccataccccctgccctcctctgacaggccccagtgaatgtgttcccctccctgtgtccatgtgttctcattgttcagctcccacttataagtgaaaacatgcggtgtctggttttctgttcctgcattagtttgctgaggataatgtcttctagcttcattcatgtctctgcaaatgatatgatctcattcctttttatgactgcgtagtattccgtggtgtatatgtacaactttatttttatccagtctatcattgatgggcatttgggttgattccacgtctttgctgttactcaacaaaattttgcagagatgaagtgtattctatatctgagtcatctaatatggtagccactagccaaatatggctttttaacttagaattagaatagatcaaattccatgaagtttaaaattcagttcctcagccacatggccacaatttgagttctcagagccacgtgtggctgctggctgtgggagagaatagcatgaacacaaaatgttttccttgtcagaggaagttctagctgttctagattaaaggtgcaaatttgaagatgcagagcctattttctcatgcagtgcaggctcctggaagagacctaatgtaacaaaacgataatatttcacatcaatggtgacatgtctttatcttacgaaatgcggggaacaagcagagttctcttgtggagtgtcttatcacctcttatcctcatgcaaatttctgccatagagattttctcccaaactttgagaaggtcacctctgtcaggcctctgagcccaagctaagccatcctatcccctgtgacctgcacgtacacatccagatggcctgaagcaactgaagattcacaaaagaagtgaaaatagccttaactgatgacattccaccactgtgacttgttcccgccccactaactgataccatatattctgccccgcccaagaaggtactttgtaatattcctcgcccccttaccccccaccgccctgcccccgctcgcccgccttaagaaggtactttgtaatattctcccccacaactttagaaggtactttgtaatattctcccccacaactttagaaggtactttgtaatattctcccccacaactttagaaggtactttgtaatattctcccccacaactttagaaggtactttgtaatattctcccccacaactttagaaggtactttgtaatattctcccccacaactttagaaggtactttgtaatattctcccccacaactttagaaggtactttgtaatattctcccctccccttaagaaggtacttcaaggctgggtgcggtggctcatgtctgtaatcccagcactctggggggccgaggtgggtggatcacgaggtcaggagatcgagaccatcctggctaatgtggtgaaaccccgtctctactaaaaaaatacaaaacacttagctgggcatggtggcgggtgcctgtagtcccagccacttgggagtctgaggcaggagaatggcgtgaacccaggaggcagagcttgcagtgagctgagatcgcgccactgcactccagcctgggcgatagagcaagactctgtctcaaaaaaaaaaaaaaaaaaaaaaaaaaaagaa

SEQ ID NO: 175432 - DNA, 1098 bp, Artificial Sequence
  derived and/or modified sequence
atggcaccaaagctcattacagtgctgtgcctggggttttgtctgaatcagaagatttgtccccacgccggtgcccaagataaattctccctaagcgcgtggccatcacccgtcgtacctttaggcggccgagtgacactgagttgccacagtcatctaaggttcgtgatttggacgatcttccagaccactggtacacggtcccatgaactgcataccggactatcaaataatatcaccatatctccagtgactccagaacacgcagggacctatcggtgcgtgggtatctataaacatgcttcaaagtggagtgcagagtccaattccctgaaaataatcgtaacaggcctgttcaccaagccttcaatctccgcccacccatcatcactcgtgcatgcgggcgcccgtgtgagcctgcggtgccacagcgaactggctttcgatgaattcatcctctataaagaggggcacatccagcactctcagcagttagaccagggcatggaggccggtatccactatgtggaggccgtcttttctatggggccggttacaccagcacacgctggcgcctacaggtgttgcgggtgtttcagccacagccgctacgagtggtccgcccccagcgatccactggacattgtgatcaccggaaagtacaagaaaccgtccctcagtacccaggtggaccccatgatgcgcttgggagagaagttgaccctgttctgctcaagcgaaatatcctttgaccagtatcacctgttccgccacggcgttgcccacggccagtggctgagcggcgggcagcggcaccgggaagcattccaggccaatttttctgtaggcagagccacgccagtgcccggcgggacgtatcggtgttacgggtctttcaacgattcaccctataaaccccctgtcaccaggtgtaattttactccacaggaaacattaagggtgcttctttgccactctcaaaatccacctctaaacctcacccccccttggcagacccagtcacctcggaaggcgaacggtcggatgaagcgcagcctccagcaaaagcggcatagacggtcttatatgccctcgtag

SEQ ID NO: 175433 - DNA, 1098 bp, Artificial Sequence
  derived and/or modified sequence
atggcccccaagctgatcaccgtgctgtgcctgggcttctgcctgaaccagaagatctgcccccatgctggggcccaggacaagttcagcctgagcgcctggcccagccctgtggtgcccctgggcggccgggtgaccctgagctgccacagccacctgcgctttgtgatctggaccatcttccagaccaccggcaccaggagccatgagctgcacacaggcctgagcaacaacatcaccatcagccctgtgaccccagagcacgccggcacctaccgctgtgtgggcatctacaagcacgccagcaagtggagcgctgagagcaacagcctgaagatcatcgtgacaggcctcttcaccaagcccagcatcagcgcccaccccagcagcctggtgcacgccggggcccgggtgtccctgcgctgccacagcgagctggcctttgatgagttcatcctgtacaaggagggccacatccagcacagccagcagctggaccagggcatggaggccggcatccactacgtggaggccgtgttctccatgggccctgtgaccccagcccacgccggggcctaccgctgctgcggctgcttcagccacagccgctatgagtggagcgcccccagcgaccccctggacatcgtcatcaccgggaagtacaagaagcccagcctgagcacccaggtggaccccatgatgaggctgggggagaagctgaccctcttctgcagcagcgagatcagctttgaccagtaccacctgttcagacatggagtggcccacggccagtggctgagcggcggccagaggcaccgggaggccttccaggccaacttctctgtgggccgggccacccctgtgcctgggggcacctaccgctgctacggcagcttcaatgacagcccctacaagccccctgtgacccgctgcaacttcaccccccaggagaccctgcgggtgctgctgtgccacagccagaacccccccctgaacctgaccccaccctggcagacccagagccccaggaaggccaacggccgcatgaagaggagcctgcagcagaagaggcacagaagaagctacatgcccagctag

SEQ ID NO: 175434 - DNA, 1098 bp, Artificial Sequence
  derived and/or modified sequence
atggcccccaagctgatcaccgtgctgtgcctgggcttctgcctgaaccaaaagatttgtccacatgcaggtgctcaggataaattttcactatcagcctggccctcccccgtggtgccactggggggccgggtgaccctttcatgtcatagccacctgcgttttgttatatggaccattttccaaacaaccggcacccgctcccatgagctccacaccggactttcaaacaacattactatttcccccgtgacccctgaacacgccggcacatatcgctgcgtcggcatctataagcatgcttccaagtggtctgcagagagcaatagccttaagatcatagtcactggactcttcactaaaccaagcatttctgcccacccttcctctttggtacatgcgggcgccagggtgtctttgcgttgtcactccgaactggctttcgatgagttcattctttataaagagggccatattcagcactcacagcagctggaccaaggaatggaagccgggatccactacgtcgaggccgtgttctctatgggcccagtgactccagctcatgccggggcataccgctgttgtggctgtttcagccatagtaggtacgagtggtcagcaccctccgacccgcttgacatagtcatcaccggcaagtacaaaaagcccagtctaagcacacaagttgaccctatgatgcggctgggggaaaaattgaccttgttctgctccagcgagatcagcttcgatcagtatcacttgtttcgacacggcgtagctcatggtcagtggttgagcggagggcagagacatagggaggcgttccaggccaatttctctgttggacgggctacaccagttcccggcggcacttaccgatgttatgggagcttcaacgatagcccatacaaacctcccgttacgcggtgcaactttacccctcaggaaacattacgagtgttgctgtgtcactcacagaatcctcctctgaatctaacacctccctggcagacccaaagcccgcgaaaggccaatggcaggatgaagcggtcactacagcagaaaaggcaccgccggtcatatatgccctcatag

SEQ ID NO: 175435 - DNA, 1269 bp, Artificial Sequence
  derived and/or modified sequence
atgggaggccaagataagcctttcctgtctgcctggccatccgcagttgttccaagaggcggccacgtcacattgagatgccactaccggcaccggttcaacaattttatgctgtataaggaggaccggatccatattccaatctttcatgggcgaatcttccaggaatccttcaacatgtctccagtgaccaccgcccatgctgggaattatacttgccgtggatctcacccccactcacccacgggctggtcagcacctagcaatcctgtcgttatcatggtgaccgggaatcatcggaagccgtctttgctagctcatcctggccccctcgtgaaaagcggagaacgcgtgatccttcaatgttggtctgatataatgttcgagcatttctttctgcacaaggagggtatcagtaaggatccaagtcgcttggtggggcagattcacgatggagtcagcaaggcaaattttagcattggacccatgatgttggcactggctggtacgtaccggtgctacggctctgtgacacacaccccctatcagttgagcgccccatctgacccgctggatattgttgtgaccggcccctatgagaagccatctctctccgcccaacccggacccaaggtgcaagcaggagagtcagtcactctcagctgtagttcgcgatccagctatgacatgtaccacctgagccgtgagggcggagcccacgagaggcgtcttcccgcagtcagaaaggtaaaccggacgttccaggcagactttccattaggacctgcaacccatgggggcacatataggtgttttggcagttttcggcactccccctatgagtggtccgatccctctgatccgctgttggtctctgtgaccggcaatccctccagttcttggcccagcccaacagagccatcgtccaaaagtgggaatccacgtcacctacatattctcataggaacctccgtagtcattatattattcatcctgctcttattcttcctgcttcacctctggtgctctaataaaaagaatgctgcagtgatggaccaagagccggcgggtaaccggactgccaatagtgaagattccgatgagcaggatcctgaggaggttacgtacgctcagctcgaccattgtgtatttactcagcgcaagatcactcggccgagtcagagacccaaaacccctcccaccgataccattttgtacacagaactgcctaacgcaaagccacggagcaaggtcgtgtcgtgtccttag

SEQ ID NO: 175436 - DNA, 1050 bp, Artificial Sequence
  derived and/or modified sequence
atgtctttaatggtcgtgtctatggcctgcgttggactgttccttgtgcaacgtgccggccctcacatgggcaaccacagaaagccatcgttgttggcccatcccgggcccctggtgaagtcaggcgaacgagtgatcttgcagtgttggtccgatatcatgtttgagcacttttttctgcacaaagaaggcatcagcaaagatcccagtaggctggttggtcaaatccatgatggtgtgagcaaggcaaacttctctattggcccgatgatgcttgccttagctggaacgtaccgctgttatggcagtgtgactcacactccctatcagttgagtgctccatctgatcccctcgacatcgtggtaaccggcccctacgaaaaacctagcctctcagcgcagcctggaccaaaggtgcaggctggtgagtccgtgacactgagctgctcctcccgaagtagctatgatatgtaccacctttcacgcgaagggggggcacacgaacgtagactgcctgccgtgcggaaggtgaaccggacattccaggccgatttccccctgggccccgccactcatgggggtacctaccgatgcttcggatcattccgacatagtccctacgagtggtctgacccatcagaccccctattggtgagtgtgacaggaaaccccagcagttcttggccctctccaaccgaaccctcttctaagtccggtaaccctaggcacctgcacattctgattggcacttccgtcgtcatcatcctgtttatcctgctcttgttctttcttctgcatttatggtgtagcaataagaaaaacgccgcagttatggatcaggagccagccggaaatcgaaccgctaattcagaggactccgacgaacaagatcccgaggaggtaacctacgctcagttagatcattgtgtcttcacccagaggaaaatcacacgcccttcacaacggccaaaaaccccacctactgatacaattctttatacagagctgccgaacgccaagccaaggtctaaggtggtgagctgtccatag

SEQ ID NO: 175437 - DNA, 1335 bp, Artificial Sequence
  derived and/or modified sequence
atgagcctaatggtggtgagcatggcttgtgtcggtctgtttttggtgcaacgggctggcccacacatgggtgggcaagataagccttttctgtcagcgtggcccagcgctgtggtaccaagggggggccacgtgactctacggtgtcactatagacatcgctttaataatttcatgctctacaaagaggaccgtatccacattcccatattccatggccggatctttcaagagagttttaacatgtccccagtaaccacggcgcacgcaggtaactatacatgtaggggatctcacccacacagcccgactggttggtctgctccgagcaaccccgtcgtgatcatggtgaccggaaatcatcgaaagccatctctcttggcgcaccccggccccttggtgaagtctggcgagcgggtgatcctccagtgttggtccgacattatgtttgagcacttttttctgcataaagaaggcatctccaaggatccgagtaggcttgtcggacaaatccacgacggggtctctaaggccaatttttctataggcccaatgatgctcgccctggcaggcacctacaggtgctacggttctgtgacacacaccccttatcagctgagcgcacccagcgaccccttggacatcgtcgttaccgggccttacgagaaaccctctttaagcgcccagccagggcctaaggtccaggcgggagaatctgtcacactgtcctgtagctcacggtcctcttatgacatgtaccaccttagcagggaaggcggagcacacgagcgacgactgcccgccgtgcgtaaagtcaacaggacttttcaggccgacttccctcttggtcccgctacccacggcggcacttatagatgctttggctcatttcgccattctccctacgagtggtccgaccccagcgaccccttgctggtcagtgttacggggaacccaagcagcagctggccatcccctacagaaccaagctcaaagtccggcaatccaaggcacctgcacattcttattggcactagcgttgttataatcctctttatcttactcctgtttttcctgttacatctgtggtgtagcaacaagaaaaatgctgccgttatggatcaggaacctgcgggaaatagaaccgctaactccgaggactctgacgaacaagaccctgaggaggtcacttatgcacagctggaccattgtgtattcacacagagaaaaataactagaccctcccaaaggccaaaaacccctccaacggacaccatcctctataccgagcttcccaatgccaagcccaggtccaaggtcgtgagctgcccctag

SEQ ID NO: 175438 - DNA, 1368 bp, Artificial Sequence
  derived and/or modified sequence
atgagcctgatggttgtgtcaatggcctgtgtcggactgtttctcgttcagcgcgccgggccccacatgggcggtcaagacaagccttttctttcggcatggcctagtgctgtggtgccgcgggggggccacgtgacgctgagatgccattatagacacaggtttaataatttcatgctctacaaagaggacaggatccatatcccaatcttccacgggagaatctttcaggaaagctttaacatgagccctgttactaccgcccacgctgggaactacacctgcagagggtctcatccacactcaccaaccggctggtcagcaccatccaatcccgtggttataatggtaactggcaaccataggaagccttctcttctcgcccaccctggacccttggtaaagtcaggcgagcgagtcattctgcagtgttggtccgatataatgtttgaacattttttcttacacaaagaaggaatatctaaggacccctctcgtctggtgggccaaatccatgatggggtcagcaaggccaacttcagtattggacctatgatgttggctctcgcagggacatatcgatgttacgggtctgtaacacacacaccatatcagctgagcgccccttcggatcctttagatatcgtcgtcaccggcccttacgagaagcccagcctaagtgcccaacctggtcccaaggttcaggccggtgagtccgttaccctctcgtgctcctcaaggtcatcatacgatatgtatcatttaagtagggaagggggcgcccatgaacggagactaccagccgttcggaaagtgaaccgcacctttcaggctgattttcccctgggacctgctacccacggcggaacataccgatgttttggcagctttcggcattctccctacgaatggagcgacccttctgaccccctgctagtgtctgtgaccggcaacccaagctcctcttggccctctcctactgaaccctcctccaagtccggcatttgccgacatctacacgtcctcattgggacatccgtcgttattttcttgttcatcctgttactgttctttttactctaccggtggtgtagtaataagaaaaatgccgccgtgatggaccaagaaccagccggggaccgaacagtgaataggcaggacagcgacgagcaggacccccaggaagtgacctatgcccagctggaccactgtgtgttcatccagcggaagattagccgtccgagtcaacgacccaagacgccccttaccgacacttctgtgtacacagagttgcccaatgcagagccccgatctaaggtggtgagttgtccacgggcaccgcaatccggtctcgaaggcgtgttctag

SEQ ID NO: 175439 - DNA, 1335 bp, Artificial Sequence
  derived and/or modified sequence
atgagtctgatggtggtcagcatggcctgcgttgggttgtttctggtccagcgcgcagggccgcatatgggcggacaggacaagccttttctgagcgcctggccgtcagcagtcgtgccaaggggaggccatgtgacccttaggtgtcactacagacatcgcttcaataacttcatgctgtataaggaggaccggatccacatcccaatattccatgggcgcatttttcaggagagcttcaatatgagcccggtcacgactgctcatgctgggaactacacttgccgagggtctcatccgcacagtcctactggatggtccgctccaagcaatccagttgtgattatggtgacaggaaatcacagaaagccaagtctgttagcccaccccggccccctggtaaaaagcggtgagcgcgttattctccagtgctggtcagatatcatgttcgagcactttttcttgcataaggaaggtatttcgaaggatccctcccggctagtcggacagatacatgacggagtcagcaaggcaaacttctcaatcggccctatgatgctggctcttgccggcacctatcggtgttatggctctgtgacccatactccataccagctctctgcgccgtcggacccccttgatatcgtggttacaggtccgtatgagaaaccatctctgagcgctcaacccgggcccaaagtgcaggccggcgagtccgtgacactgtcatgctcttcacgtagctcttatgacatgtatcacctatcaagagagggcggagctcatgaacggaggctgcctgccgtacgtaaggtaaaccggacattccaagcggatttcccactgggccctgcgacccatggaggcacctatagatgctttggtagtttcagacactccccctatgagtggtctgatccgtctgatcctctgcttgtaagtgtgacaggtaacccatcatcatcttggccctccccgacagagcccagctctaagagtggcaacccacgccatctccacatccttatcgggactagcgtggtgattatcctgttcatcttattactctttttcctgttgcatctgtggtgttcaaataaaaagaatgcggcggtgatggatcaggagccagctggcaatagaacggcaaacagtgaggactctgatgaacaggatccagaagaggtgacttacgcacagcttgaccattgcgtgtttacccaacgtaagatcacccggcctagccagagaccaaaaacccctccgactgatacaatcctgtacaccgagcttccaaacgccaagcctcgaagcaaagttgtgtcctgcccgtag

SEQ ID NO: 175440 - DNA, 1284 bp, Artificial Sequence
  derived and/or modified sequence
atgtctttgatggtcgtctcaatggcctgcgtcggtctgttcctggtgcaacgcgctggcccccatatgggaggtcaggacaaaccctttctgtccgcctggccatcagccgtggtgccccgcggcggacacgtcacgctgcggtgtcattaccgacaccgctttaacaatttcatgctgtacaaggaagataggatacatatccctatcttccacggtcgtatcttccaggaatctttcaacatgtcccccgtcaccacagctcacgcgggaaattacacgtgtagggggtcacatcctcattctcccaccgggtggagtgcccctagtaaccctgtcgtgattatggtaaccggcaaccatcggaagccatcattgctggcgcatccagggccactggtcaaaagtggggaacgtgtcattctccagtgttggtcagatataatgtttgagcattttttcttacacaaggaaggaatttcgaaagacccatccagactggtgggacagatacacgacggggtcagtaaagctaatttttctattggtccgatgatgctggcactggcgggaacgtaccgctgttacggaagtgtgacccacacaccctatcagctttcagccccaagcgaccccctggatatagtggtaaccggtccatatgagaagccgagcctatcagcacaacctggtccgaaggtgcaggctggcgagtctgtcaccctctcctgcagttccaggtctagctacgatatgtaccatttgagccgcgagggtggcgcccacgaacggagactgccggccgtaaggaaggtcaaccggactttccaggccgatttcccgcttggtcccgcgacacatggcgggacttatcggtgcttcggctcctttcgccactcaccttatgaatggagtgacccaagcgacccccttctcgtttccgtgaccggtaatcccaggcacctccacattctgataggcacttctgtagtgattattctgttcattctgcttctttttttcctgctgcatttatggtgtagtaacaagaaaaacgccgctgtgatggaccaggaaccagctggcaacagaacagcaaactcagaggactcagatgagcaggaccctgaagaggtcacctatgctcagttggaccactgtgttttcactcagaggaaaattacacgcccttcccagcgccctaaaactccaccaaccgacacaattctgtacactgagttgccgaacgcgaaaccacgctcaaaagtcgtgtcttgtccatag

SEQ ID NO: 175441 - DNA, 1857 bp, Artificial Sequence
  derived and/or modified sequence
tgtctgcaccggcagcaccatgtcgctcatggtcgtcagcatggcgtgtgttgggttgttcttggtccagagggccggtccacacatgggtggtcaggacaaacccttcctgtctgcctggcccagcgctgtggtgcctcgaggaggacacgtgactcttcggtgtcactatcgtcataggtttaacaatttcatgctatacaaagaagacagaatccacattcccatcttccatggcagaatattccaggagagcttcaacatgagccctgtgaccacagcacatgcagggaactacacatgtcggggttcacacccacactcccccactgggtggtcggcacccagcaaccccgtggtgatcatggtcacaggaaaccacagaaaaccttccctcctggcccacccaggtcccctggtgaaatcaggagagagagtcatcctgcaatgttggtcagatatcatgtttgagcacttctttctgcacaaagaggggatctctaaggacccctcacgcctcgttggacagatccatgatggggtctccaaggccaatttctccatcggtcccatgatgcttgcccttgcagggacctacagatgctacggttctgttactcacaccccctatcagttgtcagctcccagtgatcccctggacatcgtggtcacaggtccatatgagaaaccttctctctcagcccagccgggccccaaggttcaggcaggagagagcgtgaccttgtcctgtagctcccggagctcctatgacatgtaccatctatccagggaggggggagcccatgaacgtaggctccctgcagtgcgcaaggtcaacagaacattccaggcagatttccctctgggccctgccacccacggagggacctacagatgcttcggctctttccgtcactctccctacgagtggtcagacccgagtgacccactgcttgtttctgtcacaggaaacccttcaagtagttggccttcacccacagaaccaagctccaaatctggtaaccccagacacctgcacattctgattgggacctcagtggtcatcatcctcttcatcctcctcctcttctttctccttcatctctggtgctccaacaaaaaaaatgctgctgtaatggaccaagagcctgcagggaacagaacagccaacagcgaggactctgatgaacaagaccctgaggaggtgacatacgcacagttggatcactgcgttttcacacagagaaaaatcactcgcccttctcagaggcccaagacaccccctacagataccatcttgtacacggaacttccaaatgctaagcccagatccaaagttgtctcctgcccatgagcaccacagtcaggccttgaggacgtcttctagggagacaacagccctgtctcaaaaccgagttgccagctcccatgtaccagcagctggaatctgaaggcgtgagtcttcatcttagggcatcgctcctcctcacgccacaaatctggtgcctctctcttgcttacaaatgtctaggtccccactgcctgctggaaagaaaacacactcctttgcttagcccacagttctccatttcacttgacccctgcccacctctccaacctaactggcttacttcctagtctacttgaggctgcaatcacactgaggaactcacaattccaaacatacaagaggctccctcttgacgtggcacttacccacgtgctgttccaccttccctcatgctgtttcacctttcttcggactattttccagccttctgtcagcagtgaaacttataaaattttttgtgatttcaatgtagctgtctcctcttcaaataaacatgtctgccctca

SEQ ID NO: 175442 - DNA, 1564 bp, Artificial Sequence
  derived and/or modified sequence
ccggcagcaccatgtcgctcatggtcgtcagcatggcgtgtgttgggttgttcttggtccagagggccggtccacacatgggaaaccacagaaaaccttccctcctggcccacccaggtcccctggtgaaatcaggagagagagtcatcctgcaatgttggtcagatatcatgtttgagcacttctttctgcacaaagaggggatctctaaggacccctcacgcctcgttggacagatccatgatggggtctccaaggccaatttctccatcggtcccatgatgcttgcccttgcagggacctacagatgctacggttctgttactcacaccccctatcagttgtcagctcccagtgatcccctggacatcgtggtcacaggtccatatgagaaaccttctctctcagcccagccgggccccaaggttcaggcaggagagagcgtgaccttgtcctgtagctcccggagctcctatgacatgtaccatctatccagggaggggggagcccatgaacgtaggctccctgcagtgcgcaaggtcaacagaacattccaggcagatttccctctgggccctgccacccacggagggacctacagatgcttcggctctttccgtcactctccctacgagtggtcagacccgagtgacccactgcttgtttctgtcacaggaaacccttcaagtagttggccttcacccacagaaccaagctccaaatctggtaaccccagacacctgcacattctgattgggacctcagtggtcatcatcctcttcatcctcctcctcttctttctccttcatctctggtgctccaacaaaaaaaatgctgctgtaatggaccaagagcctgcagggaacagaacagccaacagcgaggactctgatgaacaagaccctgaggaggtgacatacgcacagttggatcactgcgttttcacacagagaaaaatcactcgcccttctcagaggcccaagacaccccctacagataccatcttgtacacggaacttccaaatgctaagcccagatccaaagttgtctcctgcccatgagcaccacagtcaggccttgaggacgtcttctagggagacaacagccctgtctcaaaaccgagttgccagctcccatgtaccagcagctggaatctgaaggcgtgagtcttcatcttagggcatcgctcctcctcacgccacaaatctggtgcctctctcttgcttacaaatgtctaggtccccactgcctgctggaaagaaaacacactcctttgcttagcccacagttctccatttcacttgacccctgcccacctctccaacctaactggcttacttcctagtctacttgaggctgcaatcacactgaggaactcacaattccaaacatacaagaggctccctcttgacgtggcacttacccacgtgctgttccaccttccctcatgctgtttcacctttcttcggactattttccagccttctgtcagcagtgaaacttataaaattttttgtgatttcaatgtagctgtctcctcttcaaataaacatgtctgccctca

SEQ ID NO: 175443 - DNA, 1871 bp, Artificial Sequence
  derived and/or modified sequence
ggggcgcagccgcctgtctgcaccggcagcaccatgtcgctcatggtcgtcagcatggcgtgtgttgggttgttcttggtccagagggccggtccacacatgggtggtcaggacaaacccttcctgtctgcctggcccagcgctgtggtgcctcgaggaggacacgtgactcttcggtgtcactatcgtcataggtttaacaatttcatgctatacaaagaagacagaatccacattcccatcttccatggcagaatattccaggagagcttcaacatgagccctgtgaccacagcacatgcagggaactacacatgtcggggttcacacccacactcccccactgggtggtcggcacccagcaaccccgtggtgatcatggtcacaggaaaccacagaaaaccttccctcctggcccacccaggtcccctggtgaaatcaggagagagagtcatcctgcaatgttggtcagatatcatgtttgagcacttctttctgcacaaagaggggatctctaaggacccctcacgcctcgttggacagatccatgatggggtctccaaggccaatttctccatcggtcccatgatgcttgcccttgcagggacctacagatgctacggttctgttactcacaccccctatcagttgtcagctcccagtgatcccctggacatcgtggtcacaggtccatatgagaaaccttctctctcagcccagccgggccccaaggttcaggcaggagagagcgtgaccttgtcctgtagctcccggagctcctatgacatgtaccatctatccagggaggggggagcccatgaacgtaggctccctgcagtgcgcaaggtcaacagaacattccaggcagatttccctctgggccctgccacccacggagggacctacagatgcttcggctctttccgtcactctccctacgagtggtcagacccgagtgacccactgcttgtttctgtcacaggaaacccttcaagtagttggccttcacccacagaaccaagctccaaatctggtaaccccagacacctgcacattctgattgggacctcagtggtcatcatcctcttcatcctcctcctcttctttctccttcatctctggtgctccaacaaaaaaaatgctgctgtaatggaccaagagcctgcagggaacagaacagccaacagcgaggactctgatgaacaagaccctgaggaggtgacatacgcacagttggatcactgcgttttcacacagagaaaaatcactcgcccttctcagaggcccaagacaccccctacagataccatcttgtacacggaacttccaaatgctaagcccagatccaaagttgtctcctgcccatgagcaccacagtcaggccttgaggacgtcttctagggagacaacagccctgtctcaaaaccgagttgccagctcccatgtaccagcagctggaatctgaaggcgtgagtcttcatcttagggcatcgctcctcctcacgccacaaatctggtgcctctctcttgcttacaaatgtctaggtccccactgcctgctggaaagaaaacacactcctttgcttagcccacagttctccatttcacttgacccctgcccacctctccaacctaactggcttacttcctagtctacttgaggctgcaatcacactgaggaactcacaattccaaacatacaagaggctccctcttgacgtggcacttacccacgtgctgttccaccttccctcatgctgtttcacctttcttcggactattttccagccttctgtcagcagtgaaacttataaaattttttgtgatttcaatgtagctgtctcctcttcaaataaacatgtctgccctca

SEQ ID NO: 175444 - DNA, 1663 bp, Artificial Sequence
  derived and/or modified sequence
ggggcgcagccgcctgtctgcaccggcagcaccatgtcgctcatggtcgtcagcatggcgtgtgttgggttgttcttggtccagagggccggtccacacatgggtggtcaggacaaacccttcctgtctgcctggcccagcgctgtggtgcctcgaggaggacacgtgactcttcggtgtcactatcgtcataggtttaacaatttcatgctatacaaagaagacagaatccacattcccatcttccatggcagaatattccaggagagcttcaacatgagccctgtgaccacagcacatgcagggaactacacatgtcggggttcacacccacactcccccactgggtggtcggcacccagcaaccccgtggtgatcatggtcacaggaaaccacagaaaaccttccctcctggcccacccaggtcccctggtgaaatcaggagagagagtcatcctgcaatgttggtcagatatcatgtttgagcacttctttctgcacaaagaggggatctctaaggacccctcacgcctcgttggacagatccatgatggggtctccaaggccaatttctccatcggtcccatgatgcttgcccttgcagggacctacagatgctacggttctgttactcacaccccctatcagttgtcagctcccagtgatcccctggacatcgtggtcacaggtccatatgagaaaccttctctctcagcccagccgggccccaaggttcaggcaggagagagcgtgaccttgtcctgtagctcccggagctcctatgacatgtaccatctatccagggaggggggagcccatgaacgtaggctccctgcagtgcgcaaggtcaacagaacattccaggcagatttccctctgggccctgccacccacggagggacctacagatgcttcggctctttccgtcactctccctacgagtggtcagacccgagtgacccactgcttgtttctgtcacaggaaacccttcaagtagttggccttcacccacagaaccaagctccaaatctggtatctgcagacacctgcatgttctgattgggacctcagtggtcatcttcctcttcatcctcctcctcttctttctcctttatcgctggtgctccaacaaaaagaatgctgctgtaatggaccaagagcctgcgggggacagaacagtgaataggcaggactctgatgaacaagaccctcaggaggtgacgtacgcacagttggatcactgcgttttcatacagagaaaaatcagtcgcccttctcagaggcccaagacacccctaacagataccagcgtgtacacggaacttccaaatgctgagcccagatccaaagttgtctcctgcccacgagcaccacagtcaggtcttgagggggttttctagggagacaacagccctgtctcaaaaccaggttgccagatccaatgaaccagcagctggaatctgaaggcatcagtctgcatcttaggggatcgctcttcctcacaccacgaatctgaacatgcctctctcttgcttacaaatgcctaaggtcgccactgcctgctgcagagaaaacacactcctttgcttagcccacaagtatctatttcacttgacccctgcccacctctccaacctaactggcttacttcctagtcctact

SEQ ID NO: 175445 - DNA, 1864 bp, Artificial Sequence
  derived and/or modified sequence
cagccgcctgtctgcaccggcagcaccatgtcgctcatggtcgtcagcatggcgtgtgttgggttgttcttggtccagagggccggtccacacatgggtggtcaggacaaacccttcctgtctgcctggcccagcgctgtggtgcctcgaggaggacacgtgactcttcggtgtcactatcgtcataggtttaacaatttcatgctatacaaagaagacagaatccacattcccatcttccatggcagaatattccaggagagcttcaacatgagccctgtgaccacagcacatgcagggaactacacatgtcggggttcacacccacactcccccactgggtggtcggcacccagcaaccccgtggtgatcatggtcacaggaaaccacagaaaaccttccctcctggcccacccaggtcccctggtgaaatcaggagagagagtcatcctgcaatgttggtcagatatcatgtttgagcacttctttctgcacaaagaggggatctctaaggacccctcacgcctcgttggacagatccatgatggggtctccaaggccaatttctccatcggtcccatgatgcttgcccttgcagggacctacagatgctacggttctgttactcacaccccctatcagttgtcagctcccagtgatcccctggacatcgtggtcacaggtccatatgagaaaccttctctctcagcccagccgggccccaaggttcaggcaggagagagcgtgaccttgtcctgtagctcccggagctcctatgacatgtaccatctatccagggaggggggagcccatgaacgtaggctccctgcagtgcgcaaggtcaacagaacattccaggcagatttccctctgggccctgccacccacggagggacctacagatgcttcggctctttccgtcactctccctacgagtggtcagacccgagtgacccactgcttgtttctgtcacaggaaacccttcaagtagttggccttcacccacagaaccaagctccaaatctggtaaccccagacacctgcacattctgattgggacctcagtggtcatcatcctcttcatcctcctcctcttctttctccttcatctctggtgctccaacaaaaaaaatgctgctgtaatggaccaagagcctgcagggaacagaacagccaacagcgaggactctgatgaacaagaccctgaggaggtgacatacgcacagttggatcactgcgttttcacacagagaaaaatcactcgcccttctcagaggcccaagacaccccctacagataccatcttgtacacggaacttccaaatgctaagcccagatccaaagttgtctcctgcccatgagcaccacagtcaggccttgaggacgtcttctagggagacaacagccctgtctcaaaaccgagttgccagctcccatgtaccagcagctggaatctgaaggcgtgagtcttcatcttagggcatcgctcctcctcacgccacaaatctggtgcctctctcttgcttacaaatgtctaggtccccactgcctgctggaaagaaaacacactcctttgcttagcccacagttctccatttcacttgacccctgcccacctctccaacctaactggcttacttcctagtctacttgaggctgcaatcacactgaggaactcacaattccaaacatacaagaggctccctcttgacgtggcacttacccacgtgctgttccaccttccctcatgctgtttcacctttcttcggactattttccagccttctgtcagcagtgaaacttataaaattttttgtgatttcaatgtagctgtctcctcttcaaataaacatgtctgccctc

SEQ ID NO: 175446 - DNA, 1810 bp, Artificial Sequence
  derived and/or modified sequence
ccgcctgtctgcaccggcagcaccatgtcgctcatggtcgtcagcatggcgtgtgttgggttgttcttggtccagagggccggtccacacatgggtggtcaggacaaacccttcctgtctgcctggcccagcgctgtggtgcctcgaggaggacacgtgactcttcggtgtcactatcgtcataggtttaacaatttcatgctatacaaagaagacagaatccacattcccatcttccatggcagaatattccaggagagcttcaacatgagccctgtgaccacagcacatgcagggaactacacatgtcggggttcacacccacactcccccactgggtggtcggcacccagcaaccccgtggtgatcatggtcacaggaaaccacagaaaaccttccctcctggcccacccaggtcccctggtgaaatcaggagagagagtcatcctgcaatgttggtcagatatcatgtttgagcacttctttctgcacaaagaggggatctctaaggacccctcacgcctcgttggacagatccatgatggggtctccaaggccaatttctccatcggtcccatgatgcttgcccttgcagggacctacagatgctacggttctgttactcacaccccctatcagttgtcagctcccagtgatcccctggacatcgtggtcacaggtccatatgagaaaccttctctctcagcccagccgggccccaaggttcaggcaggagagagcgtgaccttgtcctgtagctcccggagctcctatgacatgtaccatctatccagggaggggggagcccatgaacgtaggctccctgcagtgcgcaaggtcaacagaacattccaggcagatttccctctgggccctgccacccacggagggacctacagatgcttcggctctttccgtcactctccctacgagtggtcagacccgagtgacccactgcttgtttctgtcacaggtaaccccagacacctgcacattctgattgggacctcagtggtcatcatcctcttcatcctcctcctcttctttctccttcatctctggtgctccaacaaaaaaaatgctgctgtaatggaccaagagcctgcagggaacagaacagccaacagcgaggactctgatgaacaagaccctgaggaggtgacatacgcacagttggatcactgcgttttcacacagagaaaaatcactcgcccttctcagaggcccaagacaccccctacagataccatcttgtacacggaacttccaaatgctaagcccagatccaaagttgtctcctgcccatgagcaccacagtcaggccttgaggacgtcttctagggagacaacagccctgtctcaaaaccgagttgccagctcccatgtaccagcagctggaatctgaaggcgtgagtcttcatcttagggcatcgctcctcctcacgccacaaatctggtgcctctctcttgcttacaaatgtctaggtccccactgcctgctggaaagaaaacacactcctttgcttagcccacagttctccatttcacttgacccctgcccacctctccaacctaactggcttacttcctagtctacttgaggctgcaatcacactgaggaactcacaattccaaacatacaagaggctccctcttgacgtggcacttacccacgtgctgttccaccttccctcatgctgtttcacctttcttcggactattttccagccttctgtcagcagtgaaacttataaaattttttgtgatttcaatgtagctgtctcctcttcaaataaacatgtctgccctc

SEQ ID NO: 175447 - DNA, 1269 bp, Artificial Sequence
  derived and/or modified sequence
atgggcggccaggacaagcccttcctgagcgcctggcccagcgctgtggtgccccggggcggccacgtgaccctgcgctgccactaccgccaccgcttcaacaacttcatgctgtacaaggaggaccgcatccacatccccatcttccacggccgcatcttccaggagagcttcaacatgagccctgtgaccacagcccacgccggcaactacacctgccggggcagccacccccacagccccaccggctggagcgcccccagcaaccctgtggtgatcatggtgacaggcaaccacaggaagcccagcctgctggcccaccctggccccctggtgaagagcggggagagggtcatcctgcagtgctggagcgacatcatgtttgagcacttcttcctgcacaaggagggcatcagcaaggaccccagccggctggtgggccagatccatgatggagtgtccaaggccaacttcagcatcggccccatgatgctggccctggccggcacctaccgctgctacggctctgtgacccacaccccctaccagctgagcgcccccagcgaccccctggacatcgtggtgacaggcccctatgagaagcccagcctgagcgcccagcccggccccaaggtgcaggccggggagagcgtgaccctgagctgcagcagccgcagcagctatgacatgtaccacctgagccgggagggcggggcccacgagcggcggctgcctgctgtgaggaaggtgaacagaaccttccaggccgacttccccctgggccctgccacccatggaggcacctaccgctgcttcggcagcttccgccacagcccctatgagtggagcgaccccagcgaccccctgctggtgtctgtgacaggcaaccccagcagctcctggcccagccccacagagcccagcagcaagagcggcaaccccaggcacctgcacatcctgattggcacctctgtggtgatcatcctcttcatcctgctgctcttcttcctgctgcacctgtggtgcagcaacaagaagaatgctgctgtgatggaccaggagcccgccggcaacagaacagccaacagcgaggacagtgatgagcaggaccctgaggaggtgacctacgcccagctggaccactgtgtgttcacccagaggaagatcacccggcccagccagaggcccaagaccccacccacagacaccatcctgtacacagagctgcccaatgccaagcccaggagcaaggtggtgtcctgcccctag

SEQ ID NO: 175448 - DNA, 1050 bp, Artificial Sequence
  derived and/or modified sequence
atgagcctgatggtggtgtccatggcctgtgtgggcctcttcctggtgcagagagctggcccccacatgggcaaccacaggaagcccagcctgctggcccaccctggccccctggtgaagtctggagagagggtcatcctgcagtgctggagcgacatcatgtttgagcacttcttcctgcacaaggagggcatcagcaaggaccccagccggctggtgggccagatccatgatggagtgtccaaggccaacttcagcatcggccccatgatgctggccctggccggcacctaccgctgctacggctctgtgacccacaccccctaccagctgagcgcccccagcgaccccctggacatcgtggtgacaggcccctatgagaagcccagcctgagcgcccagcccggccccaaggtgcaggccggggagagcgtgaccctgagctgcagcagccgcagcagctatgacatgtaccacctgagccgggagggcggggcccatgaaagaaggctgcctgctgtgaggaaggtgaacagaaccttccaggccgacttccccctgggccctgccacccacggcggcacctaccgctgcttcggcagcttccgccacagcccctatgagtggagcgaccccagcgaccccctgctggtgtctgtgactggaaaccccagcagctcctggcccagccccacagagcccagcagcaagagcggcaaccccaggcacctgcacatcctgattggcacctctgtggtgatcatcctcttcatcctgctgctcttcttcctgctgcacctgtggtgcagcaacaagaagaatgctgctgtgatggaccaggagcctgctggcaacagaacagccaacagtgaagattctgatgagcaggaccctgaggaggtgacctacgcccagctggaccactgtgtgttcacccagaggaagatcacccggcccagccagaggcccaagaccccacccacagacaccatcctgtacacagagctgcccaatgccaagcccaggagcaaggtggtgtcctgcccctag

SEQ ID NO: 175449 - DNA, 1335 bp, Artificial Sequence
  derived and/or modified sequence
atgagcctgatggtggtgtccatggcctgtgtgggcctcttcctggtgcagagagctggcccccacatgggcggccaggacaagcccttcctgagcgcctggcccagcgctgtggtgccccggggcggccacgtgaccctgcgctgccactaccgccaccgcttcaacaacttcatgctgtacaaggaggaccgcatccacatccccatcttccacggccgcatcttccaggagagcttcaacatgagccctgtgaccacagcccacgccggcaactacacctgccggggcagccacccccacagccccaccggctggagcgcccccagcaaccctgtggtgatcatggtgacaggcaaccacaggaagcccagcctgctggcccaccctggccccctggtgaagagcggggagagggtcatcctgcagtgctggagcgacatcatgtttgagcacttcttcctgcacaaggagggcatcagcaaggaccccagccggctggtgggccagatccatgatggagtgtccaaggccaacttcagcatcggccccatgatgctggccctggccggcacctaccgctgctacggctctgtgacccacaccccctaccagctgagcgcccccagcgaccccctggacatcgtggtgacaggcccctatgagaagcccagcctgagcgcccagcccggccccaaggtgcaggccggggagagcgtgaccctgagctgcagcagccgcagcagctatgacatgtaccacctgagccgggagggcggggcccacgagcggcggctgcctgctgtgaggaaggtgaacagaaccttccaggccgacttccccctgggccctgccacccatggaggcacctaccgctgcttcggcagcttccgccacagcccctatgagtggagcgaccccagcgaccccctgctggtgtctgtgacaggcaaccccagcagctcctggcccagccccacagagcccagcagcaagagcggcaaccccaggcacctgcacatcctgattggcacctctgtggtgatcatcctcttcatcctgctgctcttcttcctgctgcacctgtggtgcagcaacaagaagaatgctgctgtgatggaccaggagcccgccggcaacagaacagccaacagcgaggacagtgatgagcaggaccctgaggaggtgacctacgcccagctggaccactgtgtgttcacccagaggaagatcacccggcccagccagaggcccaagaccccacccacagacaccatcctgtacacagagctgcccaatgccaagcccaggagcaaggtggtgtcctgcccctag

SEQ ID NO: 175450 - DNA, 1368 bp, Artificial Sequence
  derived and/or modified sequence
atgagcctgatggtggtgtccatggcctgtgtgggcctcttcctggtgcagagagctggcccccacatgggcggccaggacaagcccttcctgagcgcctggcccagcgctgtggtgccccggggcggccacgtgaccctgcgctgccactaccgccaccgcttcaacaacttcatgctgtacaaggaggaccgcatccacatccccatcttccacggccgcatcttccaggagagcttcaacatgagccctgtgaccacagcccacgccggcaactacacctgccggggcagccacccccacagccccaccggctggagcgcccccagcaaccctgtggtgatcatggtgacaggcaaccacaggaagcccagcctgctggcccaccctggccccctggtgaagagcggggagagggtcatcctgcagtgctggagcgacatcatgtttgagcacttcttcctgcacaaggagggcatcagcaaggaccccagccggctggtgggccagatccatgatggagtgtccaaggccaacttcagcatcggccccatgatgctggccctggccggcacctaccgctgctacggctctgtgacccacaccccctaccagctgagcgcccccagcgaccccctggacatcgtggtgacaggcccctatgagaagcccagcctgagcgcccagcccggccccaaggtgcaggccggggagagcgtgaccctgagctgcagcagccgcagcagctatgacatgtaccacctgagccgggagggcggggcccacgagcggcggctgcctgctgtgaggaaggtgaacagaaccttccaggccgacttccccctgggccctgccacccatggaggcacctaccgctgcttcggcagcttccgccacagcccctatgagtggagcgaccccagcgaccccctgctggtgtctgtgacaggcaaccccagcagctcctggcccagccccacagagcccagcagcaagagcggcatctgccgccacctgcacgtgctgattggcacctctgtggtgatcttcctgttcatcctgctgctcttcttcctgctgtaccgctggtgcagcaacaagaagaatgctgctgtgatggaccaggagcctgctggggacagaacagtgaaccggcaggacagtgatgagcaggacccccaggaggtgacctacgcccagctggaccactgtgtgttcatccagaggaagatcagccggcccagccagaggcccaagacccccctgacagacacctctgtgtacacagagctgcccaatgctgagcccaggagcaaggtggtgtcctgcccccgggccccccagagcggcctggagggcgtcttctag

SEQ ID NO: 175451 - DNA, 1284 bp, Artificial Sequence
  derived and/or modified sequence
atgagcctgatggtggtgtccatggcctgtgtgggcctcttcctggtgcagagagctggcccccacatgggcggccaggacaagcccttcctgagcgcctggcccagcgctgtggtgccccggggcggccacgtgaccctgcgctgccactaccgccaccgcttcaacaacttcatgctgtacaaggaggaccgcatccacatccccatcttccacggccgcatcttccaggagagcttcaacatgagccctgtgaccacagcccacgccggcaactacacctgccggggcagccacccccacagccccaccggctggagcgcccccagcaaccctgtggtgatcatggtgacaggcaaccacaggaagcccagcctgctggcccaccctggccccctggtgaagagcggggagagggtcatcctgcagtgctggagcgacatcatgtttgagcacttcttcctgcacaaggagggcatcagcaaggaccccagccggctggtgggccagatccatgatggagtgtccaaggccaacttcagcatcggccccatgatgctggccctggccggcacctaccgctgctacggctctgtgacccacaccccctaccagctgagcgcccccagcgaccccctggacatcgtggtgacaggcccctatgagaagcccagcctgagcgcccagcccggccccaaggtgcaggccggggagagcgtgaccctgagctgcagcagccgcagcagctatgacatgtaccacctgagccgggagggcggggcccacgagcggcggctgcctgctgtgaggaaggtgaacagaaccttccaggccgacttccccctgggccctgccacccatggaggcacctaccgctgcttcggcagcttccgccacagcccctatgagtggagcgaccccagcgaccccctgctggtgtctgtgacaggcaaccccaggcacctgcacatcctgattggcacctctgtggtgatcatcctcttcatcctgctgctcttcttcctgctgcacctgtggtgcagcaacaagaagaatgctgctgtgatggaccaggagcctgctggcaacagaacagccaacagtgaagattctgatgagcaggaccctgaggaggtgacctacgcccagctggaccactgtgtgttcacccagaggaagatcacccggcccagccagaggcccaagaccccacccacagacaccatcctgtacacagagctgcccaatgccaagcccaggagcaaggtggtgtcctgcccctag

SEQ ID NO: 175452 - DNA, 1269 bp, Artificial Sequence
  derived and/or modified sequence
atgggcggccaggacaagcccttcctgagcgcctggcccagcgccgtggtgccccgcggcggtcacgtaacgctgagatgtcactatcgccacaggttcaacaacttcatgctctacaaagaggatagaatacacatccccatcttccacggccgcatatttcaggaatcattcaatatgagccctgtcacaacagctcatgctgggaactacacatgccgcggctcacatccgcacagtcccactgggtggtccgctccctcaaaccctgtggtgattatggtcaccggcaatcaccggaaacctagtctgctggcgcacccagggcctcttgttaagtcaggcgagcgagtaattctccagtgctggagcgacatcatgttcgaacattttttcttgcacaaagaagggatatcaaaagatccgagccggctagttgggcagattcacgacggcgtgtccaaagcaaactttagcataggtcctatgatgctcgcactggctgggacttaccggtgctacggatcagtgacccataccccatatcagcttagcgctccaagtgatccccttgacatcgtagtcactgggccttatgagaaaccttctctatccgcacaacctgggcctaaggttcaagcaggcgagtcagtgacactcagctgctccagtcgtagttcgtatgacatgtaccacctgtcaagggaaggcggcgctcatgaacgtcggctgccagctgtgcgtaaagtgaaccgaacattccaggcagacttcccattggggccagctacgcatggcggcacgtaccggtgttttggctcattcaggcattctccctacgagtggtccgatccctccgatccgctgctggtgagcgttacaggaaacccgagctccagctggccaagcccgactgagccctcatctaagtcagggaatccccgtcacttgcacatcttaatcggaacatctgtggtgattatcttatttatcttgcttctcttttttctgcttcatctttggtgtagcaacaaaaagaacgccgccgtcatggatcaggagccggcaggtaatcgaacggccaactccgaagacagtgacgagcaggacccggaggaagtgacctacgctcagttggaccactgcgtgttcacccaaaggaagatcacacggccgtcccagcgtcccaaaactcctcccacagatactattctttacaccgagcttcccaatgcgaaacctcgttctaaagtggtatcatgtccctag

SEQ ID NO: 175453 - DNA, 1050 bp, Artificial Sequence
  derived and/or modified sequence
atgagcctgatggtggtgagcatggcctgcgtgggcctgttcctggtgcagagagccggaccccacatggggaatcaccgcaaaccgtcactactggcccatcccggacccttagttaagtccggcgaacgcgtcatcctacaatgctggtctgatatcatgtttgagcacttttttctgcataaagaggggattagcaaagacccgtctcgtttggtgggacaaatccacgacggcgtgagcaaggccaacttttcaatcggtcctatgatgctggccttagccgggacctacaggtgttacggatctgtgacccatactccttatcagctatccgctccctctgaccccctggatatcgtagtgaccgggccatacgaaaaaccgagcctgtccgcgcagccaggccccaaagtgcaagccggggagtccgttactctcagctgctcaagccgctccagttatgatatgtatcacctgagccgagagggcggggcccatgagaggcggctgcctgcggtcagaaaggtgaatcgaacatttcaggccgatttccctctcggtccagccacccatggaggcacctatcgttgtttcggaagttttagacacagcccctatgaatggagcgacccatctgaccccctcctcgtctctgtgaccggcaacccttcctctagttggccttcacccaccgagccatccagtaagagcggaaaccccagacatcttcatatcctaatcgggacttccgtcgtgatcattctattcattctgctcctgttcttcctcctccacctgtggtgctccaataagaaaaacgcagcagtgatggatcaagaaccagcaggaaatcgcaccgctaattcggaggattcggatgagcaagaccctgaagaggtgacctatgctcaactggaccattgtgtgttcacacagagaaaaataaccagaccctcacaacgccccaaaacacctccaacagatacaatcctatacacagaactccctaacgctaaaccccggtctaaagtggtctcatgcccgtag

SEQ ID NO: 175454 - DNA, 1335 bp, Artificial Sequence
  derived and/or modified sequence
atgagcctgatggtggtgagcatggcctgcgtgggcctgttcctggtccagcgggccgggccacacatgggaggccaggataaaccctttttgtcggcctggccttctgcagtggtcccacgggggggacacgtcaccctgcggtgccactacagacaccgatttaataacttcatgctgtacaaggaggaccggatacacatacccatctttcatggaagaatctttcaggagtcattcaatatgagcccagtgacgacagcccacgcaggaaactatacttgtcggggctcacatccgcattctcccaccggatggagtgctccctcaaaccccgtcgtgatcatggtgactggcaatcatcgtaaacctagcctgctggcacatcccggacctttggtcaaatctggagaacgggtcatacttcagtgttggagcgatatcatgttcgagcattttttcttgcacaaggagggcatttccaaagatccttcgcgcctggtgggccaaatccatgacggcgtcagtaaagcgaatttcagtattggtcctatgatgctggccctggctggcacttaccggtgctatgggagtgttacccataccccttatcaattgagcgcaccaagcgatcccctggacatcgtggttactgggccatatgagaagcccagcctgagcgctcagccaggccccaaagtgcaagccggggaatctgtgaccctctcatgttcctctcgttccagctacgacatgtaccacctcagcagagaagggggagcccatgagaggcgcctgcctgcagtgaggaaggtaaacaggacctttcaggccgactttccgctgggacccgccacgcacgggggaacctacaggtgctttggtagttttaggcattcaccctacgagtggagcgatccttccgacccactactcgtctcggtcactggaaacccgagttcttcttggccttcccccacagagccctcctctaaaagcgggaatccacgccatttacatatcctcatcggcacctccgttgttattattctgtttattctcttattgttttttctgctgcacctgtggtgctccaacaagaagaacgctgcagtaatggaccaggagcccgctggtaacaggacggcgaattcagaagacagcgatgaacaggatcccgaagaggtgacttatgcccagctcgatcactgtgtttttacccagaggaagattacccgcccctcacaaaggccaaagacaccacccacagatactattttatacaccgagctgcctaacgccaaaccgcggtcaaaggttgtctcctgtccgtag

SEQ ID NO: 175455 - DNA, 1368 bp, Artificial Sequence
  derived and/or modified sequence
atgagcctgatggtggtgagcatggcctgcgtgggcctgttcctggtgcagcgtgctgggccacacatgggaggacaggataagcccttcctatctgcctggccttcagccgtcgtgccgcggggcggccacgtgaccttgaggtgtcattataggcacaggtttaacaattttatgctgtataaggaagatagaatccacattcccatctttcacgggagaatctttcaggaatctttcaatatgtcccccgttacaaccgcccatgccggcaactacacatgcagagggtcacacccccattccccaaccggttggagtgcacctagcaaccctgtggtcataatggtgactggcaatcaccgcaaacctagcttgcttgcccatccgggccctctggtcaagtcaggggaacgcgttatcttacagtgctggagtgacattatgtttgaacactttttcctgcataaagagggaatttctaaagatccgtctcgtctagtgggccaaattcacgatggagtgtccaaagccaatttttcaatcggccctatgatgctcgcactcgctggaacttatcgctgctatgggtccgtcacccatactccctatcagctgagcgctccatctgacccattggacatcgtagtaaccggaccctacgagaagccgtctctatccgcccagcctggccccaaagtccaagccggagagtcagtgaccctgtcttgctcgagcagatcaagttacgacatgtaccatctcagtcgcgagggcggagcccacgagcgtcgcctgcccgccgtaagaaaagttaataggacattccaggctgactttccactggggccggcgacccacgggggtacctaccggtgttttggtagtttcagacatagtccctacgagtggagtgacccttcagaccctctcttggtgtcagtgaccggaaacccaagttctagctggccatctccgacagagccctcatcgaaatcaggaatctgccgccaccttcatgtcctgataggcacgtccgtagtgatcttcctctttatacttttactcttttttcttctctatcggtggtgtagcaacaaaaagaacgcagccgtaatggatcaagagcctgcaggggaccggacagtcaaccgacaagactcagatgaacaggatccacaagaggtgacctacgcacagcttgatcattgtgtcttcatacagagaaaaattagtcggccatctcagagacctaaaacaccccttacggatacatccgtgtacaccgaattgcctaatgccgagccccgctctaaggttgttagctgccctagggcccctcagtcgggcctggagggagtcttctag

SEQ ID NO: 175456 - DNA, 1335 bp, Artificial Sequence
  derived and/or modified sequence
atgagcctgatggtggtgagcatggcctgcgtgggcctgttcctggttcagcgggccggccctcacatgggcgggcaggacaagcccttcctctccgcctggccgtccgcagtcgtaccgcggggagggcacgtcactctgagatgccactatcgccataggtttaataattttatgctgtataaagaagatagaatccatattcccatattccacgggagaattttccaagagtcatttaatatgagcccagttacgactgcccacgcaggcaactatacctgccgggggtcacatccccatagcccaaccggttggtctgctcccagcaaccctgtggtgattatggttacgggtaaccatagaaagccttcccttctggcccatccggggccactggtgaagtctggggagcgtgtgatactgcagtgttggagcgacataatgttcgagcatttcttccttcacaaagaaggaatcagtaaagatccatcaaggctggtgggacaaatccatgacggtgtctccaaagcaaacttttctatcggacctatgatgctcgctctggctggcacctaccggtgctatggaagcgtaacacatactccctaccagctcagcgcccctagtgatcctcttgacatcgtggtcacgggcccctatgaaaagccttctctcagcgcgcagcccggtcccaaagtgcaagcgggggagtcagttaccctgtcctgttcatcgcgcagttcctacgacatgtatcacctttcaagggagggaggcgcccatgagcggcggctacccgccgttcgaaaagtcaataggacttttcaggccgactttcctctggggccagccacccacggagggacttacaggtgctttggctcttttcgtcactctccctacgaatggtcggacccttctgatcccctgctggtgtcagtgactgggaatccaagttcttcttggccctcgccaacggaaccttcctctaaaagcggtaacccgagacacctccacatactgataggcaccagcgttgtgattatcctattcattctccttctgttcttcctgctgcacctttggtgttctaataagaaaaacgcagctgtcatggatcaggagcccgcgggtaaccggacagccaatagcgaggactccgatgagcaggaccctgaggaagttacctatgcgcaattagaccattgcgtatttacacagaggaaaataacaagaccaagccaacggccaaaaacaccacccaccgatacaatcctgtacacagaactgccaaatgccaagccccgaagtaaggtcgtgtcctgcccgtag

SEQ ID NO: 175457 - DNA, 1284 bp, Artificial Sequence
  derived and/or modified sequence
atgagcctgatggtggtgagcatggcctgcgtgggcctgttcctggtgcagcgtgctgggccacatatgggtggccaagataagccttttcttagcgcctggcccagtgccgtggtgccccgtggaggccacgtgacgttgcggtgccattacaggcacagatttaataacttcatgctctataaagaagacagaattcatatacccattttccacggacgcatttttcaggagtcattcaacatgagtcctgttacgactgctcatgctggtaattacacatgccggggttcgcatccccacagcccaaccggatggagtgccccaagtaatccagtcgtcatcatggtgacaggtaatcaccgaaagccctccttgttggcgcaccccgggcccctggtgaagtccggggagagagtaattttacagtgctggtcggatataatgtttgagcactttttcctgcacaaagaggggatcagtaaggacccctctagactcgtggggcagatccatgatggagtgtccaaggctaatttttcaatagggcccatgatgcttgctctcgctggcacgtaccggtgttacggaagtgtcacacacacgccctaccagctttcggcgccctctgacccattagatatcgtagttacagggccttatgaaaagccaagtctctccgcacaacctggcccgaaggtccaggcaggcgaatccgtcacactctcatgctcctcccgcagctcctatgacatgtaccatctgagtagagaaggaggcgcccacgaacgtagactcccagctgtgcgtaaagtgaaccgaaccttccaagcggacttccccctggggcctgctacacatgggggcacctacagatgttttggttcattcaggcactctccttatgagtggtcagatccttccgacccgctgctggttagcgtgactggcaaccctcgccaccttcatatcctgatagggacgtccgtagtcatcatcctgttcatcctgctcctgtttttcctcctccatttgtggtgtagtaataaaaagaatgccgccgtgatggatcaggagcccgccggtaacaggacggcgaactccgaagatagtgacgagcaggatccagaggaagtcacctacgcccagctggaccactgtgtgtttacccagcgcaagatcacacgtccatctcagaggcccaagacacctcctacagacacaattctgtacactgaactgccgaatgccaaaccgcgatccaaagtagttagctgcccttag

SEQ ID NO: 175458 - DNA, 1269 bp, Artificial Sequence
  derived and/or modified sequence
atggggggtcaggataaacccttcctgtcggcttggccttctgcggttgtacctcgaggtggccacgtgactttgaggtgccattaccgacatcggtttaacaattttatgctgtataaagaggatagaattcatatcccgatctttcacggccgaattttccaggagtctttcaatatgagccctgtcacaactgctcatgctgggaattatacctgcaggggctcacatccgcactcccccacaggctggtctgcaccttctaaccctgtcgtgattatggtgaccgggaatcaccggaagccctccctgctggctcatccagggccactggtgaagtcaggggaaagagtaatcctgcagtgctggagcgatattatgttcgaacattttttcctgcataaagagggaattagtaaggatccatctaggctggtgggccagatccacgatggggtcagtaaggccaacttcagtatcgggcctatgatgctggccctggctggcacctaccggtgttacgggagcgtgacacataccccataccaactcagcgccccttcagaccccttagatatcgtcgtgactggaccatacgagaagccatcgcttagcgcacagccgggacccaaggttcaggccggagaatcagtcaccctctcctgttctagccgaagttcctacgacatgtaccatctgagcagggaaggaggtgcccacgaaaggaggctccctgcagtgaggaaagtcaatcgaactttccaagctgacttcccactcggcccagccacccacgggggaacttaccgatgtttcgggtcatttaggcatagtccctatgagtggtcagatccttcagaccccctcctggtgagcgtcacggggaatccctccagctcgtggccctccccgacagagccatcttctaagagtgggaacccgcgtcacctgcacattcttattggcacatcagtggttataatcctctttattctgttgctttttttcctcctgcacttgtggtgcagcaacaagaagaatgccgctgtgatggatcaggagccggctggcaataggacggctaatagcgaggactctgatgaacaggacccggaggaggtcacgtatgcgcagctcgatcattgcgtctttacacagaggaaaattacgcgcccttcccagcggccaaaaacaccaccaaccgacacgattctttacacagaactgcctaacgccaagcccagaagcaaggtggtgtcttgtccatag

SEQ ID NO: 175459 - DNA, 1050 bp, Artificial Sequence
  derived and/or modified sequence
atgtcacttatggtagtgagcatggcgtgcgtgggactgtttctcgtgcagagggccggtcctcacatgggaaatcatcgcaagccaagccttctggcacaccccggtcctcttgtcaaatcaggtgagagggtcatcctgcagtgctggtcggacatcatgtttgagcactttttcctgcataaggaaggtatcagcaaggaccccagccggctggtgggacagattcatgacggcgtcagtaaggcgaattttagcataggaccaatgatgctcgctctcgcaggcacataccggtgttatggttctgtcactcataccccgtaccagctctccgctcctagcgatccactagacatagtcgttacggggccatatgagaaaccttcactctccgcccagcctggcccaaaagtacaggctggagagtctgtgacgttgtcttgtagttcgcggtccagttacgatatgtaccatctgtccagggaaggaggagcacacgagcgacgcttgcccgcagtcaggaaggtgaatcggacttttcaggccgattttcctcttggaccggcaacgcatggaggaacctatcggtgctttggttccttcagacacagtccttacgaatggtcggatccaagcgacccactcctcgtgtccgtcacgggcaatcccagcagctcttggccaagcccaacagagccatcctctaagtctggcaatccacgacatctccacattctcatcggcacatccgtggtgatcatcctgttcatactactcctcttcttcttgttgcacctgtggtgctctaataaaaaaaacgccgcagttatggatcaggaaccagctgggaacagaacggccaattctgaggactcggacgagcaggatccagaggaggtgacgtatgcgcagctggatcactgtgtgtttactcaacgtaaaattacccgcccttcccagcgtcccaagactcccccaacagacacaattctgtataccgaactgccaaatgcaaagccgagatctaaagtggtttcatgtccatag

SEQ ID NO: 175460 - DNA, 1335 bp, Artificial Sequence
  derived and/or modified sequence
atgtccttgatggtggtttcgatggcttgcgttggactgtttttagtacaacgggctggaccgcacatgggaggacaggataagcccttcctgtccgcgtggccttctgcggtcgtacccagggggggacacgtcacactgagatgtcattatagacaccgctttaataacttcatgctgtataaagaggatcgcatacacatccctattttccatggcagaatatttcaggaatccttcaacatgtctcctgtgacgactgcccacgcaggcaactacacttgccgaggaagccacccccactcacccacaggctggagtgcgcctagtaacccggttgtgatcatggtaactggcaaccaccgcaagccatctctgctggctcacccaggtcccctcgtgaaaagtggggagagagtgatactgcagtgttggtcagacatcatgtttgagcacttttttctgcacaaggagggaattagcaaagacccatcaaggttggtaggacagatccacgacggggtctccaaggcgaattttagtattggcccaatgatgcttgctttggcagggacctacagatgttatggctctgttacccacaccccctaccaactgtctgctcccagcgaccctctggacatagtcgtgaccgggccatacgagaaaccctcgctctcagcacaacctggaccgaaagtccaggccggagagagtgtcacgctgagttgtagctctcgcagcagttatgacatgtaccacttgtcaagagaagggggtgctcatgaacgcagactacccgcagtacgcaaagtcaatagaacattccaggctgacttccccctaggacctgctactcatggcggtacttatcgctgttttggatcctttaggcactctccatacgagtggagcgaccctagcgacccgctgttggtgagtgtgacaggcaatcccagctcatcttggcccagtcctaccgaaccaagctctaagtctggcaacccaaggcatctgcatattcttattggtacaagtgtggtcattatactatttattcttttactgttttttctgctgcacttgtggtgctctaataagaagaacgcagctgtcatggatcaggagcccgcagggaataggacagccaacagcgaggattctgatgagcaggatccagaggaggtgacgtatgcccaactcgaccactgtgttttcacgcagcgcaagattacaagaccatcccagagacctaagacaccacctaccgacaccattctatataccgagttacccaacgcgaaacctcggtccaaggtggtcagctgtccgtag

SEQ ID NO: 175461 - DNA, 1368 bp, Artificial Sequence
  derived and/or modified sequence
atgagcctcatggtggtgagcatggcttgtgtcgggctctttctcgtgcagcgggctggaccccatatgggaggtcaggataagcccttcttgtctgcgtggccctcagctgttgttccacgtggaggccacgtgacccttcggtgtcattacaggcacagatttaacaactttatgctgtataaagaggaccgtattcacattcccattttccacgggaggatattccaagagtccttcaatatgagtccggtgaccacggcgcacgctggcaactacacttgtcgcggttcccatccccacagtccaactggatggagcgctccttctaatccagtagtgataatggtgacaggaaaccacaggaagccctccctgctggctcacccaggcccattggtcaagagcggagagagggttatactccagtgttggtccgacattatgtttgagcatttctttttacacaaagaagggatttcaaaggatccgtctcgactcgtagggcagatccatgacggggtgtccaaagccaacttcagcattggcccaatgatgcttgcgctggccggtacttacaggtgctacggttctgtgactcacaccccgtatcaactgagcgccccatctgaccctcttgacatcgtcgtgaccggaccatatgagaagccatcactcagtgcgcagcctggaccaaaggtgcaggccggtgaaagcgttactctgagctgctcttctcgctcatcctatgatatgtatcacctctctcgggagggcggagcccatgaacgtcgtcttccagcagtaaggaaggtcaatagaaccttccaagcagatttccctttggggcctgccacgcacggaggaacctaccgctgctttggttcttttcgtcacagcccttatgagtggagcgatccctcagaccctctgctggtatccgtcactgggaacccaagctcctcctggccgagtcctacggagcccagttccaaatccggtatctgccgtcatctgcacgttctgatcgggacgtctgtcgtgatcttcttgtttatcctgttactgtttttcctgttatacagatggtgctccaataagaagaatgccgcagtcatggaccaagaacccgcaggggatcggacagtgaatcggcaggattccgacgaacaagacccccaggaggtgacatacgcacagttggaccattgcgtgttcatccagagaaaaatctctcgaccgtctcagagacccaagacccccctgacggatacttcggtgtatactgaattgcccaatgccgagcctcgctctaaggttgtatcttgccctagagccccacagtcaggcctggagggcgtgttctag

SEQ ID NO: 175462 - DNA, 1335 bp, Artificial Sequence
  derived and/or modified sequence
atgagtctgatggtcgtttctatggcttgcgtaggcctgttcttagtacaaagggccggtcctcacatgggaggccaggataaaccattcttgtcagcctggcccagcgccgtggtgcctcgaggcggtcacgtgactcttaggtgccattaccgccacaggttcaataatttcatgctgtacaaagaggatcgtatccacatacctatctttcatggcaggatcttccaggagagtttcaatatgagcccagtgaccactgcacacgccggaaactacacttgtcgcggtagccatcctcacagccctactggctggtccgcaccctccaaccccgtggtcattatggtcactggaaaccacaggaagccaagccttctggcacaccctgggccattagttaaatctggagagcgggtaatcctgcagtgctggtcagacatcatgttcgagcacttctttctgcataaggaggggatctcaaaggatccgtctcgattagtgggacagattcatgatggagtgtcaaaggccaatttctctattggccctatgatgctggctctggccggtacgtaccgatgttatggaagcgttacacacactccgtaccagctatcagcaccatccgacccactggacatcgtggtgaccggcccttacgaaaagcccagtctaagcgcacagcccggacctaaagtgcaggctggcgagtccgttacattgtcttgctctagcagaagctcctacgacatgtaccatctaagccgcgagggcggtgctcatgagcgcaggttgcccgcagttcggaaagtgaatagaaccttccaggcagacttccccctgggccctgcaacacatgggggaacctacaggtgttttggctcattcaggcattcaccgtacgagtggagcgatccttccgatccattgcttgtcagcgtcaccggtaaccccagcagttcttggccctctcctactgagccatccagtaaatccggaaatcctcgtcacctacacattttaatcggcacctctgtagtgatcattttgttcattctcctcctttttttcttactccacctctggtgcagtaataagaagaatgcggcagtcatggatcaagagccagcaggcaatcggactgctaatagtgaagattctgacgaacaagatccagaggaagttacgtacgcccagctggaccactgtgtctttacacaaagaaagatcacaaggcctagtcagcgcccaaagacgccccctaccgatactattctctacaccgaactacctaacgccaaacctcgctccaaggtggtatcctgcccttag

SEQ ID NO: 175463 - DNA, 1284 bp, Artificial Sequence
  derived and/or modified sequence
atgagccttatggtggtttcaatggcctgtgtgggtttatttctggttcagcgggcagggccacatatgggtggccaggacaagcccttcctcagcgcatggccctcggcagtggtacctaggggagggcatgtgactctgcgatgtcactatcggcatcgtttcaataatttcatgttgtataaagaggatagaatacacattcccattttccacgggaggatttttcaggaatcatttaacatgtctcctgttaccacagcccatgctggcaactacacatgtagagggagccacccccattctcctaccgggtggtcagcgccttcgaaccctgttgttatcatggtgactggcaatcacaggaagccatcgttgctggcccatcctggaccactggttaagtcaggcgaacgggtgatcctccagtgctggagtgacataatgtttgagcacttcttccttcacaaagaagggatcagcaaggacccttctcgtctggtcggtcaaattcacgacggtgtgtctaaggccaatttctcaattgggccaatgatgctggccctggctggaacatatcgatgttacggatccgtcacacatactccttatcagctatcagcgccttcagaccctcttgacattgtggttactggcccttatgaaaaaccgtccctgtctgcccagcctggtcccaaagttcaggccggtgagagcgttaccctctcctgcagttcgcgttcatcatacgacatgtaccatctgagtcgtgaagggggagcacacgaaaggcgcctgcctgctgtaaggaaagtgaatcgtaccttccaggcagattttccactgggacccgctactcacggaggcacatacagatgttttggaagcttccgacatagcccatatgagtggtcggaccccagcgaccccctgctggtgtcagtaacaggcaatccgcgacacctccacatattgattgggacgagtgttgttattatcctgtttattttgctgttatttttcctcctccacttgtggtgctcgaacaagaaaaatgcagccgtgatggatcaggaaccagccggaaataggacagccaactccgaagactctgatgaacaggaccctgaagaggttacgtatgcccagctcgaccattgtgtgtttacccagcgtaagattactcgcccttctcagagacctaaaacaccaccaaccgacaccatcttatacacagagttgcccaacgccaagccacggagcaaggtggtgagctgtccctag

SEQ ID NO: 175464 - DNA, 1269 bp, Artificial Sequence
  derived and/or modified sequence
atgggcggccaggacaagcccttcctgagcgcctggcccagcgccgtggtgcccagaggcggccacgtgaccctgagatgccactacagacacagattcaacaacttcatgctgtacaaggaggacagaatccacatccccatcttccacggcagaatcttccaggagagcttcaacatgagccccgtgaccaccgcccacgccggcaactacacctgcagaggcagccacccccacagccccaccggctggagcgcccccagcaaccccgtggtgatcatggtgaccggcaaccacagaaagcccagcctgctggcccaccccggccccctggtgaagagcggcgagagagtgatcctgcagtgctggagcgacatcatgttcgagcacttcttcctgcacaaggagggcatcagcaaggaccccagcagactggtgggccagatccacgacggcgtgagcaaggccaacttcagcatcggccccatgatgctggccctggccggcacctacagatgctacggcagcgtgacccacaccccctaccagctgagcgcccccagcgaccccctggacatcgtggtgaccggcccctacgagaagcccagcctgagcgcccagcccggccccaaggtgcaggccggcgagagcgtgaccctgagctgcagcagcagaagcagctacgacatgtaccacctgagcagagagggcggcgcccacgagagaagactgcccgccgtgagaaaggtgaacagaaccttccaggccgacttccccctgggccccgccacccacggcggcacctacagatgcttcggcagcttcagacacagcccctacgagtggagcgaccccagcgaccccctgctggtgagcgtgaccggcaaccccagcagcagctggcccagccccaccgagcccagcagcaagagcggcaaccccagacacctgcacatcctgatcggcaccagcgtggtgatcatcctgttcatcctgctgctgttcttcctgctgcacctgtggtgcagcaacaagaagaacgccgccgtgatggaccaggagcccgccggcaacagaaccgccaacagcgaggacagcgacgagcaggaccccgaggaggtgacctacgcccagctggaccactgcgtgttcacccagagaaagatcaccagacccagccagagacccaagaccccccccaccgacaccatcctgtacaccgagctgcccaacgccaagcccagaagcaaggtggtgagctgcccctag

SEQ ID NO: 175465 - DNA, 1050 bp, Artificial Sequence
  derived and/or modified sequence
atgagcctgatggtggtgagcatggcctgcgtgggcctgttcctggtgcagagagccggcccccacatgggcaaccacagaaagcccagcctgctggcccaccccggccccctggtgaagagcggcgagagagtgatcctgcagtgctggagcgacatcatgttcgagcacttcttcctgcacaaggagggcatcagcaaggaccccagcagactggtgggccagatccacgacggcgtgagcaaggccaacttcagcatcggccccatgatgctggccctggccggcacctacagatgctacggcagcgtgacccacaccccctaccagctgagcgcccccagcgaccccctggacatcgtggtgaccggcccctacgagaagcccagcctgagcgcccagcccggccccaaggtgcaggccggcgagagcgtgaccctgagctgcagcagcagaagcagctacgacatgtaccacctgagcagagagggcggcgcccacgagagaagactgcccgccgtgagaaaggtgaacagaaccttccaggccgacttccccctgggccccgccacccacggcggcacctacagatgcttcggcagcttcagacacagcccctacgagtggagcgaccccagcgaccccctgctggtgagcgtgaccggcaaccccagcagcagctggcccagccccaccgagcccagcagcaagagcggcaaccccagacacctgcacatcctgatcggcaccagcgtggtgatcatcctgttcatcctgctgctgttcttcctgctgcacctgtggtgcagcaacaagaagaacgccgccgtgatggaccaggagcccgccggcaacagaaccgccaacagcgaggacagcgacgagcaggaccccgaggaggtgacctacgcccagctggaccactgcgtgttcacccagagaaagatcaccagacccagccagagacccaagaccccccccaccgacaccatcctgtacaccgagctgcccaacgccaagcccagaagcaaggtggtgagctgcccctag

SEQ ID NO: 175466 - DNA, 1335 bp, Artificial Sequence
  derived and/or modified sequence
atgagcctgatggtggtgagcatggcctgcgtgggcctgttcctggtgcagagagccggcccccacatgggcggccaggacaagcccttcctgagcgcctggcccagcgccgtggtgcccagaggcggccacgtgaccctgagatgccactacagacacagattcaacaacttcatgctgtacaaggaggacagaatccacatccccatcttccacggcagaatcttccaggagagcttcaacatgagccccgtgaccaccgcccacgccggcaactacacctgcagaggcagccacccccacagccccaccggctggagcgcccccagcaaccccgtggtgatcatggtgaccggcaaccacagaaagcccagcctgctggcccaccccggccccctggtgaagagcggcgagagagtgatcctgcagtgctggagcgacatcatgttcgagcacttcttcctgcacaaggagggcatcagcaaggaccccagcagactggtgggccagatccacgacggcgtgagcaaggccaacttcagcatcggccccatgatgctggccctggccggcacctacagatgctacggcagcgtgacccacaccccctaccagctgagcgcccccagcgaccccctggacatcgtggtgaccggcccctacgagaagcccagcctgagcgcccagcccggccccaaggtgcaggccggcgagagcgtgaccctgagctgcagcagcagaagcagctacgacatgtaccacctgagcagagagggcggcgcccacgagagaagactgcccgccgtgagaaaggtgaacagaaccttccaggccgacttccccctgggccccgccacccacggcggcacctacagatgcttcggcagcttcagacacagcccctacgagtggagcgaccccagcgaccccctgctggtgagcgtgaccggcaaccccagcagcagctggcccagccccaccgagcccagcagcaagagcggcaaccccagacacctgcacatcctgatcggcaccagcgtggtgatcatcctgttcatcctgctgctgttcttcctgctgcacctgtggtgcagcaacaagaagaacgccgccgtgatggaccaggagcccgccggcaacagaaccgccaacagcgaggacagcgacgagcaggaccccgaggaggtgacctacgcccagctggaccactgcgtgttcacccagagaaagatcaccagacccagccagagacccaagaccccccccaccgacaccatcctgtacaccgagctgcccaacgccaagcccagaagcaaggtggtgagctgcccctag

SEQ ID NO: 175467 - DNA, 1368 bp, Artificial Sequence
  derived and/or modified sequence
atgagcctgatggtggtgagcatggcctgcgtgggcctgttcctggtgcagagagccggcccccacatgggcggccaggacaagcccttcctgagcgcctggcccagcgccgtggtgcccagaggcggccacgtgaccctgagatgccactacagacacagattcaacaacttcatgctgtacaaggaggacagaatccacatccccatcttccacggcagaatcttccaggagagcttcaacatgagccccgtgaccaccgcccacgccggcaactacacctgcagaggcagccacccccacagccccaccggctggagcgcccccagcaaccccgtggtgatcatggtgaccggcaaccacagaaagcccagcctgctggcccaccccggccccctggtgaagagcggcgagagagtgatcctgcagtgctggagcgacatcatgttcgagcacttcttcctgcacaaggagggcatcagcaaggaccccagcagactggtgggccagatccacgacggcgtgagcaaggccaacttcagcatcggccccatgatgctggccctggccggcacctacagatgctacggcagcgtgacccacaccccctaccagctgagcgcccccagcgaccccctggacatcgtggtgaccggcccctacgagaagcccagcctgagcgcccagcccggccccaaggtgcaggccggcgagagcgtgaccctgagctgcagcagcagaagcagctacgacatgtaccacctgagcagagagggcggcgcccacgagagaagactgcccgccgtgagaaaggtgaacagaaccttccaggccgacttccccctgggccccgccacccacggcggcacctacagatgcttcggcagcttcagacacagcccctacgagtggagcgaccccagcgaccccctgctggtgagcgtgaccggcaaccccagcagcagctggcccagccccaccgagcccagcagcaagagcggcatctgcagacacctgcacgtgctgatcggcaccagcgtggtgatcttcctgttcatcctgctgctgttcttcctgctgtacagatggtgcagcaacaagaagaacgccgccgtgatggaccaggagcccgccggcgacagaaccgtgaacagacaggacagcgacgagcaggacccccaggaggtgacctacgcccagctggaccactgcgtgttcatccagagaaagatcagcagacccagccagagacccaagacccccctgaccgacaccagcgtgtacaccgagctgcccaacgccgagcccagaagcaaggtggtgagctgccccagagccccccagagcggcctggagggcgtgttctag

SEQ ID NO: 175468 - DNA, 1284 bp, Artificial Sequence
  derived and/or modified sequence
atgagcctgatggtggtgagcatggcctgcgtgggcctgttcctggtgcagagagccggcccccacatgggcggccaggacaagcccttcctgagcgcctggcccagcgccgtggtgcccagaggcggccacgtgaccctgagatgccactacagacacagattcaacaacttcatgctgtacaaggaggacagaatccacatccccatcttccacggcagaatcttccaggagagcttcaacatgagccccgtgaccaccgcccacgccggcaactacacctgcagaggcagccacccccacagccccaccggctggagcgcccccagcaaccccgtggtgatcatggtgaccggcaaccacagaaagcccagcctgctggcccaccccggccccctggtgaagagcggcgagagagtgatcctgcagtgctggagcgacatcatgttcgagcacttcttcctgcacaaggagggcatcagcaaggaccccagcagactggtgggccagatccacgacggcgtgagcaaggccaacttcagcatcggccccatgatgctggccctggccggcacctacagatgctacggcagcgtgacccacaccccctaccagctgagcgcccccagcgaccccctggacatcgtggtgaccggcccctacgagaagcccagcctgagcgcccagcccggccccaaggtgcaggccggcgagagcgtgaccctgagctgcagcagcagaagcagctacgacatgtaccacctgagcagagagggcggcgcccacgagagaagactgcccgccgtgagaaaggtgaacagaaccttccaggccgacttccccctgggccccgccacccacggcggcacctacagatgcttcggcagcttcagacacagcccctacgagtggagcgaccccagcgaccccctgctggtgagcgtgaccggcaaccccagacacctgcacatcctgatcggcaccagcgtggtgatcatcctgttcatcctgctgctgttcttcctgctgcacctgtggtgcagcaacaagaagaacgccgccgtgatggaccaggagcccgccggcaacagaaccgccaacagcgaggacagcgacgagcaggaccccgaggaggtgacctacgcccagctggaccactgcgtgttcacccagagaaagatcaccagacccagccagagacccaagaccccccccaccgacaccatcctgtacaccgagctgcccaacgccaagcccagaagcaaggtggtgagctgcccctag

SEQ ID NO: 175469 - DNA, 1986 bp, Artificial Sequence
  derived and/or modified sequence
ataacatcctgtgcgctgctgagctgagctggggcgcagccgcctgtctgcaccggcagcaccatgtcgctcatggtcgtcagcatggcgtgtgttgggttgttcttggtccagagggccggtccacacatgggtggtcaggacaaacccttcctgtctgcctggcccagcgctgtggtgcctcgaggaggacacgtgactcttcggtgtcactatcgtcataggtttaacaatttcatgctatacaaagaagacagaatccacattcccatcttccatggcagaatattccaggagagcttcaacatgagccctgtgaccacagcacatgcagggaactacacatgtcggggttcacacccacactcccccactgggtggtcggcacccagcaaccccgtggtgatcatggtcacaggaaaccacagaaaaccttccctcctggcccacccaggtcccctggtgaaatcaggagagagagtcatcctgcaatgttggtcagatatcatgtttgagcacttctttctgcacaaagaggggatctctaaggacccctcacgcctcgttggacagatccatgatggggtctccaaggccaatttctccatcggtcccatgatgcttgcccttgcagggacctacagatgctacggttctgttactcacaccccctatcagttgtcagctcccagtgatcccctggacatcgtggtcacaggtccatatgagaaaccttctctctcagcccagccgggccccaaggttcaggcaggagagagcgtgaccttgtcctgtagctcccggagctcctatgacatgtaccatctatccagggaggggggagcccatgaacgtaggctccctgcagtgcgcaaggtcaacagaacattccaggcagatttccctctgggccctgccacccacggagggacctacagatgcttcggctctttccgtcactctccctacgagtggtcagacccgagtgacccactgcttgtttctgtcacaggaaacccttcaagtagttggccttcacccacagaaccaagctccaaatctggtaaccccagacacctgcacattctgattgggacctcagtggtcatcatcctcttcatcctcctcctcttctttctccttcatctctggtgctccaacaaaaaaaatgctgctgtaatggaccaagagcctgcagggaacagaacagccaacagcgaggactctgatgaacaagaccctgaggaggtgacatacgcacagttggatcactgcgttttcacacagagaaaaatcactcgcccttctcagaggcccaagacaccccctacagataccatcttgtacacggaacttccaaatgctaagcccagatccaaagttgtctcctgcccatgagcaccacagtcaggccttgaggacgtcttctagggagacaacagccctgtctcaaaaccgagttgccagctcccatgtaccagcagctggaatctgaaggcgtgagtcttcatcttagggcatcgctcctcctcacgccacaaatctggtgcctctctcttgcttacaaatgtctaggtccccactgcctgctggaaagaaaacacactcctttgcttagcccacagttctccatttcacttgacccctgcccacctctccaacctaactggcttacttcctagtctacttgaggctgcaatcacactgaggaactcacaattccaaacatacaagaggctccctcttgacgtggcacttacccacgtgctgttccaccttccctcatgctgtttcacctttcttcggactattttccagccttctgtcagcagtgaaacttataaaattttttgtgatttcaatgtagctgtctcctcttcaaataaacatgtctgccctcaaaaaaaaaaaaaaaaaaaaaaaaaaaaaaaaaaaaaaaaaaaaaaaaaaaaaaaaaaaaaaaaaaaaaaaaaaaaaaaaaaaaaa

SEQ ID NO: 175470 - RNA, 1059 nt, Artificial Sequence
  derived and/or modified sequence
auggcucccaaguugauuaccgugcugugccuuggauucugccuaaaucagaagauuugcccucaugcuggcgcccaggacaaauuuucauuguccgcuuggccaucccccguagugccacuggguggccgcgugacccuguccugucauucccaucucagguuuguuauuuggaccauauuccagacaaccggaacacgcucucaugagcugcauacagggcucucuaacaauaucaccauuucuccagucacaccagaacacgccggcacguaucgcugugucgggauuuauaaacaugcuuccaaauggagcgcugaauccaacucuuuaaaaaucaucguuaccggacucuucacuaagccuuccaucuccgcucaucccagcucuuuagugcacgcaggugcgagaguuucguugagaugucacucggaacuggcauucgacgaauucaucuuauacaaggagggccauauucagcauucucagcaguuagaucagggcauggaagcgggaauucacuacguggaggcaguguuuagcaugggaccagugacacccgcccacgcuggcgcauacagaugcugcgguuguuuuucccauagcagauaugaaugguccgccccauccgacccgcuugacaucgugauuaccgggaaguacaagaagccuagccucuccacacaagucgacccaaugaugaggcuuggagaaaagcugacccucuuuuguuccagugaaauuucguuugaccaguaccaccuguuccggcacggcgucgcccauggacaguggcuuagcggcggacagcgccauagagaggcauuccaggcaaacuuuagcguuggacgggccacacccguccccgguggcacuuaucgguguuauggcuccuucaaugacucaccauauaagccaccugugaccagguguaacuucacaccucaagaaacucugaggguccuucugugccauagucagaacccaccccugaauuuaacacaccuggcacuuaaagauuccccggccaccuguaucuguucucucgacucacaauag

SEQ ID NO: 175471 - RNA, 1059 nt, Artificial Sequence
  derived and/or modified sequence
auggccccuaaauugauaacaguacugugccuuggauuuuguuugaaccagaagauauguccacacgcaggcgcccaagacaaguuuucccuaucugcauggccaucccccguuguuccccucggcggcagggucacccucucuugccauagccaccuccguuuuguaaucuggacaauuuuucagaccacgggcacgcggucacacgaguugcauaccgggcugagcaauaauauuacaaucucccccguuacucccgaacacgcagguaccuaucggugcguugguauauacaagcacgccaguaaguggagcgccgaaaguaacucacugaaaauuaucguuacaggccuguucacgaaaccuagcauaucagcacaccccucaucccuagugcacgcgggcgcccgagugucucuucgcugucauuccgaguuggccuucgaugaauuuauucucuauaaggaaggucacauccaacacagccagcaguuggaucaagggauggaggccgggauucauuacgucgaggcaguauuuuccaugggcccagugacuccugcacacgccggcgcauaucguuguugcggcuguuuuucccacagucgcuaugaauggagcgccccuucagacccacucgauauaguaaucacaggaaaguauaagaagccuagucugagcacccaaguggacccaaugaugagacuaggcgagaagcucacauuguuuugcucuucugaaaucaguuuugaccaguaucaccucuuuagacacggagucgcacacgggcaauggcuaagcgggggacaacggcaucgcgaagcuuuucaggcuaauuuuucugugggaagagcuacgcccgucccgggaggaacauaccgcugcuacgguucauuuaacgauucuccuuauaagcccccagugacacggugcaauuuuacuccccaggaaacccugagagugcuucucugucauagccaaaauccgccucucaaccuuacucaccucgcucucaaagacucccccgccacuuguauuugcucucucgacucacaguag

SEQ ID NO: 175472 - RNA, 1098 nt, Artificial Sequence
  derived and/or modified sequence
auggccccuaaacugaucacuguucucugccuuggcuuuugucucaaucagaagauuugcccucacgcaggagcccaagauaaguuuucucuuagcgcuuggccaagucccguggucccacuagggggucgcgugacccucucaugucauucucacuugagguucgucauuuggaccaucuuucaaacuacaggaacccguagucaugaacugcauaccggccucaguaacaauaucacuaucucaccagugacucccgagcacgcaggaacauaucguugcgugggcaucuauaagcacgcaagcaaguggucagccgagucuaauagccugaagauuaucguuacaggccuguucacaaaaccuucaaucuccgcucaccccaguagccugguccacgcaggugcaagggucucucugcgcugucauucugaguuagccuucgacgaguucauuuuguacaaagaagggcacauacaacacucacagcaauuagaccagggaauggaagccgggauacauuauguugaagcuguauuuuccaugggacccgucacacccgcccacgccggugccuaucgcuguugcggcugcuuuucacacuccagauacgaauggagcgccccgagugacccgcuggauauugugaucaccggcaaguauaagaagccuagucuuucaacacagguggaucccaugaugcggcugggagaaaaacugacccucuuuugcucuuccgagaucucauuugaucaguaccaccuguucagacacgguguggcgcauggccaauggcugagcggcggucaaaggcacagagaagccuuccaggcaaauuucucuguggggcgggcuacaccagucccaggaggaacauauagauguuacggauccuucaaugauuccccuuauaagcccccaguuacccggugcaacuuuaccccccaggagacuuugcggguacucuuaugucacagccagaacccuccccugaaccucaccccgcccuggcagacccagagcccaagaaaggcuaaugggcgcaugaagagaucccuccagcaaaaacggcauagaagaaguuacaugcccucauag

SEQ ID NO: 175473 - RNA, 1098 nt, Artificial Sequence
  derived and/or modified sequence
auggcccccaaacucaucacuguucuuugccucggguucugcuugaaccagaagaucuguccacaugccggcgcacaagacaaguucucucuauccgcguggccaucuccagugguuccccuaggaggcaggguuacccugucuugucacucccaccugagguuugugauuuggaccaucuuccagacaacuggcacaagaucacacgaacuacacaccggacuuagcaauaacauuacaauuagcccugucacacccgagcacgccgguaccuaucgcugcgugggaauuuauaaacacgcaagcaaguggucagccgagucuaauagccugaagauuaucguuacaggccuguucacaaaaccuucaaucuccgcucaccccaguagccugguccacgcaggugcaagggucucucugcgcugucauucugaguuagccuucgacgaguucauuuuguacaaagaagggcacauacaacacucacagcaauuagaccagggaauggaagccgggauacauuauguugaagcuguauuuuccaugggacccgucacacccgcccacgccggugccuaucgcuguugcggcugcuuuucacacucucgauaugaguggucugcuccaagcgauccacucgacauuguuaucacaggcaaauauaaaaaaccaucucuguccacucagguugacccaaugaugcgucugggugaaaaacuaacccucuucugcaguagugaaauuagcuucgaccaauaccaucuguuuagacacggaguugcucauggccaauggcuguccggaggccagcgccacagagaggcguuucaagcaaauuuuucggucggacgagcaacccccgucccugguggcacguaucggugcuauggcaguuucaacgauucucccuauaaaccuccggugacccggugcaacuuuacgccacaagagaccuuaagagugcuccugugccauucccagaaucccccacugaaccucacaccuccauggcaaacucagucuccuaggaaagcaaauggacgaaugaagagaucccuccaacagaagagacaucgaagauccuacaugccaucauag

SEQ ID NO: 175474 - protein, 205 aa, Artificial Sequence
  derived and/or modified sequence
MSKGRAEAAAGAAGILLRYLQEQNRPYSSQDVFGNLQREHGLGKAVVVKTLEQLAQQGKIKEKMYGKQKIYFADQDQFDMVSDADLQVLDGKIVALTAKVQSLQQSCRYMEAEMQKEIQELKKECAGYRERLKNIKAATNHVTPEEKEQVYRERQKYCKEWRKRKRMATELSDAILEGYPKSKKQFFEEVGIETDEDYNVTLPDP

SEQ ID NO: 175475 - DNA, 618 bp, Artificial Sequence
  derived and/or modified sequence
atgagcaaaggccgggccgaggccgcagccggcgctgccgggattctcctgagatatcttcaggagcagaaccggccttatagttcccaggatgtttttggcaacctgcagagagagcacggcctcgggaaagccgtcgtggtgaaaacgctggagcagctggctcaacaggggaaaatcaaggagaaaatgtatggcaagcaaaagatctacttcgctgaccaggatcagtttgatatggtttctgacgccgatctacaggtactggacggtaagatcgtggcacttacggctaaagtgcagtcactccagcaatcatgtcgatatatggaagctgagatgcaaaaggagattcaagaacttaaaaaggagtgcgccggttacagagagagacttaagaacattaaagccgcaacaaatcacgtcacccctgaagagaaggaacaggtgtatcgcgagcggcagaagtactgtaaggagtggcgtaagaggaaacgaatggcaaccgaattgagtgatgctatcctggaaggctaccctaaatcgaagaaacaattcttcgaagaagttgggatcgaaaccgatgaggactataatgtgaccctccccgatccctag

SEQ ID NO: 175476 - DNA, 618 bp, Artificial Sequence
  derived and/or modified sequence
atgagcaagggccgggcagaggccgccgccggggctgctggcatcctgctgcgctacctgcaggagcagaaccggccctacagcagccaggatgtgtttggaaacctgcagcgggagcacggcctgggcaaggctgtggtggtgaagaccctggagcagctggcccagcagggcaagatcaaggagaagatgtatggcaagcagaagatctactttgctgaccaggaccagtttgacatggtgtctgatgctgacctgcaggtgctggatggcaagatcgtggccctgacagccaaggtgcagagcctgcagcagagctgccgctacatggaggccgagatgcagaaggagatccaggagctgaagaaggaatgtgccggctaccgggagcggctgaagaacatcaaggccgccaccaaccacgtgaccccagaggagaaggagcaggtgtaccgggagcggcagaagtactgcaaggagtggaggaagaggaagaggatggccacagagctgagtgatgccatcctggagggctaccccaagagcaagaagcagttctttgaggaggtgggcatcgagacagatgaggactacaacgtgaccctgcctgacccctag

SEQ ID NO: 175477 - DNA, 618 bp, Artificial Sequence
  derived and/or modified sequence
atgagcaagggccgggccgaggccgccgccggcgccgccggcatcctcctacgctatcttcaggaacagaaccgaccatactcaagtcaggacgtcttcggcaacttgcagcgggaacacggattgggcaaagccgtcgttgtcaaaaccctcgaacagttagctcagcaaggtaagataaaggaaaagatgtacggtaaacaaaaaatctattttgccgatcaagatcagttcgacatggtctccgatgctgatctccaagtccttgacggaaaaattgtcgctctcactgccaaagtgcaatccctgcagcagagctgcagatacatggaagcagagatgcagaaggaaattcaggaactgaagaaagagtgcgccggctatagagagcgtcttaagaacattaaggccgcgaccaaccacgtgactcctgaggagaaggaacaagtgtaccgcgagcgccagaagtattgtaaggagtggcgcaagcgaaagaggatggccacagagctaagcgacgccatactcgagggctacccaaaatcaaagaaacagtttttcgaggaggtgggaattgagacggacgaagattacaacgtaactctgcctgacccatag

SEQ ID NO: 175478 - DNA, 618 bp, Artificial Sequence
  derived and/or modified sequence
atgtctaagggacgggctgaggccgctgcgggagcggcaggcatcctgctgcgctatctgcaggaacagaacagaccatattcctcccaagacgtctttgggaatctgcaaagagagcacggactcggtaaggccgtcgtcgtgaagacgttggagcagctcgctcagcaagggaagatcaaggaaaagatgtacggtaaacagaagatttattttgccgatcaggatcagtttgacatggtgtctgacgcagatttgcaggtactcgatggcaagattgtggctttgacagccaaggtgcagagtctgcagcagtcctgcaggtacatggaggctgagatgcagaaggagatccaggagctcaaaaaggagtgcgcaggctatagagagcggctcaagaacattaaggctgccacaaaccacgtaacccccgaggaaaaggagcaggtgtatcgtgaaaggcagaagtattgtaaagagtggcgcaaaagaaaaagaatggcaactgagttgtctgatgccattctggagggataccccaaaagcaagaagcagttctttgaggaagtgggcatcgaaacggacgaggactataatgtaacattgcccgacccgtag

SEQ ID NO: 175479 - DNA, 1318 bp, Artificial Sequence
  derived and/or modified sequence
aactacaacgtccggctttctgagttgggtggcgggaaaggcgatgagtaaaggccgggcagaagctgcggcgggagccgccgggatcctcctgaggtacctgcaggagcagaaccggccctacagctcccaggatgtgttcgggaacctacagcgggaacacggactgggcaaggcggtggtggtgaagacgctggagcagctggcgcaacaaggcaagatcaaagagaagatgtacggcaagcagaagatctattttgcggatcaggaccagtttgacatggtgagtgatgctgaccttcaagtcctagatggcaaaatcgtggccctcactgctaaggtgcagagcttgcagcagagctgccgctacatggaggctgagatgcagaaagaaatccaggagttaaagaaggaatgcgctggctacagagagagattgaagaacattaaagcagctaccaatcatgtgactccagaagagaaagagcaggtgtacagagagaggcagaagtactgtaaggagtggaggaagaggaagaggatggctacagagctgtctgatgcaatacttgaaggataccccaagagcaagaagcagttctttgaggaagttgggatagagacggatgaagattacaacgtcacactcccagacccctgaggggcccacggtcaggactggtggggactgcaggatgtcagaagagtgagatgtcttgcactggctaccttgtttttggttggcttttgttgttgttcctgctactttcacctttaagcagagcagtcaggagacaagcataaaccagagcactgggtagagaggatgagggctggtggctgggggtagacccagcccatttcattgtctaaattgcagtagcttgaggttaacatttagacttggaacaatgctaaaggaaagcatttggcaatatttattataatttaattttatataaaaatatttaatttcctctggatagtcaaacctgccagatatcaaacctgaggaaggcagaagtgaatttggagaactagggtagagagaggttgctataaaacgagcatttggagggcccacggcttcactcaggacctgctgggcttgtgtaccccaggagcccttttaagtatcttttgtacgcttttcaccccacccccaagtcctgggagaaatgcaggcaacactgagacatgggagaggccaagatatgcttgacagaaagggtgattttgaggctcagttaatatttcaaaattgtaaccgtagcaaaactgcattggtatttagaaaaataaaaaatttccaatatgt

SEQ ID NO: 175480 - DNA, 618 bp, Artificial Sequence
  derived and/or modified sequence
atgagcaagggcagagccgaggccgccgccggcgccgccggcatcctgctgagatacctgcaggagcagaacagaccctacagcagccaggacgtgttcggcaacctgcagagagagcacggcctgggcaaggccgtggtggtgaagaccctggagcagctggcccagcagggcaagatcaaggagaagatgtacggcaagcagaagatctacttcgccgaccaggaccagttcgacatggtgagcgacgccgacctgcaggtgctggacggcaagatcgtggccctgaccgccaaggtgcagagcctgcagcagagctgcagatacatggaggccgagatgcagaaggagatccaggagctgaagaaggagtgcgccggctacagagagagactgaagaacatcaaggccgccaccaaccacgtgacccccgaggagaaggagcaggtgtacagagagagacagaagtactgcaaggagtggagaaagagaaagagaatggccaccgagctgagcgacgccatcctggagggctaccccaagagcaagaagcagttcttcgaggaggtgggcatcgagaccgacgaggactacaacgtgaccctgcccgacccctag

SEQ ID NO: 175481 - protein, 1443 aa, Artificial Sequence
  derived and/or modified sequence
MYAVYKQAHPPTGLEFSMYCNFFNNSERNLVVAGTSQLYVYRLNRDAEALTKNDRSTEGKAHREKLELAASFSFFGNVMSMASVQLAGAKRDALLLSFKDAKLSVVEYDPGTHDLKTLSLHYFEEPELRDGFVQNVHTPRVRVDPDGRCAAMLVYGTRLVVLPFRRESLAEEHEGLVGEGQRSSFLPSYIIDVRALDEKLLNIIDLQFLHGYYEPTLLILFEPNQTWPGRVAVRQDTCSIVAISLNITQKVHPVIWSLTSLPFDCTQALAVPKPIGGVVVFAVNSLLYLNQSVPPYGVALNSLTTGTTAFPLRTQEGVRITLDCAQATFISYDKMVISLKGGEIYVLTLITDGMRSVRAFHFDKAAASVLTTSMVTMEPGYLFLGSRLGNSLLLKYTEKLQEPPASAVREAADKEEPPSKKKRVDATAGWSAAGKSVPQDEVDEIEVYGSEAQSGTQLATYSFEVCDSILNIGPCANAAVGEPAFLSEEFQNSPEPDLEIVVCSGHGKNGALSVLQKSIRPQVVTTFELPGCYDMWTVIAPVRKEEEDNPKGEGTEQEPSTTPEADDDGRRHGFLILSREDSTMILQTGQEIMELDTSGFATQGPTVFAGNIGDNRYIVQVSPLGIRLLEGVNQLHFIPVDLGAPIVQCAVADPYVVIMSAEGHVTMFLLKSDSYGGRHHRLALHKPPLHHQSKVITLCLYRDLSGMFTTESRLGGARDELGGRSGPEAEGLGSETSPTVDDEEEMLYGDSGSLFSPSKEEARRSSQPPADRDPAPFRAEPTHWCLLVRENGTMEIYQLPDWRLVFLVKNFPVGQRVLVDSSFGQPTTQGEARREEATRQGELPLVKEVLLVALGSRQSRPYLLVHVDQELLIYEAFPHDSQLGQGNLKVRFKKVPHNINFREKKPKPSKKKAEGGGAEEGAGARGRVARFRYFEDIYGYSGVFICGPSPHWLLVTGRGALRLHPMAIDGPVDSFAPFHNVNCPRGFLYFNRQGELRISVLPAYLSYDAPWPVRKIPLRCTAHYVAYHVESKVYAVATSTNTPCARIPRMTGEEKEFETIERDERYIHPQQEAFSIQLISPVSWEAIPNARIELQEWEHVTCMKTVSLRSEETVSGLKGYVAAGTCLMQGEEVTCRGRILIMDVIEVVPEPGQPLTKNKFKVLYEKEQKGPVTALCHCNGHLVSAIGQKIFLWSLRASELTGMAFIDTQLYIHQMISVKNFILAADVMKSISLLRYQEESKTLSLVSRDAKPLEVYSVDFMVDNAQLGFLVSDRDRNLMVYMYLPEAKESFGGMRLLRRADFHVGAHVNTFWRTPCRGATEGLSKKSVVWENKHITWFATLDGGIGLLLPMQEKTYRRLLMLQNALTTMLPHHAGLNPRAFRMLHVDRRTLQNAVRNVLDGELLNRYLYLSTMERSELAKKIGTTPDIILDDLLETDRVTAHF

SEQ ID NO: 175482 - DNA, 4332 bp, Artificial Sequence
  derived and/or modified sequence
atgtacgcggtgtacaaacaagcccatccaccaacaggcctcgaatttagtatgtactgcaactttttcaacaactctgaacgcaacctagtggtggccggtacatctcaactctacgtgtacagactgaatcgggatgctgaggctctcaccaagaacgaccgcagtaccgaaggcaaggcccacagagagaagcttgagctggctgcgagcttttcattcttcggaaatgtgatgagcatggccagcgtgcagttagccggagcaaagcgcgatgccctcctgctctctttcaaagacgccaagctcagcgtagtggagtacgaccctggaacccacgaccttaagactctcagcctgcactattttgaggagccggaattgcgggatggcttcgtgcagaatgtccacactcccagggttcgcgttgatccagatgggcggtgcgcagcaatgcttgtttacggtacaaggctggtagtcctcccctttcgacgggaatctttggccgaagaacacgaagggctcgtcggggagggtcagaggtcttcctttcttccaagctacatcatcgatgttcgcgcattagacgagaagctgctcaacattatcgatctacagttcctccatggttattatgaacctacactgcttatcctattcgagcccaatcaaacatggccaggtcgggtcgccgttcgccaggacacatgtagcattgttgcaatctctctgaacataacacagaaagtgcaccccgtgatctggagcctgacttcactcccgttcgactgtacccaggcactggccgtccccaagccaatcggcggagtggtcgtgtttgctgtcaattctctcctctacctaaatcagtcggttcccccatacggggttgcactcaattctctgacaactgggacgactgcctttcccctgaggacgcaggaaggcgtaaggattacactggactgcgctcaggccacttttatctcttacgacaagatggttattagcctgaaaggaggcgaaatttatgtgctcactctcattaccgacggaatgcgttctgtccgtgctttccatttcgacaaggcggcagccagcgtgctcaccacaagcatggtcactatggagcctggctacctcttcctgggaagccggctgggcaacagcctgttgcttaagtacacggagaagcttcaggaaccccccgcttccgccgtccgtgaagcggctgacaaagaagagcctcccagcaagaaaaagcgcgtggacgcaacagccggttggtctgctgctggtaaaagcgtaccccaggacgaggtcgatgagatagaggtctacggcagcgaggctcagtcaggcacccagctagcgacatatagttttgaggtgtgtgatagcattctgaacattggtccttgcgctaacgctgccgtgggggagccagccttcctgagcgaagagttccagaacagcccagagccagacttggagatcgtagtgtgcagtggacatgggaagaacggggccttatcggtgctacaaaagtcaattagaccccaagttgtcacaacattcgagctaccagggtgctatgatatgtggacagtcatcgcccctgtaagaaaagaagaagaagataatcctaaaggcgagggcactgaacaggagccatccaccacacctgaagctgatgatgatggcagacggcatggcttcctgatcctgtccagagaagactcgaccatgatcctccagaccgggcaggaaattatggaacttgacacaagtgggtttgccacgcagggccccacggtgttcgctggaaatataggtgataatagatacattgttcaggtgtctcccctcggtatccgcctgcttgagggtgttaatcaactgcactttatcccagttgatctgggcgccccgatcgtgcagtgtgcagttgctgacccctacgttgtgataatgtcagctgaaggtcatgtcacgatgttcttactgaagagcgattcatacggggggaggcaccacagactagccctccataaaccaccgttacatcaccagtctaaagtcattacattgtgtttgtatcgtgacctttcaggcatgtttactactgagagccgactcggcggcgcccgggatgagctgggaggacggagcggacccgaagcagagggcttgggcagtgagactagtcccactgtggatgacgaggaggaaatgctttacggggattctggatcactgttttccccttctaaagaggaggccagaagatccagccagccaccagccgatagagatcccgcccccttccgcgcggagcccacacactggtgcctattggtccgggaaaacggcacaatggaaatttatcagctaccagattggcgcctcgtgtttctggtaaagaattttcctgtgggccagagagtgctcgttgattcatcattcggccagccaaccacacaaggggaggcccggcgcgaagaagccactcgccagggtgaacttcctctggtgaaggaggtgctattggtggccttgggctctagacagtctcggccgtacctccttgtccacgttgaccaggaactcctcatctatgaagcctttccacatgattcacaactgggccagggcaatttaaaggtgaggttcaaaaaggttcctcacaatattaactttagggaaaaaaaacccaaaccgtccaaaaagaaggccgagggaggtggagctgaagagggagctggagctcgaggtcgagtcgctagatttagatattttgaagacatctatggatatagcggagtatttatctgcggaccttctccccactggctcttggttaccggccgtggagcgctcaggttgcacccaatggcaatcgatggccccgtagatagcttcgctcctttccataacgtgaattgtcctcgtggctttttgtatttcaacaggcaaggcgagctaagaatttccgttctcccagcatacctgagctatgacgccccctggcccgtgcgtaagatacccttgagatgcaccgcccattatgtagcttaccacgtcgagtcaaaggtgtatgccgtagccacgtccacaaataccccatgcgcccgaattccacgcatgaccggcgaggagaaggagtttgagacaattgaaagggatgaaagatacatccacccccaacaggaagccttctccatccagctcatcagtcctgtaagttgggaagctatccctaatgctcgtattgagctgcaagagtgggaacacgtgacgtgtatgaagactgttagtttgagaagcgaagaaactgtgtctggacttaagggatacgtggccgctggaacgtgcctaatgcagggtgaggaggttacgtgtcgcggacgcatcctcatcatggacgtcattgaggtggtcccggagcccggccaaccgctcacaaaaaataaattcaaagtattgtacgagaaagaacagaaaggaccggttaccgccctctgtcattgtaacgggcatcttgtgtctgctattggtcaaaagatcttcctgtggagtctgcgcgcttctgagctcactggtatggccttcattgatacacaactctacattcatcagatgattagtgtgaagaactttattctcgcagccgacgttatgaaatctatttccctgctccgataccaggaggaatcaaaaacactgagtctcgtctcacgcgatgctaaaccactggaggtttactctgttgattttatggtcgacaacgctcaactgggcttcctggtgtctgaccgggaccgaaacctgatggtgtacatgtacctgcctgaggctaaggaaagctttggggggatgcgcctgcttcggagagccgatttccatgtgggcgcacatgttaacacattttggagaacaccctgcagaggggctacagaaggactgagtaaaaagagcgtcgtgtgggagaataagcacattacgtggtttgccactctcgatggaggcattgggctgttgctccccatgcaagaaaaaacataccggcgcctgctgatgctgcagaatgccctcaccaccatgctccctcaccatgcaggcctgaacccccgagcatttcggatgctccatgtcgaccgcagaactcttcagaatgctgtgcgaaacgtgctggatggcgagctcttgaatcgctacctgtacttaagcaccatggagagatcggagctggcaaaaaagattggaacgaccccagacattatccttgacgatctgctagaaactgatcgagtgacagctcacttctag

SEQ ID NO: 175483 - DNA, 4332 bp, Artificial Sequence
  derived and/or modified sequence
atgtatgctgtgtacaagcaggcccacccccccaccggcctggagttctccatgtactgcaacttcttcaacaacagcgagaggaacctggtggtggccggcaccagccagctgtatgtgtaccgcctgaacagagatgctgaggccctgaccaagaatgacaggagcacagagggcaaggcccaccgggagaagctggagctggccgccagcttctccttctttggaaatgtgatgtccatggcctctgtgcagctggccggggccaagagagatgccctgctgctgtccttcaaggatgccaagctgtctgtggtggagtatgaccccggcacccatgacctgaagaccctgagcctgcactactttgaggagcctgagctgagagatggctttgtgcagaatgtgcacaccccccgggtgcgggtggaccctgatggccgctgtgccgccatgctggtgtatggcacccggctggtggtgctgcccttcagaagagagagcctggccgaggagcacgagggcctggtgggggagggccagaggagcagcttcctgcccagctacatcattgatgtgcgggccctggatgagaagctgctgaacatcatcgacctgcagttcctgcacggctactatgagcccaccctgctgatcctgtttgagcccaaccagacctggccaggccgggtggccgtgcggcaggacacctgcagcatcgtggccatcagcctgaacatcacccagaaggtgcaccctgtgatctggagcctgaccagcctgccctttgactgcacccaggccctggccgtgcccaagcccatcggcggcgtggtggtgtttgctgtgaacagcctgctgtacctgaaccagagcgtgcccccctacggcgtggccctgaacagcctgaccaccggcaccacagccttccccctgcggacccaggagggcgtgcgcatcaccctggactgtgcccaggccaccttcatctcctatgacaagatggtgatcagcctgaagggcggggagatctacgtgctgaccctcatcacagatggcatgaggtctgtgcgggccttccactttgacaaggccgccgcctctgtgctgaccacctccatggtgaccatggagcccggctacctgttcctgggcagccggctgggcaacagcctgctgctgaagtacacagagaagctgcaggagcccccagccagcgctgtgcgggaggccgctgacaaggaggagccccccagcaagaagaagagggtggatgccacagctggctggagcgctgctgggaagtctgtgccccaggatgaggtggatgaaattgaggtgtatggcagcgaggcccagagcggcacccagctggccacctacagctttgaggtgtgtgacagcatcctgaacatcggcccctgtgccaatgctgctgtgggggagcccgccttcctgtctgaggagttccagaacagccctgagccagacctggagatcgtggtgtgcagcggccacggcaagaatggagccctgtctgtgctgcagaagagcatccggccccaggtggtgaccacctttgagctgcccggctgctatgacatgtggacagtgattgcccctgtgaggaaggaggaggaggacaaccccaagggggagggcacagagcaggagcccagcaccaccccagaggctgatgatgatggccgccgccacggcttcctgatcctgagccgggaggacagcaccatgatcctgcagacaggccaggagatcatggagctggacaccagcggctttgccacccagggccccaccgtgtttgctggcaacatcggggacaaccgctacatcgtgcaggtgagccccctgggcatccggctgctggagggcgtgaaccagctgcacttcatccctgtggacctgggcgcccccatcgtgcagtgtgctgtggccgacccctacgtggtgatcatgtctgctgagggccacgtgaccatgttcctgctgaagagtgacagctatggaggccgccaccaccggctggccctgcacaagccacccctgcaccaccagagcaaggtgatcaccctgtgcctgtacagagacctgagcggcatgttcaccacagagagccggctgggcggggccagagatgagctgggcggccgcagcggccctgaggccgagggcctgggcagcgagaccagccccaccgtggatgatgaggaggagatgctgtatggagacagcggcagcctcttcagccccagcaaggaggaggcccggcgcagcagccagcccccagctgaccgggaccctgcccccttccgggcagagcccacccactggtgcctgctggtgcgggagaatggcaccatggagatctaccagctgcctgactggaggctggtgttcctggtgaagaacttccctgtgggccagagggtgctggtggacagcagctttggccagcccaccacccagggcgaggcccggcgggaggaggccacccggcagggcgagctgcccctggtgaaggaggtgctgctggtggccctgggcagccggcagagccggccctacctgctggtgcacgtggaccaggagctgctgatctatgaggccttcccccatgacagccagctgggccagggcaacctgaaggtgcgcttcaagaaggtgccccacaacatcaacttccgggagaagaagcccaagcccagcaagaagaaggccgagggcggcggcgctgaggagggcgctggggcccggggccgggtggcccgcttccgctactttgaggacatctacggctacagcggggtcttcatctgtggccccagcccccactggctgctggtgacaggccgcggggccctgcggctgcaccccatggccattgatggccctgtggacagctttgcccccttccacaacgtgaactgcccccggggcttcctgtacttcaaccggcagggcgagctgcgcatctctgtgctgcctgcctacctgtcctatgatgccccctggcctgtgaggaagatccccctgcgctgcacagcccactacgtggcctaccacgtggagagcaaggtgtatgctgtggccaccagcaccaacaccccctgtgcccgcatccccaggatgactggagaggagaaggagtttgagaccatcgagagagatgagcgctacatccacccccagcaggaggccttcagcatccagctgatcagccctgtgtcctgggaggccatccccaatgcccgcatcgagctgcaggagtgggagcacgtgacctgcatgaagacagtgtccctgcggtctgaggagaccgtgtctggcctgaagggctacgtggccgccggcacctgcctgatgcagggcgaggaggtgacctgccggggccgcatcctgatcatggatgtgattgaggtggtgcctgagcccggccagcccctgaccaagaacaagttcaaggtgctgtatgagaaggagcagaagggccctgtgacagccctgtgccactgcaatggccacctggtgtctgccatcggccagaagatcttcctgtggagcctgcgggccagcgagctgaccggcatggccttcatcgacacccagctgtacatccaccagatgatctctgtgaagaacttcatcctggccgcagatgtgatgaagagcatcagcctgctgcgctaccaggaggagagcaagaccctgagcctggtgtccagagatgccaagcccctggaggtgtacagcgtggacttcatggtggacaatgcccagctgggcttcctggtgtctgaccgggacaggaacctgatggtgtacatgtacctgcctgaggccaaggagagctttggaggcatgaggctgctgcggcgggctgacttccacgtgggcgcccacgtgaacaccttctggaggaccccctgccgcggggccacagagggcctgagcaagaagtctgtggtgtgggagaacaagcacatcacctggtttgccaccctggatggcggcatcggcctgctgctgcccatgcaggagaagacctacagaaggctgctgatgctgcagaatgccctgaccaccatgctgccccaccacgccggcctgaacccccgggccttcaggatgctgcacgtggacaggaggaccctgcagaatgctgtgagaaatgtgctggatggagagctgctgaaccgctacctgtacctgagcaccatggagaggtctgagctggccaagaagattggcaccaccccagacatcatcctggatgacctgctggagacagacagagtgacagcccacttctag

SEQ ID NO: 175484 - DNA, 4332 bp, Artificial Sequence
  derived and/or modified sequence
atgtacgccgtgtacaagcaggcccacccccccaccggcctggagttttccatgtattgtaacttctttaacaattccgagcgaaacctggtagtcgcagggacttcccagctttatgtataccggcttaaccgcgatgccgaagccctcacaaagaacgatagatccacagaaggcaaagcacaccgcgaaaaacttgaattagccgccagcttttcctttttcggtaatgtgatgtcaatggcgagtgtgcagctggccggcgccaagagagatgcgctgttgctgtcatttaaggatgccaagctttccgtcgttgaatacgatccgggcacgcatgatctgaagacactcagcctccactatttcgaggagccagaactccgtgacggcttcgtccagaacgtccatactccacgcgtgagagtcgaccctgacgggaggtgtgctgccatgctggtgtacggcactcgtctggtagtgcttccctttagacgagaatccctggcagaggaacacgagggcttagtaggggaaggtcagcggagttcttttctgccatcctacattattgatgtgagagccctcgatgaaaaactgttaaatattattgacctgcaattcctgcacggatactacgagcccacactacttattctgtttgaacccaaccaaacctggccgggtcgcgtcgctgttcgccaagacacctgctccatcgtcgcgatctccctcaacattactcaaaaggtgcaccccgtgatctggtctctcacgagtctgccgtttgattgtacacaggcgctggctgttcctaagcctatcggtggcgtggttgtgtttgcggtgaacagtctcctgtaccttaaccagagcgtccccccatatggcgtggctttgaatagcctgactactggaacaaccgcgttcccactgcgaacacaggagggagtacggatcactctagactgtgcacaagctacattcatctcatatgataaaatggtgatctcccttaaggggggcgagatttatgtactgactctgattactgatggcatgcgcagtgtgcgtgcgtttcatttcgataaagcggccgcgtctgtgttaaccaccagcatggtgacgatggagcccggatatctattcttgggctcaaggctgggtaatagcctcctgctgaagtacacagagaagctgcaggaacctcctgcctctgccgtgagagaagccgctgataaggaggagccgcctagtaaaaaaaagagggtggatgccacagctgggtggtcggcagctggaaaaagtgtcccacaggatgaagtagacgagattgaggtttatggatcagaggcccaatccggcactcagctggccacctattcatttgaagtgtgtgatagcatcttgaatattgggccctgtgctaacgccgccgtgggcgagcccgcatttctgtcggaggagtttcagaacagtccagagcccgatctggaaatcgtggtttgctccggtcatggaaagaatggtgcgctctccgtcctccagaagtctatccggccacaggtggttaccaccttcgaactgccaggttgttatgacatgtggaccgtaatcgctccggtcagaaaagaggaagaagacaatccaaagggcgaaggtacggaacaagagccctccactactccagaggccgatgacgacggcagacgccatggatttctgattctgtcccgggaggactcaaccatgattctccagaccggacaagaaatcatggagctcgacacgtcggggttcgctactcaggggcctaccgtgtttgccgggaatatcggggataaccggtatatagtacaagtgagcccgcttggtatcaggctgctggagggggttaatcagttgcacttcatccctgttgatctgggggcccctatcgtccagtgtgctgttgcggacccctacgtcgtgataatgtcagccgaggggcacgtcacaatgttccttttgaagtcagactcatacggcgggagacatcatcgcctcgcgctgcacaaacccccattgcaccaccaaagcaaagtgatcaccctgtgtctttaccgcgacctgagcggtatgtttactactgagtctagacttggcggagccagggatgaactgggtggtcgaagtggtcccgaggctgagggacttgggtctgagacctctcccaccgttgatgatgaggaggagatgctgtacggagactctggttccttattctcaccttccaaagaagaagctcgtcgctccagtcagccacccgcagacagagacccagctcccttcagagccgaaccgacgcattggtgtctcctggtgagggagaacggaactatggaaatatatcagctgccagactggagactcgttttcctggttaaaaactttccggttggtcagagggtgctggtggactcttcatttggacagcctactactcagggggaggcaaggagagaggaggctacgcggcaaggagagctccctctggtgaaggaggttctgcttgtggccctgggtagccgccagtcacggccctacctgctggtgcatgtcgaccaggagctactcatctatgaggcctttcctcacgacagtcagctggggcaggggaacctgaaggtcagattcaagaaagtgccacataacatcaatttccgtgagaagaaacctaagccatcaaagaagaaggctgaggggggcggggccgaggaaggcgcaggagcacgtggtcgggtcgccaggtttcgatatttcgaggatatttacggatactcaggcgtctttatctgtggacccagcccacactggttactcgtgactgggcgtggagccctgagactgcacccaatggccatcgatggacctgtggactcattcgcgccctttcacaatgtgaattgtccacgcggcttcctgtatttcaataggcagggggaactcagaattagtgtgctgccggcttaccttagctacgacgcgccttggcctgtgagaaaaattcccctgaggtgcacggcacactacgtggcctaccacgtggagtcaaaagtctatgccgtcgccacaagcactaatactccttgcgcccgaatcccaagaatgaccggcgaagagaaagagtttgagacaatcgagcgcgacgaaagatatatacaccctcagcaagaggccttttcgatccaactgatatcacctgtatcctgggaggcaattcctaatgcccgaatagaactccaggagtgggaacacgttacttgcatgaagactgtctccctgcggtctgaggagaccgtgtcagggctgaaagggtacgtggccgctgggacctgtctcatgcagggagaagaggtgacttgccggggaaggatcctgattatggacgttatcgaagtggtgcccgagccaggccagcccctgacaaaaaacaaattcaaagtcctgtacgaaaaagagcagaaggggcccgtaactgccctgtgccactgtaatggacatctggtgagcgctataggccagaagatctttttgtggagtctgcgcgcatctgagttaactggaatggcctttatagatacccagctttacattcaccagatgatctcggtcaaaaactttattctagccgcagacgtgatgaagtccatctctctgctgagataccaggaagaatcaaagacattgtctttggtctcccgagatgccaaacctctggaggtctactccgtcgatttcatggtagataatgcacagctcgggttcttggtgtcagaccgcgatcggaatctcatggtatacatgtatctgcccgaagccaaagagtcctttggtggcatgagactcctgaggcgggccgacttccacgtgggagctcacgtcaacactttctggcggactccttgccggggagctacggagggcctgtcaaagaaatccgtggtgtgggaaaacaagcatatcacatggtttgccacacttgatggggggatcggcctgttactgcctatgcaggaaaagacgtatcgaaggctcctgatgctgcagaacgctctgacgacaatgctgcctcaccacgccggacttaatccccgagccttccgtatgctacacgttgatcgtcgcaccttgcaaaacgccgtgaggaacgtgctcgatggggaactgctgaaccgttatctctacctctcgacaatggagcggagtgaattggccaagaagattggaacaacacctgacattatcctggatgacctattagaaaccgacagagtaacggcccacttctag

SEQ ID NO: 175485 - DNA, 4332 bp, Artificial Sequence
  derived and/or modified sequence
atgtacgctgtctataagcaggctcacccaccaacaggccttgagttcagcatgtactgcaatttctttaataactcagagcgaaacctggtcgtagccggaacgtctcagctgtacgtgtatcggctcaaccgggacgctgaggccctgacaaaaaacgacaggtctaccgaaggcaaggctcacagggagaaactagagcttgccgcatctttttctttttttggcaatgtcatgtctatggcatccgtgcagttagctggcgctaagcgggatgctctgctgctgtcttttaaggacgccaagttgtcagtggtggagtacgaccctggaacgcacgacttaaagaccctgtcattgcactacttcgaagaacctgaactgcgggatggatttgtccagaatgtccacaccccaagggtgcgagttgatcctgatggtcgctgcgccgcaatgctggtgtacgggacgcgcctggtggtattgccgttccggcgtgaaagtcttgctgaggagcacgagggacttgtgggagagggccagcggtcctcttttttgcccagttacatcatcgatgtcagagctttggacgagaagctgctcaatattatcgacctgcagtttctccatggatattacgagcccacattgctgatactgtttgaaccgaaccaaacatggccaggacgcgtggctgtgagacaggacacctgtagtatagtggctatctctctcaacataacccagaaagtgcacccggtcatctggtcacttaccagtctaccattcgattgcacacaggctctggcagtgcccaaaccaattgggggagtagtggtgtttgccgtcaactccctcctctacctaaaccagagcgtacccccttacggcgtggctctgaacagcctgactacaggcaccactgccttcccactgcggacccaggagggcgtccgaataactttagattgtgcacaagcaacatttatttcatacgacaagatggtgatcagcctgaaaggcggagaaatttacgtgctaactctgatcacagatggaatgcgctctgtgcgcgcttttcatttcgacaaagccgcagcgagtgtactaacaacatctatggtcaccatggagccaggatacctattccttggatcccggttgggcaactcactgctgctcaaatatactgaaaagttacaggagccccctgcaagtgcggtgagagaggccgcagataaggaagaacccccttcgaagaaaaaacgtgtcgacgctacagcgggttggtccgctgctggcaagagtgtccctcaggacgaggtggatgaaatcgaagtctatggatcggaagctcagagtggtactcagctcgcaacgtactcatttgaagtttgtgacagtatcttgaacatcggcccatgtgcaaatgctgctgtgggggagcctgccttcctaagcgaggaattccaaaattccccagagccagacctggagattgtcgtatgctccggccacgggaagaacggggctttgagcgtcctgcagaaatctattaggcctcaagtggtgaccacattcgaactccccggatgctatgatatgtggacggtgatcgctccggtgcgcaaggaggaagaagataacccaaagggagagggaaccgagcaggaaccatccaccactcctgaagccgatgacgacgggcgacgtcacgggttcctcatcttgagcagggaagactcaacgatgatcctacagactggccaggagattatggaactagacacatcggggttcgcaacacaggggccaacagtgtttgccggaaatatcggagataacaggtacattgtacaggtcagcccccttggcattaggctgctggaaggtgtaaatcaattgcacttcattccagtggatctgggagcaccgatcgtccagtgcgcagtggcagatccatatgtggtgatcatgtctgcagaaggacacgtgactatgttcctgcttaagagcgactcttatggcggtcgacaccacaggcttgctctccacaaaccccctctccatcatcagtccaaggtgatcaccctgtgtctttatagagatctcagcggaatgtttactaccgagtctcgcctgggtggggcaagggatgaactggggggacggagcggaccagaggccgagggtttgggctcagaaacctccccaactgtggatgatgaggaggagatgttgtacggggactcggggtcacttttctccccctcaaaggaagaggccagacggtcatcccaacctcctgccgaccgcgatccggcacctttcagggctgaacctacacactggtgccttctcgtgcgggagaatggcactatggaaatttaccagctacccgactggcgtcttgttttcttagtgaaaaatttcccggtgggtcaacgtgtattggtggactctagcttcggacaacccacgacacagggtgaggctagacgggaggaggcgacgcggcagggggaattgcctctggtgaaggaagttctcctcgttgccctgggtagcagacagagccggccatacctgctcgtgcacgtggaccaagagctcctgatctatgaagccttccctcacgattctcagctgggtcaaggaaacctgaaagtacggttcaagaaagttccccacaacattaatttccgcgagaagaaacccaagccatcgaaaaagaaggccgaaggcggtggagctgaggagggcgctggtgccagaggacgcgtagcacgatttaggtacttcgaggatatctatggatattccggggtattcatttgcggaccaagccctcattggctcctggttaccgggagaggcgcactaagactacaccctatggcaatcgacggccctgttgactctttcgccccttttcacaatgtaaactgtccgagggggtttctctactttaaccggcaaggagaattgcggattagcgttctccccgcttacctgtcatacgacgccccttggcccgtgcgcaaaatcccgctccgatgcaccgcgcactatgtcgcatatcacgtggagtctaaggtatatgcggttgccacaagcacaaataccccttgtgccaggatccccagaatgacaggcgaagagaaagagttcgagaccatagaacgcgatgagcggtatattcatccacaacaagaggcattttccattcagctcattagcccagtgtcttgggaagcaatcccaaacgccagaatcgaactccaagagtgggaacacgtgacttgcatgaaaactgtgagcctgcgatcagaagagacagtgtctggactgaaaggctatgtggctgccggaacctgccttatgcagggggaagaagtgacttgtagagggaggatactgatcatggatgtgatagaagtcgtccccgagccagggcagccactgaccaagaacaagttcaaggtgctgtatgagaaagagcaaaaggggccagtgaccgctttgtgccattgtaatggacatctagtgagcgcaatcggccagaaaatattcttgtggtcacttcgggctagtgaattgaccggaatggcttttattgatacgcagctctacattcaccagatgattagcgtcaagaacttcatattggccgcagatgtgatgaagtcaatcagtctcctccgttaccaggaggagtctaaaaccctaagtctcgtttcgagggacgccaagcccctggaggtctacagcgtcgacttcatggtggacaacgctcagcttgggtttttagtgtcagacagggacagaaacctcatggtttacatgtatctgccagaggccaaggagtcatttggtgggatgcggctactgagacgggcagatttccacgtgggtgcccacgttaacacattctggaggaccccgtgccggggagcaactgagggcttgtcaaagaagtccgtcgtgtgggaaaataaacacattacatggttcgcaacactggacggcggtatagggcttctactcccaatgcaagaaaaaacttataggaggcttctgatgttgcagaatgctctcaccaccatgctgccgcatcatgccggactgaatccgcgtgcatttcggatgctccacgtggataggcgtactctgcagaacgctgttaggaatgtcctggacggagagttactaaaccgatatctgtatcttagcactatggagcggtcggaattagccaagaagataggcaccacacctgacattatcttagacgacctgctggaaacagacagagttaccgcccacttttag

SEQ ID NO: 175486 - DNA, 4510 bp, Artificial Sequence
  derived and/or modified sequence
accttcccgcccagcttctgggcccggccggactgagttcgctgctgtcccggttcctctcgagtcggctccaactgccagcccgggttggcgccatgtacgccgtgtacaaacaggcgcatccgcccaccggtctggagttctccatgtactgcaacttcttcaacaacagcgagcgcaacctggtagtggccgggacctcgcagctctacgtgtaccgcctcaaccgcgacgccgaggctctgaccaagaatgacaggagcacagaggggaaggcccaccgggagaagctcgagcttgctgcctccttctccttctttggcaacgtcatgtccatggccagcgtgcagctggcaggagccaagcgggatgccctgctcctaagcttcaaggatgccaagctgtctgtggtggagtacgacccgggcacccatgacctgaagaccctgtcactgcactactttgaggagcctgagcttcgggacgggtttgtgcagaatgtacacacgccgcgagtgcgggtggaccccgacgggcgctgtgcagccatgcttgtctacggcacgcggctggtggtcctgcccttccgcagggagagcctggctgaggagcacgaggggctcgtgggtgaggggcagaggtccagcttcctgcccagctacatcatcgacgtgcgggccctagacgagaagctgctcaacatcatcgacctgcagttcctgcatggctactacgagcctaccctcctcatcctgtttgagcccaaccagacctggcctgggcgcgtggccgtgcggcaggacacgtgctccattgtggccatctcactgaacatcacgcagaaggtgcaccccgtcatctggtccctcaccagcctgccctttgactgcacccaggctctggctgtgcccaagcccataggtggggtggtggtgtttgccgtcaactcgctgttgtacctgaaccagagcgtccccccgtatggcgtggctctcaacagcctcaccacaggaaccacggctttcccgcttcgcacccaggagggtgtgcggatcaccctggactgcgcccaggccaccttcatctcctacgacaagatggtcatctccctcaagggcggcgagatctacgtgctgaccctcatcaccgacggcatgcgcagtgtccgagcgttccactttgacaaggcggccgccagcgtcctcaccaccagcatggtcaccatggagcccgggtacctgttcctgggttctcgcctgggcaattccctcctcctcaagtacacggagaagctgcaggagcccccggccagtgctgtccgtgaggctgccgacaaggaagagcctccctcaaagaagaagcgagtggatgcgacggccggctggtcagctgcgggtaagtcggtgccgcaggatgaggtggacgagattgaagtgtacggcagcgaggcccagtcgggaacacagctggccacctactcctttgaggtgtgtgacagcatcctgaacattggaccctgtgccaatgccgccgtgggcgagcctgccttcctctctgaagagtttcagaacagccccgagccggacctggagattgtggtttgctccggccacgggaagaacggggctttgtcggtgctgcagaagagcatccggccccaggtggtgacaacctttgagcttcccggctgctatgacatgtggacagtcatcgccccggtgcgtaaggaggaggaggacaatcccaagggggagggcacagagcaggaacccagcaccacccctgaagcagacgacgacggccgcagacacggattcctgattctgagccgggaagactccaccatgatcctgcagacggggcaggagatcatggagctggacaccagtggcttcgccactcagggccccacggtctttgctgggaacatcggggacaaccgctacattgtccaagtgtcaccactgggcatccgcctgctggaaggagtgaatcagctgcacttcatccccgtggacctgggcgcccccatcgtgcagtgcgccgtggccgacccctatgtggtcatcatgagtgccgagggccacgtcaccatgttcctgctgaagagtgactcctacggtggccgccaccaccgcctggcgctgcacaagcccccgctgcaccatcagtccaaggtgattacgctgtgcctgtaccgagacctcagcggcatgttcaccactgagagccgcctgggtggggcccgtgacgagctcgggggccgcagtggcccggaggccgagggcctgggctcagagactagccccacagtggatgacgaggaggagatgctgtatggggattcgggctccctcttcagccccagcaaggaggaggcccgaagaagcagccagccccctgctgaccgggaccctgcacccttccgggcagagcctacccactggtgcctgctggtgcgggagaatggcaccatggagatctaccagcttcccgactggcggctggtgttcctggtgaagaacttccctgtggggcagcgggtccttgtggacagctcctttggacagcccactacacagggcgaggcccgcagggaggaggccacgcgccagggggagctgcccctcgtcaaggaggtgctgctggtggcgctgggcagccgccagagcaggccctacctgctggtgcatgtggaccaagagctgcttatctacgaggccttcccccacgactctcagctcggccagggcaatctcaaagtccgctttaagaaggtccctcacaacatcaacttccgtgagaagaagccaaagccatccaagaagaaagcagaaggtggcggcgcagaggagggggctggggcccggggccgcgtggcgcgtttccgctacttcgaggatatttatggctactcaggggtcttcatctgcggcccctcccctcactggctcttggtgaccggccgaggggctctgcggctacaccccatggccatcgacggcccggtcgactctttcgctccattccacaatgtcaactgtccccgcggcttcctgtacttcaacagacagggcgagctgaggatcagtgtcctgcctgcctacctgtcctatgatgccccatggcctgtcaggaagatcccgctgcgctgcacggcccactatgtggcttaccacgtggagtctaaggtgtatgctgtggccaccagcaccaacacgccgtgtgcccgcatcccacgcatgactggcgaggagaaggagtttgagaccatcgagagagatgagcggtacatccacccccagcaggaggccttctccatccagctcatctccccggtcagctgggaggctattcccaatgccaggatcgagctgcaggagtgggagcatgtgacctgcatgaagacagtgtctctgcgcagtgaggagaccgtgtcgggcctcaaaggctacgtggccgccgggacctgcctcatgcagggggaggaggtcacgtgccgagggcggatcttgatcatggatgtgattgaggtggtgcccgagcctggccagcccttgaccaagaacaagttcaaagtcctttacgagaaggagcagaaggggcccgtgaccgccctgtgccactgcaatggccacctggtgtcggccatcggccagaagattttcctgtggagcctgcgggccagcgagctgacgggcatggccttcatcgacacgcagctctacatacaccagatgatcagcgtcaagaacttcatcctggcagccgacgtcatgaagagcatttcgctgctgcgctaccaggaggaaagcaagacgctgagcctggtgtcgcgggatgccaagcccctggaggtgtacagcgtggacttcatggtggacaatgcccagctgggttttctggtgtctgaccgcgaccgcaacctcatggtgtacatgtacctgcccgaagccaaggagagtttcgggggcatgcgcctgctgcgtcgggcagacttccacgtgggtgcccacgtgaacacgttctggaggaccccgtgccggggggccactgaagggctcagcaaaaagtcggtcgtgtgggagaataagcacatcacgtggtttgccaccctggacggcggcatcgggctgctgctgcccatgcaggagaagacctaccggcggctgctgatgctgcagaacgcgctgaccaccatgctgccacaccacgccggcctcaacccccgcgccttccggatgctgcacgtggaccgccgcaccctccagaatgccgtgcgcaacgtgctggatggggagctgctcaaccgctacctgtacctgagcaccatggagcgcagcgagctagccaagaagatcggcaccacaccagacataatcctggacgacttgctggagacggaccgcgtcaccgcccacttctagccccgtggatgccgtcaccaccagcacacggaactacctcccaccccctttttgtacaaaacacaaggaaaaacattttttgc

SEQ ID NO: 175487 - DNA, 4332 bp, Artificial Sequence
  derived and/or modified sequence
atgtacgccgtgtacaagcaggcccacccccccaccggcctggagttcagcatgtactgcaacttcttcaacaacagcgagagaaacctggtggtggccggcaccagccagctgtacgtgtacagactgaacagagacgccgaggccctgaccaagaacgacagaagcaccgagggcaaggcccacagagagaagctggagctggccgccagcttcagcttcttcggcaacgtgatgagcatggccagcgtgcagctggccggcgccaagagagacgccctgctgctgagcttcaaggacgccaagctgagcgtggtggagtacgaccccggcacccacgacctgaagaccctgagcctgcactacttcgaggagcccgagctgagagacggcttcgtgcagaacgtgcacacccccagagtgagagtggaccccgacggcagatgcgccgccatgctggtgtacggcaccagactggtggtgctgcccttcagaagagagagcctggccgaggagcacgagggcctggtgggcgagggccagagaagcagcttcctgcccagctacatcatcgacgtgagagccctggacgagaagctgctgaacatcatcgacctgcagttcctgcacggctactacgagcccaccctgctgatcctgttcgagcccaaccagacctggcccggcagagtggccgtgagacaggacacctgcagcatcgtggccatcagcctgaacatcacccagaaggtgcaccccgtgatctggagcctgaccagcctgcccttcgactgcacccaggccctggccgtgcccaagcccatcggcggcgtggtggtgttcgccgtgaacagcctgctgtacctgaaccagagcgtgcccccctacggcgtggccctgaacagcctgaccaccggcaccaccgccttccccctgagaacccaggagggcgtgagaatcaccctggactgcgcccaggccaccttcatcagctacgacaagatggtgatcagcctgaagggcggcgagatctacgtgctgaccctgatcaccgacggcatgagaagcgtgagagccttccacttcgacaaggccgccgccagcgtgctgaccaccagcatggtgaccatggagcccggctacctgttcctgggcagcagactgggcaacagcctgctgctgaagtacaccgagaagctgcaggagccccccgccagcgccgtgagagaggccgccgacaaggaggagccccccagcaagaagaagagagtggacgccaccgccggctggagcgccgccggcaagagcgtgccccaggacgaggtggacgagatcgaggtgtacggcagcgaggcccagagcggcacccagctggccacctacagcttcgaggtgtgcgacagcatcctgaacatcggcccctgcgccaacgccgccgtgggcgagcccgccttcctgagcgaggagttccagaacagccccgagcccgacctggagatcgtggtgtgcagcggccacggcaagaacggcgccctgagcgtgctgcagaagagcatcagaccccaggtggtgaccaccttcgagctgcccggctgctacgacatgtggaccgtgatcgcccccgtgagaaaggaggaggaggacaaccccaagggcgagggcaccgagcaggagcccagcaccacccccgaggccgacgacgacggcagaagacacggcttcctgatcctgagcagagaggacagcaccatgatcctgcagaccggccaggagatcatggagctggacaccagcggcttcgccacccagggccccaccgtgttcgccggcaacatcggcgacaacagatacatcgtgcaggtgagccccctgggcatcagactgctggagggcgtgaaccagctgcacttcatccccgtggacctgggcgcccccatcgtgcagtgcgccgtggccgacccctacgtggtgatcatgagcgccgagggccacgtgaccatgttcctgctgaagagcgacagctacggcggcagacaccacagactggccctgcacaagccccccctgcaccaccagagcaaggtgatcaccctgtgcctgtacagagacctgagcggcatgttcaccaccgagagcagactgggcggcgccagagacgagctgggcggcagaagcggccccgaggccgagggcctgggcagcgagaccagccccaccgtggacgacgaggaggagatgctgtacggcgacagcggcagcctgttcagccccagcaaggaggaggccagaagaagcagccagccccccgccgacagagaccccgcccccttcagagccgagcccacccactggtgcctgctggtgagagagaacggcaccatggagatctaccagctgcccgactggagactggtgttcctggtgaagaacttccccgtgggccagagagtgctggtggacagcagcttcggccagcccaccacccagggcgaggccagaagagaggaggccaccagacagggcgagctgcccctggtgaaggaggtgctgctggtggccctgggcagcagacagagcagaccctacctgctggtgcacgtggaccaggagctgctgatctacgaggccttcccccacgacagccagctgggccagggcaacctgaaggtgagattcaagaaggtgccccacaacatcaacttcagagagaagaagcccaagcccagcaagaagaaggccgagggcggcggcgccgaggagggcgccggcgccagaggcagagtggccagattcagatacttcgaggacatctacggctacagcggcgtgttcatctgcggccccagcccccactggctgctggtgaccggcagaggcgccctgagactgcaccccatggccatcgacggccccgtggacagcttcgcccccttccacaacgtgaactgccccagaggcttcctgtacttcaacagacagggcgagctgagaatcagcgtgctgcccgcctacctgagctacgacgccccctggcccgtgagaaagatccccctgagatgcaccgcccactacgtggcctaccacgtggagagcaaggtgtacgccgtggccaccagcaccaacaccccctgcgccagaatccccagaatgaccggcgaggagaaggagttcgagaccatcgagagagacgagagatacatccacccccagcaggaggccttcagcatccagctgatcagccccgtgagctgggaggccatccccaacgccagaatcgagctgcaggagtgggagcacgtgacctgcatgaagaccgtgagcctgagaagcgaggagaccgtgagcggcctgaagggctacgtggccgccggcacctgcctgatgcagggcgaggaggtgacctgcagaggcagaatcctgatcatggacgtgatcgaggtggtgcccgagcccggccagcccctgaccaagaacaagttcaaggtgctgtacgagaaggagcagaagggccccgtgaccgccctgtgccactgcaacggccacctggtgagcgccatcggccagaagatcttcctgtggagcctgagagccagcgagctgaccggcatggccttcatcgacacccagctgtacatccaccagatgatcagcgtgaagaacttcatcctggccgccgacgtgatgaagagcatcagcctgctgagataccaggaggagagcaagaccctgagcctggtgagcagagacgccaagcccctggaggtgtacagcgtggacttcatggtggacaacgcccagctgggcttcctggtgagcgacagagacagaaacctgatggtgtacatgtacctgcccgaggccaaggagagcttcggcggcatgagactgctgagaagagccgacttccacgtgggcgcccacgtgaacaccttctggagaaccccctgcagaggcgccaccgagggcctgagcaagaagagcgtggtgtgggagaacaagcacatcacctggttcgccaccctggacggcggcatcggcctgctgctgcccatgcaggagaagacctacagaagactgctgatgctgcagaacgccctgaccaccatgctgccccaccacgccggcctgaaccccagagccttcagaatgctgcacgtggacagaagaaccctgcagaacgccgtgagaaacgtgctggacggcgagctgctgaacagatacctgtacctgagcaccatggagagaagcgagctggccaagaagatcggcaccacccccgacatcatcctggacgacctgctggagaccgacagagtgaccgcccacttctag

SEQ ID NO: 175488 - protein, 169 aa, Artificial Sequence
  derived and/or modified sequence
MAPKRAKRRTVEGGSSSVFSMFDQTQIQEFKEAFTVIDQNRDGIIDKEDLRDTFAAMGRLNVKNEELDAMMKEASGPINFTVFLTMFGEKLKGADPEDVITGAFKVLDPEGKGTIKKKFLEELLTTQCDRFSQEEIKNMWAAFPPDVGGNVDYKNICYVITHGDAKDQE

SEQ ID NO: 175489 - DNA, 510 bp, Artificial Sequence
  derived and/or modified sequence
atggccccaaaacgggctaagcgacggaccgtggaaggtgggagtagctccgtgttttccatgtttgaccagactcagattcaggagtttaaggaagcattcaccgtgatcgaccaaaacagagacggtattattgataaagaagatttaagggatacattcgcagcaatgggaagattgaacgttaaaaacgaagagctcgatgcgatgatgaaagaagcttctggtccaatcaactttaccgtgtttcttacgatgttcggtgagaagttgaaaggagccgatcctgaagacgtgattaccggcgcttttaaggtgctggaccccgagggcaaggggaccattaagaaaaagttccttgaggagctgttgactacacaatgtgatcgatttagccaggaggagatcaaaaacatgtgggccgccttccctcccgacgttgggggcaatgtggactataaaaatatctgttatgtgataacacacggggacgccaaggatcaggagtag

SEQ ID NO: 175490 - DNA, 510 bp, Artificial Sequence
  derived and/or modified sequence
atggcccccaagagggccaagagaagaacagtggagggcggcagcagctctgtgttctccatgtttgaccagacccagatccaggagttcaaggaggccttcaccgtgattgaccagaacagagatggcatcatcgacaaggaggacctgcgggacacctttgctgccatgggccgcctgaatgtgaagaatgaggagctggatgccatgatgaaggaggccagcggccccatcaacttcaccgtcttcctgaccatgtttggagagaagctgaagggagctgaccctgaagatgtgatcactggagccttcaaggtgctggaccctgagggcaagggcaccatcaagaagaagttcctggaggagctgctgaccacccagtgtgaccgcttcagccaggaggagatcaagaacatgtgggccgccttccccccagatgtgggcggcaatgtggactacaagaacatctgctacgtgatcacccatggagatgccaaggaccaggagtag

SEQ ID NO: 175491 - DNA, 510 bp, Artificial Sequence
  derived and/or modified sequence
atggcccccaagcgggccaagcggcggaccgtggagggcggcagctcatctgtttttagcatgtttgatcagacccagatacaggagtttaaagaggcctttaccgtcatagaccagaatcgggacggaataattgacaaggaagacctgagagacactttcgctgccatgggccgcctgaacgttaagaatgaggaactggacgctatgatgaaagaggcatctggcccaatcaattttactgtgttcctgacaatgttcggcgaaaagttgaagggcgcagaccctgaggatgtcattaccggcgcgtttaaagtgctcgaccccgagggcaaggggacaatcaagaagaagttcctcgaggagttgctaactacccagtgcgatcggttcagtcaggaggagattaagaatatgtgggcagccttcccacctgacgtgggaggcaacgtggattacaagaatatttgctacgtgattacacatggcgacgccaaagaccaggaatag

SEQ ID NO: 175492 - DNA, 510 bp, Artificial Sequence
  derived and/or modified sequence
atggctccgaagcgggcaaaaaggaggaccgtggagggtggttctagcagcgtattctccatgtttgaccagactcagatccaggagtttaaagaggccttcaccgtcatcgaccagaacagggacgggatcatcgataaagaggacctgagggatacgtttgccgctatgggtagacttaatgtgaaaaacgaggagttggacgcgatgatgaaagaggccagtggacctataaactttaccgtctttctgaccatgtttggagagaagcttaagggagccgatccagaagatgttataactggagcctttaaggtcctggaccctgaagggaaaggcacgataaagaagaaatttctggaggagctgctcacaacccagtgtgatcgtttttcccaagaggagattaagaacatgtgggccgcttttccaccggatgtaggaggcaatgttgactacaagaatatctgttatgtaattacacatggagatgccaaagatcaagaatag

SEQ ID NO: 175493 - DNA, 668 bp, Artificial Sequence
  derived and/or modified sequence
tgccccatgctgactccttgcttctttccagccggagccgctgccttgccccccggagactgaagacatggcacccaagagggccaagagaaggacagtagagggcggaagctccagcgtcttctccatgttcgaccagactcagatccaggagttcaaagaggccttcactgtgatcgaccagaaccgtgatggtattatagacaaggaggaccttcgggacaccttcgcagccatgggccgcctcaatgtgaagaatgaggagttggatgccatgatgaaggaagccagcggtcccatcaacttcaccgtcttcctgaccatgttcggggagaagctcaagggtgccgaccctgaggatgtgatcaccggagccttcaaggtcttggaccctgagggaaagggcaccatcaagaagaagttcctggaggagctgctgaccacgcagtgtgaccgcttctcccaggaggagatcaagaacatgtgggcggccttcccccccgacgtgggcggcaacgtcgactacaaaaacatctgctacgtcatcacgcacggcgacgccaaggaccaggagtaggggcacccgcgggcctccgctgcccgacgcttctgttcggcccgacctccaccccggctcccaataaaatttaactgatctttgtttctta

SEQ ID NO: 175494 - DNA, 510 bp, Artificial Sequence
  derived and/or modified sequence
atggcccccaagagagccaagagaagaaccgtggagggcggcagcagcagcgtgttcagcatgttcgaccagacccagatccaggagttcaaggaggccttcaccgtgatcgaccagaacagagacggcatcatcgacaaggaggacctgagagacaccttcgccgccatgggcagactgaacgtgaagaacgaggagctggacgccatgatgaaggaggccagcggccccatcaacttcaccgtgttcctgaccatgttcggcgagaagctgaagggcgccgaccccgaggacgtgatcaccggcgccttcaaggtgctggaccccgagggcaagggcaccatcaagaagaagttcctggaggagctgctgaccacccagtgcgacagattcagccaggaggagatcaagaacatgtgggccgccttcccccccgacgtgggcggcaacgtggactacaagaacatctgctacgtgatcacccacggcgacgccaaggaccaggagtag

SEQ ID NO: 175495 - protein, 282 aa, Artificial Sequence
  derived and/or modified sequence
MSDVEENNFEGRESRSQSKSPTGTPARVKSESRSGSRSPSRVSKHSESHSRSRSKSRSRSRRHSHRRYTRSRSHSHSHRRRSRSRSYTPEYRRRRSRSHSPMSNRRRHTGSRANPDPNTCLGVFGLSLYTTERDLREVFSRYGPLSGVNVVYDQRTGRSRGFAFVYFERIDDSKEAMERANGMELDGRRIRVDYSITKRAHTPTPGIYMGRPTHSGGGGGGGGGGGGGGGGRRRDSYYDRGYDRGYDRYEDYDYRYRRRSPSPYYSRYRSRSRSRSYSPRRY

SEQ ID NO: 175496 - protein, 181 aa, Artificial Sequence
  derived and/or modified sequence
MSNRRRHTGSRANPDPNTCLGVFGLSLYTTERDLREVFSRYGPLSGVNVVYDQRTGRSRGFAFVYFERIDDSKEAMERANGMELDGRRIRVDYSITKRAHTPTPGIYMGRPTHSGGGGGGGGGGGGGGGGRRRDSYYDRGYDRGYDRYEDYDYRYRRRSPSPYYSRYRSRSRSRSYSPRRY

SEQ ID NO: 175497 - protein, 403 aa, Artificial Sequence
  derived and/or modified sequence
MAGRRAQTGSAPPRPAAPHPPASRAFPQHCRPRDAERPPSPRSPLMPGCELPVGTCPDMCPAAERAQREREHRLHRLEVVPGCRQDPPRADPQRAVKEYSRPAAGKPRPPPSQLRPPSVLLATVRYLAGEVAESADIARAEVASFVADRLRAVLLDLALQGAGDAEAAVVLEAALATLLTVVARLGPDAARGPADPVLLQAQVQEGFGSLRRCYARGAGPHPRQPAFQGLFLLYNLGSVEALHEVLQLPAALRACPPLRKALAVDAAFREGNAARLFRLLQTLPYLPSCAVQCHVGHARREALARFARAFSTPKGQTLPLGFMVNLLALDGLREARDLCQAHGLPLDGEERVVFLRGRYVEEGLPPASTCKVLVESKLRGRTLEEVVMAEEEDEGTDRPGSPA

SEQ ID NO: 175498 - protein, 358 aa, Artificial Sequence
  derived and/or modified sequence
MPGCELPVGTCPDMCPAAERAQREREHRLHRLEVVPGCRQDPPRADPQRAVKEYSRPAAGKPRPPPSQLRPPSVLLATVRYLAGEVAESADIARAEVASFVADRLRAVLLDLALQGAGDAEAAVVLEAALATLLTVVARLGPDAARGPADPVLLQAQVQEGFGSLRRCYARGAGPHPRQPAFQGLFLLYNLGSVEALHEVLQLPAALRACPPLRKALAVDAAFREGNAARLFRLLQTLPYLPSCAVQCHVGHARREALARFARAFSTPKGQTLPLGFMVNLLALDGLREARDLCQAHGLPLDGEERVVFLRGRYVEEGLPPASTCKVLVESKLRGRTLEEVVMAEEEDEGTDRPGSPA

SEQ ID NO: 175499 - DNA, 1077 bp, Artificial Sequence
  derived and/or modified sequence
atgcccggctgcgagctgcccgtgggcacctgccccgacatgtgccccgccgccgagagagcccagagagagagagagcacagactgcacagactggaggtggtgcccggctgcagacaggacccccccagagccgacccccagagagccgtgaaggagtacagcagacccgccgccggcaagcccagacccccccccagccagctgagaccccccagcgtgctgctggccaccgtgagatacctggccggcgaggtggccgagagcgccgacatcgccagagccgaggtggccagcttcgtggccgacagactgagagccgtgctgctggacctggccctgcagggcgccggcgacgccgaggccgccgtggtgctggaggccgccctggccaccctgctgaccgtggtggccagactgggccccgacgccgccagaggccccgccgaccccgtgctgctgcaggcccaggtgcaggagggcttcggcagcctgagaagatgctacgccagaggcgccggcccccaccccagacagcccgccttccagggcctgttcctgctgtacaacctgggcagcgtggaggccctgcacgaggtgctgcagctgcccgccgccctgagagcctgcccccccctgagaaaggccctggccgtggacgccgccttcagagagggcaacgccgccagactgttcagactgctgcagaccctgccctacctgcccagctgcgccgtgcagtgccacgtgggccacgccagaagagaggccctggccagattcgccagagccttcagcacccccaagggccagaccctgcccctgggcttcatggtgaacctgctggccctggacggcctgagagaggccagagacctgtgccaggcccacggcctgcccctggacggcgaggagagagtggtgttcctgagaggcagatacgtggaggagggcctgccccccgccagcacctgcaaggtgctggtggagagcaagctgagaggcagaaccctggaggaggtggtgatggccgaggaggaggacgagggcaccgacagacccggcagccccgcctag

SEQ ID NO: 175500 - DNA, 1212 bp, Artificial Sequence
  derived and/or modified sequence
atggccggacggcgggctcagaccgggtctgctcccccaagacctgccgccccgcacccaccagcttcacgtgcttttccgcagcactgtcgcccacgggatgctgagaggcccccctctccgcgaagtcccttaatgccagggtgcgaactgcccgtggggacttgtcctgatatgtgccctgccgccgaacgggcccaaagagagcgggaacatcggctccaccggcttgaagttgtgccaggctgtaggcaggaccccccacgggccgatcctcagcgggccgttaaggaatactccagacccgcagctggcaagccccgtccacctccgtcgcagcttcgcccaccttctgtactgcttgccaccgttcgataccttgccggtgaagtggccgagtcagctgatatagcgcgggccgaagtggcctccttcgtcgccgaccgtttacgggctgtgctgcttgatcttgcactgcagggtgcaggtgatgccgaagccgccgtggtattggaagccgctttagccactttgctaaccgtggtggcgcgccttggcccagacgcagctcgcggtcccgctgatccagttcttctgcaggcgcaggttcaggaggggtttgggagtctgcgacgctgttacgcccgcggagcaggtcctcatcctagacagcccgccttccaaggcctgttcctactgtacaacctgggctccgtcgaagctctgcacgaggtcttacaattgccggccgccttgcgagcatgccccccccttaggaaggcactcgctgtcgacgcggcattccgggagggaaacgcggctcgactattcagactgctgcagactttaccgtatttacctagttgcgcagtacagtgccacgttggacacgctcgtcgagaggcccttgccagattcgcccgagccttctctactccaaaggggcagacactaccactgggttttatggtcaacctgttagcccttgacgggctgcgcgaggcccgagatctgtgccaggcccacggcctgcctctggacggcgaagaaagggtcgtgttcttgcgaggaagatatgtcgaagagggcctacctcccgctagtacttgtaaggtgctagttgagagcaagctgcgaggacgcacactggaggaggtcgttatggccgaggaggaggatgaaggcacagataggccaggaagtcccgcgtag

SEQ ID NO: 175501 - DNA, 1077 bp, Artificial Sequence
  derived and/or modified sequence
atgcctggttgcgagttgccggtgggcacatgccctgatatgtgtccagcagcagagagagcccaaagggagagggaacatcgtctgcacagactggaagtggtccccggatgccggcaggacccccccagggccgacccgcagagggccgtgaaggagtattcaagacccgctgctggcaagccaagaccccctcccagccagctgcggccgccatcagtactgcttgcgacggtgcgctatctggcaggggaggtggctgagtccgctgacattgccagggccgaggtggctagttttgtggctgaccgtctgcgggcagtattgctcgacctggccttgcagggtgcaggggacgcagaggctgcagtagttctggaagctgctctcgccacgttgctgacagtggtcgccaggctggggcccgacgcagcaagaggcccggccgacccagtgttgctgcaagctcaggtccaggaggggttcggtagcctaagaaggtgctacgctcgaggggctggaccccacccacggcagcccgccttccaggggctgttcttgctatataacttggggtccgtggaagcgcttcatgaggttctccagctcccagccgctctccgagcctgcccccctctgcggaaggctctagccgtggacgctgctttccgtgaggggaacgcagctagactgtttcggttgctgcagactctgccctacctgcctagctgtgctgtccagtgtcacgtaggtcacgcacgaagagaagctctggcccgctttgctagggctttttctacacctaagggccagaccctgcctctcggattcatggtgaatcttctcgctctggacggactgagagaagccagagacctgtgccaagctcacgggctgcctctcgacggcgaggaacgagtggtgttcctaagggggcggtacgtggaagagggcctcccgccggcatctacttgcaaagtattagtggaatcgaagttgcgcggcaggaccctggaagaggttgtgatggctgaggaggaagatgaggggacagaccgacctggtagtccagcatag

SEQ ID NO: 175502 - DNA, 1077 bp, Artificial Sequence
  derived and/or modified sequence
atgcctggatgcgaactcccagtgggaacatgcccggatatgtgcccagcagcggagcgagcccaacgggagagggagcacaggttacataggctcgaagtggtccccggctgcaggcaggaccctcccagggccgaccctcagcgcgcagtgaaggagtatagcaggccagccgccgggaagcccagaccaccgccatctcagctgcgaccccccagtgtgttgctggctactgtgagatatctcgccggggaagtggccgagtccgctgacatcgctcgggccgaggtggccagctttgttgctgaccgcctgagggccgtgttgctggaccttgccctccagggggcgggcgacgccgaggcagctgtagtgctggaggctgcccttgccaccctgctgacagtcgttgcaagactcggcccagatgccgcacgcggccctgctgaccccgttctcctgcaagcccaggtgcaggaaggctttggctctctgaggcgatgctatgcccggggggctggcccacatcctaggcagccagcctttcagggtctttttcttctgtataacctgggcagtgtggaggcccttcatgaggtgctgcaacttccggctgcactgcgcgcctgccccccactccggaaggcgttggcggttgacgcggcctttcgggaaggtaatgcggcccggctttttcggctccttcagactcttccctacctcccaagttgtgccgtgcagtgtcatgtgggccatgcccggcgcgaagcgctggctagatttgcccgcgctttctcaacgcccaaaggtcagacgctgccactgggatttatggtgaacctgttggcattggacggcctcagggaggctcgggacctttgtcaggcccacggcctgccgttggatggtgaggagcgggtggtgttcctgagaggaagatatgtggaggagggtctgcctcccgctagtacgtgcaaagtgctggtggagtccaagcttcggggtcgcaccttagaggaagtagtaatggccgaggaagaggacgaaggaactgacagaccaggcagccccgcgtag

SEQ ID NO: 175503 - DNA, 1212 bp, Artificial Sequence
  derived and/or modified sequence
atggccggccggcgggcccagacaggcagcgccccacccaggcctgctgccccccaccccccagccagccgggccttcccccagcactgccggcccagagatgctgagcggccccccagccccaggagccccctgatgcctggctgtgagctgcctgtgggcacctgcccagacatgtgcccagctgctgagcgggcccagcgggagcgggagcaccggctgcaccggctggaggtggtgcccggctgccggcaggacccccccagggctgacccccagagagctgtgaaggagtacagcaggcctgctgctgggaagccccggcccccacccagccagctgcggccccccagcgtgctgctggccaccgtgcgctacctggccggggaggtggccgagagcgctgacatcgcccgggcagaggtggccagctttgtggccgaccggctgcgggctgtgctgctggacctggccctgcagggcgctggagatgctgaggccgctgtggtgctggaggccgccctggccaccctgctgactgtggtggcccggctgggcccagatgctgcccggggccctgctgaccctgtgctgctgcaggcccaggtgcaggagggcttcggcagcctgcggcgctgctacgcccggggggccggcccccacccccggcagcctgccttccagggcctcttcctgctgtacaacctgggctctgtggaggccctgcacgaggtgctgcagctgcctgctgccctgcgggcctgcccccccctgaggaaggccctggccgtggatgctgccttccgggagggcaatgctgcccggctcttccggctgctgcagaccctgccctacctgcccagctgtgctgtgcagtgccacgtgggccacgcccggcgggaggccctggccaggtttgcccgggccttcagcacccccaagggccagaccctgcccctgggcttcatggtgaacctgctggccctggatggcctgcgggaggcccgggacctgtgccaggcccacggcctgcccctggatggagaggagcgggtggtgttcctgcggggccgctacgtggaggagggcctgcccccagccagcacctgcaaggtgctggtggagagcaagctgcggggccgcaccctggaggaggtggtgatggccgaggaggaggatgagggcacagacaggcctggcagccctgcctag

SEQ ID NO: 175504 - DNA, 1077 bp, Artificial Sequence
  derived and/or modified sequence
atgcctggctgtgagctgcctgtgggcacctgcccagacatgtgcccagctgctgagcgggcccagcgggagcgggagcaccggctgcaccggctggaggtggtgcccggctgccggcaggacccccccagggctgacccccagagagctgtgaaggagtacagcaggcctgctgctgggaagccccggcccccacccagccagctgcggcccccatctgtgctgctggccaccgtgcgctacctggccggggaggtggccgagagcgctgacatcgcccgggcagaggtggccagctttgtggccgaccggctgcgggctgtgctgctggacctggccctgcagggcgctggagatgctgaggccgctgtggtgctggaggccgccctggccaccctgctgactgtggtggcccggctgggcccagatgctgcccggggccctgctgaccctgtgctgctgcaggcccaggtgcaggagggcttcggcagcctgcggcgctgctacgcccggggagctggcccccacccccggcagcctgccttccagggcctcttcctgctgtacaacctgggctctgtggaggccctgcacgaggtgctgcagctgcctgctgccctgcgggcctgcccccccctgaggaaggccctggccgtggatgctgccttccgggagggcaatgctgcccggctcttccggctgctgcagaccctgccctacctgcccagctgtgctgtgcagtgccacgtgggccacgcccggcgggaggccctggccaggtttgcccgggccttcagcacccccaagggccagaccctgcccctgggcttcatggtgaacctgctggccctggatggcctgcgggaggcccgggacctgtgccaggcccacggcctgcccctggatggagaggagcgggtggtgttcctgcggggccgctacgtggaggagggcctgcccccagccagcacctgcaaggtgctggtggagagcaagctgcggggccgcaccctggaggaggtggtgatggccgaggaggaggatgagggcacagaccggcccggcagccctgcctag

SEQ ID NO: 175505 - DNA, 1212 bp, Artificial Sequence
  derived and/or modified sequence
atggccggccggcgggcccagaccggcagcgcccccccccggcccgcagctccacacccccctgccagtagggcctttccccagcattgtcgccctcgtgacgcagagaggcctccttctcctagatcgccattaatgcccggttgcgagctaccagtgggaacctgtcctgacatgtgccccgccgcggagagagcccagcgggaacgggagcatagattacataggctggaggtggtgcccggttgcaggcaggatcccccacgcgcagatcctcaacgtgctgtgaaggagtatagtaggccagctgcaggcaagccccgcccacctccaagccaactcaggccaccctccgtcttgctcgcaacagtacgatatctcgccggtgaggtcgcggagagcgcagacattgctagggctgaggtcgcctcttttgtcgcagacagattgcgagctgtgctccttgatctggctctgcagggagcaggggacgccgaggctgctgtggtgctggaagcagcactggctaccctcctcacagtcgttgcaagactgggacccgacgcggccagaggccccgccgatccagtgctcctccaagcccaggtgcaggaggggttcggtagtctcaggagatgttacgcccggggtgcgggaccgcacccacggcaacctgcttttcagggtctctttcttctgtacaatttagggtccgtggaagcgttgcatgaggtgctccagctaccagctgctttacgcgcttgcccgccacttcgcaaggccttggcagtggacgctgccttccgcgaaggcaatgccgcaaggctcttccgcctgctgcaaacactcccttaccttccgagctgcgccgtccaatgtcacgtcggccatgcacgccgcgaggcactagcccggttcgccagagcgttctccacacctaaaggacagactcttcctctgggtttcatggtgaatttgctcgcgctcgacgggctgagagaggcacgcgatctgtgtcaggctcatggccttcccttggatggtgaggaacgggttgtgtttctgcgaggcagatacgtcgaagagggcctgccacctgcatcaacatgcaaggtgttagtggagagtaaacttcggggaagaaccctggaagaggttgtaatggccgaggaggaagacgagggcaccgaccggcccggaagcccggcctag

SEQ ID NO: 175506 - DNA, 1077 bp, Artificial Sequence
  derived and/or modified sequence
atgcccggctgcgagctgcccgtgggcacctgccccgacatgtgcccggcagcggagagggcccaacgggaaagggaacatcgactgcaccggttggaggttgtgcctggatgtcgtcaagatccgccaagagctgacccgcagagagccgtcaaggagtattcaaggccagcagctggcaaacccagaccccctcctagtcagttacggcccccttccgttctcctggctaccgttcgatatcttgcgggggaggtagcggaatcagccgatatcgctagggccgaagtcgcatcatttgtcgcagaccggctccgcgccgtgctcctcgatttggcattacaaggagccggggatgcagaggcagcagtggtgctggaggctgcacttgccactctcctgaccgtcgtagcccggttgggccccgatgccgcccgcggccccgcagacccagtgctactccaagcacaggtacaggaaggcttcggatccctccgaagatgttacgcccggggcgcgggccctcaccccagacagcccgcatttcagggcctgtttctgctctacaatctggggagcgtagaggcccttcacgaggtgttacagctgcccgcagccctgcgagcctgcccccccctgcgcaaagctctcgcagttgatgccgccttcagagaggggaatgcagctcgcctgttccggctcctgcagaccctgccttacctgcccagttgcgcggtacagtgccacgttggacatgcccggagggaggctctcgcccggttcgctagagcctttagcaccccaaaaggccagaccctccccctcggcttcatggtcaacctgttggctcttgacggcctgcgcgaggcaagggacctgtgccaggcgcatggactgcctctggatggggaagaaagggtagtgtttctacggggaaggtatgttgaggaaggactgccaccagcctcaacatgcaaagtactggtcgagtccaaactgcgaggcagaacgcttgaggaagtggtcatggcggaagaagaagacgagggcacggataggcccggcagtcccgcttag

SEQ ID NO: 175507 - DNA, 1566 bp, Artificial Sequence
  derived and/or modified sequence
acaaagcggttggttgcggcagggactacaccggtgtatcatgggagcggcccgggctacacgttaaaaacactaaggggagcgcgcgaagctgaacttggcgctcgatgggggccgttagccgccctagagcgcgcggagccgcagaggcgtagctggactacaacgcagtgcatctcgggaggccaactcgactggactgggtgagaggacagaggtggctcgatgggcggcccgaaggccggggatcatggcgggaaggcgggcccagacaggttcagccccgccccgacccgccgctccccaccccccggccggcctcgcgtgccttcccgcagcactgccgtccccgggatgctgagcgcccaccgtctccccgcagccccctcatgcccggctgcgagctgcccgtgggcacctgcccggacatgtgcccggccgccgagcgcgcccagcgcgaaagggagcaccgcctgcaccgcttggaggtggtgccgggttgccgccaggacccgccccgcgcggatccgcagcgcgcggtgaaggagtacagccgacccgccgccggcaagccccggcccccgcccagccagttgcgtccgccctccgtgctgctggccaccgtgcgctacctggccggtgaggtggcggagagcgccgacatcgcccgcgccgaggtggccagcttcgtggcagaccgcttgcgagctgtgctcctggacctggcgctgcagggagcgggcgacgccgaggcagctgtggtgctggaggcggcgctggccacgctgctgaccgtagtggcgcggctcgggcccgacgcggcgcggggacccgcggacccggtgctgctgcaggcccaggtgcaggagggcttcggctcgctgcggcgctgctacgcgcggggcgccgggccgcacccccgccaacccgccttccagggcctctttctgctctataacctgggctcggtggaagccctgcatgaggttctacagctgcctgctgccctgcgcgcctgcccgcccctccgcaaggccttggcggtagatgctgccttccgagagggcaatgctgcccgcctgttccgtctgctccagaccctgccctacctgccaagttgcgctgtgcagtgccatgtgggccatgcccgccgggaagccctggcccgcttcgctcgtgcctttagcacccccaagggccagaccttgcctctgggcttcatggtcaacctcttggccctggatggactcagggaagcacgggacctgtgccaggcccacgggctgcccttggacggagaggagagagttgtgttcctgaggggtcgctacgtggaggaagggctaccgcctgccagtacgtgcaaggtgttagtggagagcaaacttcgaggacgtaccctggaggaggtggtcatggcagaggaggaagatgagggcacggacagacctgggtccccagcctgaggagggagcgtgagcctcccagagccccaggactgggccagagcacttaggtttctttttccatggtttccaggtaataaaaggaacttgttttgttggt

SEQ ID NO: 175508 - DNA, 1077 bp, Artificial Sequence
  derived and/or modified sequence
atgcccggctgcgagctgcccgtgggcacctgccccgacatgtgcccagccgcagagagggctcagcgggagagagaacatcgactccataggctggaggtcgtgcctggatgccgccaggatccccccagagctgacccacagagggccgtcaaggaatattcgaggcccgcggccggaaaaccccgacccccgcccagccagttacggcccccttcagtccttctcgccacggtgcgatacctggctggagaggtggccgagagtgccgacatcgcaagagctgaggtggctagcttcgtggcagatcgtctgcgggccgtgctcctagacctggctctgcagggggccggcgacgctgaggccgccgtggtcctggaagcagctctcgccactctcctaaccgtggtggcacgcttgggccccgatgcagcaagaggaccagcggatccggttctgcttcaggcccaggttcaggaaggattcggatcactgcgcaggtgctatgctcgcggcgcaggtcctcatccgcgacagcccgcgttccagggcctgttcctgttgtataatctggggagtgtggaggctcttcatgaagtcctgcagctgcccgccgctctgcgggcgtgtccccctcttcgcaaggctctggctgtcgatgcagcgtttagagagggcaatgcggcacggctgttcaggcttttgcagaccttgccatatttgccttcatgcgccgtacagtgccacgtcggtcatgcccggcgagaggccctggctcgcttcgcccgtgcattcagcacacctaaaggccagaccttgcccttgggctttatggtgaaccttctggcactcgatggactgcgtgaggccagggatctgtgccaggcacacggcctccctttggatggtgaagagagggttgtatttcttaggggacgatatgtggaggagggtctcccccccgcttccacttgcaaggtgctcgtggaatctaagttacggggccggacactcgaggaggtcgtgatggccgaagaagaggacgaaggaaccgatcgaccgggttcaccagcctag

SEQ ID NO: 175509 - DNA, 1212 bp, Artificial Sequence
  derived and/or modified sequence
atggccggacgtcgggcacagaccggtagtgcgccaccgaggccagctgcgcctcaccccccagctagtagggctttcccacagcattgcaggcctagagatgcggaacgacctccgagccccaggtcccccttgatgccgggatgtgagctccccgtgggaacttgcccggatatgtgcccagcggctgaacgagcacagcgcgagcgagagcatcgcttgcatagacttgaagtagtgcccggatgtagacaagatccaccaagagccgatccacaaagggccgtaaaggagtatagtcgtcccgcagcaggaaaaccaaggccacccccaagccagcttagacccccatcagtgttgcttgccacagtacgttacctggccggagaagtggctgaaagtgctgatattgccagagcggaagtggcctcattcgtggccgatcggctgagggccgtcttgctcgatctggcactccagggggcaggagacgcagaagctgccgtggtccttgaggcagctctcgctaccctgttgaccgtcgtcgctagacttggacccgatgccgctcggggaccagcagacccagtgctgttacaggcacaggtacaagaagggtttggaagccttcggcgatgttatgcaaggggggctggaccccacccccgacagccagcttttcaggggctcttcctcctttataatctggggtccgttgaagctctgcatgaagtcttacaactgcccgctgcactcagggcctgccctcctcttcggaaagctctggccgttgacgcagcctttcgggaggggaacgcagctcgtctctttaggctgctccagacattaccgtatctgccatcttgtgcggtgcagtgccatgtgggccatgcacgccgagaggcactggcaagattcgcacgggctttctctacgcccaaaggccagacgctcccccttgggttcatggtgaacctactagctctggacggattgcgggaggctcgcgatctgtgccaggcacacgggctgcccttagacggagaggaacgggtggtgtttcttcgaggacgatatgttgaagagggcctccccccagcaagtacatgcaaagttctggttgagtctaagctgcgtggacgcaccttggaagaagtggtgatggccgaagaggaagacgagggcacagatcgacccggatctccggcatag

SEQ ID NO: 175510 - DNA, 1077 bp, Artificial Sequence
  derived and/or modified sequence
atgccaggatgcgaattaccagttggaacttgtcccgacatgtgcccggctgctgaaagagctcagcgcgaaagggagcacaggttgcataggttagaagtggttcccggttgtaggcaggatccccctagggccgacccacagagggccgtcaaggagtattcccgcccagccgctgggaaacccagacctcctccctcccaattgcggcctccatctgtcctactggctacggtgcgctatctggcaggagaagtcgctgagtcagcggacattgctcgagcagaagttgcaagctttgttgcagataggctcagggccgtgttgttagacctggctttgcagggggcaggagacgccgaagccgcagtagtgcttgaggcagctttggccactctgttgaccgtcgtcgccagacttggccctgatgcagcccgtgggcctgcggatccagtgctgcttcaggcacaggtccaggagggcttcggtagcctgaggagatgctacgctcggggagccggtccacatcctagacaacctgctttccaggggctgtttctattgtacaacttgggctctgtcgaggctctgcacgaggttcttcagttaccggctgccttgcgggcttgtcctccactccggaaggctctggccgtcgatgctgccttcagagaagggaacgcagcaagactgtttcgcctgctgcaaaccctgccttaccttcccagctgcgcagtgcagtgtcacgtaggccacgccagacgtgaggcactcgccaggtttgccagagccttttcaaccccgaagggtcagacgctgcctctagggtttatggtaaacctgcttgccttagacgggctccgcgaggccagggatttgtgtcaggcccatgggctgccgctcgacggagaggaaagggtggtgttcctgcggggtcggtatgttgaggagggcctccctcccgcttctacatgcaaagtgctggttgagagcaaactgcgcggacgtacactggaagaagtcgtcatggccgaagaagaagacgaaggcacagatcgccctgggtctcccgcttag

SEQ ID NO: 175511 - DNA, 1077 bp, Artificial Sequence
  derived and/or modified sequence
atgccaggctgcgaattaccggttggaacttgtccggatatgtgtccagctgccgaaagagctcagcgggagcgggagcataggttacaccgcctcgaagtagttcccggatgtcgtcaagaccctcctcgtgctgatccccaacgggctgtgaaggaatattcaagaccagcagccggtaagccaaggccaccaccgtcccagcttaggcctcccagcgtgctcctagcaactgtgaggtaccttgctggggaggtcgctgagagcgctgacatagccagggcagaagtagcttcattcgtggcggatcgtctcagggcagtgctgctggatctcgctttacagggtgccggagatgcagaggcagctgttgtgctggaggcagcactggcgaccctcttgactgtggtagcgcgtttgggcccagatgccgcacgcggaccagccgaccctgtgcttctgcaggctcaggtgcaggaaggtttcggttccctgaggaggtgctacgcccgtggtgccggaccccatccacggcaacccgcttttcagggactgttcctgttatacaacttaggatctgtcgaagccctgcacgaggtgctgcagctgccagcagccctgagggcatgcccaccactgcgcaaagctcttgcagtggacgccgcatttcgagaaggaaacgcagcacgtctctttagacttctccagaccttgccttatctaccatcctgtgcagtgcagtgtcacgtgggccacgctagaagggaagcactggcaagattcgcgagggccttttccacgccaaagggtcagaccctgcctctaggcttcatggtgaacctgttggctcttgatgggcttcgggaggccagagacctctgtcaggctcatggactcccactggatggcgaagaacgagtagtgttcctgcgcggaagatatgttgaagagggcctccctcctgcgtctacatgcaaagtgctcgtggagagcaagctgagaggcagaactctggaggaggtagtcatggctgaggaagaggacgaaggcaccgatcggcctggctctccagcctag

SEQ ID NO: 175512 - DNA, 1362 bp, Artificial Sequence
  derived and/or modified sequence
accacaaagcggttggttgcggcagggactacaccggtgtatcatgggagcggcccgggctacacgttaaaaacactaaggggagcgcgcgaagctgaacttggcgctcgatgggggccgttagccgccctagagcgcgcggagccgcagaggcgtagctggactacaacgcagtgcatctcgggaggccaactcgactggactggccccctcatgcccggctgcgagctgcccgtgggcacctgcccggacatgtgcccggccgccgagcgcgcccagcgcgaaagggagcaccgcctgcaccgcttggaggtggtgccgggttgccgccaggacccgccccgcgcggatccgcagcgcgcggtgaaggagtacagccgacccgccgccggcaagccccggcccccgcccagccagttgcgtccgccctccgtgctgctggccaccgtgcgctacctggccggtgaggtggcggagagcgccgacatcgcccgcgccgaggtggccagcttcgtggcagaccgcttgcgagctgtgctcctggacctggcgctgcagggagcgggcgacgccgaggcagctgtggtgctggaggcggcgctggccacgctgctgaccgtagtggcgcggctcgggcccgacgcggcgcggggacccgcggacccggtgctgctgcaggcccaggtgcaggagggcttcggctcgctgcggcgctgctacgcgcggggcgccgggccgcacccccgccaacccgccttccagggcctctttctgctctataacctgggctcggtggaagccctgcatgaggttctacagctgcctgctgccctgcgcgcctgcccgcccctccgcaaggccttggcggtagatgctgccttccgagagggcaatgctgcccgcctgttccgtctgctccagaccctgccctacctgccaagttgcgctgtgcagtgccatgtgggccatgcccgccgggaagccctggcccgcttcgctcgtgcctttagcacccccaagggccagaccttgcctctgggcttcatggtcaacctcttggccctggatggactcagggaagcacgggacctgtgccaggcccacgggctgcccttggacggagaggagagagttgtgttcctgaggggtcgctacgtggaggaagggctaccgcctgccagtacgtgcaaggtgttagtggagagcaaacttcgaggacgtaccctggaggaggtggtcatggcagaggaggaagatgagggcacggacagacctgggtccccagcctgaggagggagcgtgagcctcccagagccccaggactgggccagagcacttaggtttctttttccatggtttcca

SEQ ID NO: 175513 - DNA, 1513 bp, Artificial Sequence
  derived and/or modified sequence
gcccgggctacacgttaaaaacactaaggggagcgcgcgaagctgaacttggcgctcgatgggggccgttagccgccctagagcgcgcggagccgcagaggcgtagctggactacaacgcagtgcatctcgggaggccaactcgactggactgggtgagaggacagaggtggctcgatgggcggcccgaaggccggggatcatggcgggaaggcgggcccagacaggttcagccccgccccgacccgccgctccccaccccccggcctcgcgtgccttcccgcagcactgccgtccccgggatgctgagcgcccaccgtctccccgcagccccctcatgcccggctgcgagctgcccgtgggcacctgcccggacatgtgcccggccgccgagcgcgcccagcgcgaaagggagcaccgcctgcaccgcttggaggtggtgccgggttgccgccaggacccgccccgcgcggatccgcagcgcgcggtgaaggagtacagccgacccgccgccggcaagccccggcccccgcccagccagttgcgtccgccctccgtgctgctggccaccgtgcgctacctggccggtgaggtggcggagagcgccgacatcgcccgcgccgaggtggccagcttcgtggcagaccgcttgcgagctgtgctcctggacctggcgctgcagggagcgggcgacgccgaggcagctgtggtgctggaggcggcgctggccacgctgctgaccgtagtggcgcggctcgggcccgacgcggcgcggggacccgcggacccggtgctgctgcaggcccaggtgcaggagggcttcggctcgctgcggcgctgctacgcgcggggcgccgggccgcacccccgccaacccgccttccagggcctctttctgctctataacctgggctcggtggaagccctgcatgaggttctacagctgcctgctgccctgcgcgcctgcccgcccctccgcaaggccttggcggtagatgctgccttccgagagggcaatgctgcccgcctgttccgtctgctccagaccctgccctacctgccaagttgcgctgtgcagtgccatgtgggccatgcccgccgggaagccctggcccgcttcgctcgtgcctttagcacccccaagggccagaccttgcctctgggcttcatggtcaacctcttggccctggatggactcagggaagcacgggacctgtgccaggcccacgggctgcccttggacggagaggagagagttgtgttcctgaggggtcgctacgtggaggaagggctaccgcctgccagtacgtgcaaggtgttagtggagagcaaacttcgaggacgtaccctggaggaggtggtcatggcagaggaggaagatgagggcacggacagacctgggtccccagcctgaggagggagcgtgagcctcccagagccccaggactgggccagagcacttaggtttctttttccatggtttccaggtaataaaaggaacttgttttgttggt

SEQ ID NO: 175514 - DNA, 1212 bp, Artificial Sequence
  derived and/or modified sequence
atggccggcagaagagcccagaccggcagcgccccccccagacccgccgccccccacccccccgccagcagagccttcccccagcactgcagacccagagacgccgagagaccccccagccccagaagccccctgatgcccggctgcgagctgcccgtgggcacctgccccgacatgtgccccgccgccgagagagcccagagagagagagagcacagactgcacagactggaggtggtgcccggctgcagacaggacccccccagagccgacccccagagagccgtgaaggagtacagcagacccgccgccggcaagcccagacccccccccagccagctgagaccccccagcgtgctgctggccaccgtgagatacctggccggcgaggtggccgagagcgccgacatcgccagagccgaggtggccagcttcgtggccgacagactgagagccgtgctgctggacctggccctgcagggcgccggcgacgccgaggccgccgtggtgctggaggccgccctggccaccctgctgaccgtggtggccagactgggccccgacgccgccagaggccccgccgaccccgtgctgctgcaggcccaggtgcaggagggcttcggcagcctgagaagatgctacgccagaggcgccggcccccaccccagacagcccgccttccagggcctgttcctgctgtacaacctgggcagcgtggaggccctgcacgaggtgctgcagctgcccgccgccctgagagcctgcccccccctgagaaaggccctggccgtggacgccgccttcagagagggcaacgccgccagactgttcagactgctgcagaccctgccctacctgcccagctgcgccgtgcagtgccacgtgggccacgccagaagagaggccctggccagattcgccagagccttcagcacccccaagggccagaccctgcccctgggcttcatggtgaacctgctggccctggacggcctgagagaggccagagacctgtgccaggcccacggcctgcccctggacggcgaggagagagtggtgttcctgagaggcagatacgtggaggagggcctgccccccgccagcacctgcaaggtgctggtggagagcaagctgagaggcagaaccctggaggaggtggtgatggccgaggaggaggacgagggcaccgacagacccggcagccccgcctag

SEQ ID NO: 175515 - protein, 273 aa, Artificial Sequence
  derived and/or modified sequence
MLGQLLPHTARGLGAAEMPGQGPGSDWTERSSSAEPPAVAGTEGGGGGSAGYSCYQNSKGSDRIKDGYKVNSHIAKLQELWKTPQNQTIHLSKSMMEASFFKHPDLTTGQKRYLCSIAKIYNANYLKMLMKRQYMHVLQHSSQKPGVLTHHRSRLSSRYSQKQHYPCTTWRHQLEREDSGSSDIAAASAPEMLIQHSLWRPVRNKEGIKTGYASKTRCKSLKIFRRPRKLFMQTVSSDDSESHMSEEKKEEDLLNNFMQSMSIEEQGEHLMLT

SEQ ID NO: 175516 - DNA, 1582 bp, Artificial Sequence
  derived and/or modified sequence
gagaaacgcgtcctgagaaaaaaggggaggggcgagggagaggatttgcgcgtgcgcaaaagtagttgatggaaatcggccgttgggatgctgtctaagcttggatacctgagtaataacggacaacagataaagctccgcatccttgcgccacgtgcttcggtccgtggtttgcgtgcagacgtttgacctgtatggtgaccctcgcgatttgcaaatgtgctgaggatctggaatactgaagtggaaggcacctcttgttttggggagcatgtatatttccctcctgtgacgcactgcttccacagagaggtgcaaacgtgcaaacgctcagcgaccgcagcgctcctgcccctcccccaccgtaactccggggtcgcggatctgcccgccccgctctcccgaagctgttcgggcagtgtccgaacggcttcggaggggcgagaagccagcatccgagccgcctctccggaataccagcagcctgacgcacgcgtgctgtcgggggagggatgctgggacagctgctcccgcacacggctcgcggtctcggcgccgcggagatgcccggccagggtccggggtccgactggacggagcgtagctcttctgcagagccgcccgctgtggccgggaccgagggtggcggcggcggatcagctggatactcttgttaccagaattccaaaggttctgatagaatcaaagatggatacaaagtgaactcacacatagctaagctgcaagagttatggaaaactccccaaaatcaaacaatccacctctctaaatcaatgatggaggcgtcctttttcaagcatccagacctcaccacaggccagaagcgttacctgtgcagcattgctaaaatctataatgcaaactatctgaagatgttaatgaagaggcagtacatgcacgtacttcagcacagctcacaaaagccaggtgtcctcactcatcacagaagccgccttagctcccgttactcacagaaacagcattacccttgcactacatggcgacatcaactggagagagaggactcggggtcttctgatatcgcagctgcatctgcacctgaaatgctcatacagcattccctttggcggccagtgagaaacaaagaagggataaaaactggatatgcatctaaaacaagatgtaagtcactgaagatttttagaagaccaaggaaactgttcatgcaaacagtttcttcagatgattctgaatcacacatgagtgaagaaaaaaaggaagaagatttactaaataattttatgcaatcaatgtcaattgaagaacagggagaacatctgatgttaacttgacagtcttgtctcgtgtattgaattcgtgccaaaggtgagggtaaggggttgtgagttgtgtcctgtatgtttaggatggtattgttatttattaaatcattaagtaattttggtttgttcagaaacttaaaacaatgtaattggtctgatgtagttccatgtaccaatgatagttatgtaagaaaatttacatgtaacatatacttgtacttctagctagatacaattaaaacttttcttgcattcaa

SEQ ID NO: 175517 - DNA, 822 bp, Artificial Sequence
  derived and/or modified sequence
atgctgggccagctgctgccccacaccgccagaggcctgggcgccgccgagatgcccggccagggccccggcagcgactggaccgagagaagcagcagcgccgagccccccgccgtggccggcaccgagggcggcggcggcggcagcgccggctacagctgctaccagaacagcaagggcagcgacagaatcaaggacggctacaaggtgaacagccacatcgccaagctgcaggagctgtggaagaccccccagaaccagaccatccacctgagcaagagcatgatggaggccagcttcttcaagcaccccgacctgaccaccggccagaagagatacctgtgcagcatcgccaagatctacaacgccaactacctgaagatgctgatgaagagacagtacatgcacgtgctgcagcacagcagccagaagcccggcgtgctgacccaccacagaagcagactgagcagcagatacagccagaagcagcactacccctgcaccacctggagacaccagctggagagagaggacagcggcagcagcgacatcgccgccgccagcgcccccgagatgctgatccagcacagcctgtggagacccgtgagaaacaaggagggcatcaagaccggctacgccagcaagaccagatgcaagagcctgaagatcttcagaagacccagaaagctgttcatgcagaccgtgagcagcgacgacagcgagagccacatgagcgaggagaagaaggaggaggacctgctgaacaacttcatgcagagcatgagcatcgaggagcagggcgagcacctgatgctgacctag

SEQ ID NO: 175518 - DNA, 822 bp, Artificial Sequence
  derived and/or modified sequence
atgctggggcagctgcttcctcacaccgctagagggcttggcgctgctgagatgcctggccagggcccaggttccgactggactgaaagaagctctagcgctgaaccgccagccgtggccggtactgaaggcggtggggggggtagcgccggatacagttgctaccagaacagcaaaggcagcgatcggatcaaggacggctacaaagttaatagtcacattgccaaactgcaggaattatggaaaacaccccagaaccagacgatacatctgagcaaatcgatgatggaagcttcatttttcaaacaccccgatctcaccaccggccagaaacgatacttgtgctcaatagcaaaaatatacaacgctaattatctgaaaatgcttatgaaacggcaatacatgcacgttttgcagcatagttcccagaagcctggggtgctcacccatcataggtcccggctgtcctcccggtacagtcagaagcagcactacccctgtacaacgtggagacaccaacttgagcgagaagattctgggtcttccgacattgcagcagcatctgcccctgaaatgttgatccagcactctctttggcggcctgtcaggaacaaagagggcataaagacaggttatgcctccaagaccagatgcaaatcgctgaagatctttagaaggcctaggaaactgttcatgcagaccgtaagctccgacgacagtgaatcccacatgtccgaggagaaaaaggaggaggacttgctcaacaacttcatgcaaagcatgtccattgaggaacagggagagcaccttatgctgacctag

SEQ ID NO: 175519 - DNA, 822 bp, Artificial Sequence
  derived and/or modified sequence
atgctgggccagctgctgccccacacagcccggggcctgggcgctgctgagatgcctggccagggccctggcagtgactggacagagaggagcagcagcgctgagcccccagctgtggccggcacagagggcggcggcggcggcagcgctggctacagctgctaccagaacagcaaaggaagtgaccgcatcaaggatggctacaaggtgaacagccacatcgccaagctgcaggagctgtggaagaccccccagaaccagaccatccacctgagcaagtccatgatggaggccagcttcttcaagcacccagacctgaccaccggccagaagcgctacctgtgcagcatcgccaagatctacaatgccaactacctgaagatgctgatgaagaggcagtacatgcacgtgctgcagcacagcagccagaagccaggagtgctgacccaccacaggagccggctgagcagccgctacagccagaagcagcactacccctgcaccacctggaggcaccagctggagagagaagattctggcagcagtgacattgctgctgccagcgcccctgagatgctgatccagcacagcctgtggaggcctgtgaggaacaaggagggcatcaagacaggctacgccagcaagacccgctgcaagagcctgaagatcttcagaagacccaggaagctgttcatgcagacagtgtccagtgatgacagcgagagccacatgtctgaggagaagaaggaggaggacctgctgaacaacttcatgcagagcatgagcattgaggagcagggcgagcacctgatgctgacctag

SEQ ID NO: 175520 - DNA, 822 bp, Artificial Sequence
  derived and/or modified sequence
atgctgggccagctgctgccccacaccgcccggggcctgggcgccgccgagatgccgggacaaggcccggggtctgactggacagagagatcgagtagcgctgaaccacctgcagtggcaggtaccgaaggaggcggcggagggtcagcaggctactcctgctaccagaattcaaagggaagcgatcggattaaggatggttacaaggttaacagccacatcgccaagcttcaggagttgtggaaaacaccacagaatcagactattcatcttagcaaaagcatgatggaggcctcttttttcaagcatccagatctaacaaccggccagaaacggtatctgtgttctattgcgaagatctacaatgccaactatctcaaaatgctgatgaaacggcagtatatgcatgtacttcagcactcctcacagaagccaggggtgttgacccaccacaggtcccgactcagctcccgttattcacagaaacagcattatccctgtacgacgtggaggcatcagctggagcgtgaagatagtggatctagcgacattgcagcagcgagcgcacctgagatgcttatacagcacagcctgtggcgcccagtgcgcaataaggaaggaatcaaaactggatatgcttccaaaacaagatgcaaatcgctgaaaatctttcggcgaccaaggaagctgtttatgcagacggttagcagtgatgattccgagagccacatgtcagaggagaagaaggaggaggacctgttgaataatttcatgcagtctatgtccatcgaggaacagggtgagcacctgatgctgacatag

SEQ ID NO: 175521 - DNA, 822 bp, Artificial Sequence
  derived and/or modified sequence
atgttgggacagcttctgccccataccgctaggggcctcggagcagccgagatgccagggcaaggcccaggcagcgattggacagaacggtcttcctctgctgagccacccgcagttgccggaacagaaggaggcggaggtggctctgccggttacagttgttatcagaattccaagggttcagaccggatcaaagacggatacaaggtgaactcacatatagccaaactgcaggagttatggaaaacacctcagaaccaaacgattcacctgagtaagagcatgatggaggcttcatttttcaagcatccagacctgaccaccggccaaaaaagatacctgtgcagcatcgccaagatttacaatgccaactacctgaagatgctgatgaagcgccaatacatgcacgtgctgcagcatagttcacagaagccaggagtcctgacccaccacagaagcaggctgtccagccgatactcacagaaacagcactatccttgtacaacatggaggcatcagctggagagagaagattcaggaagctctgacattgccgcagcatccgcccctgagatgcttatccagcactcactttggaggcctgtgcgaaacaaggagggaatcaagaccggatacgccagtaagacgcggtgtaaatctcttaagatcttccggaggccacgcaagttgttcatgcagacggttagtagtgacgacagtgagagccatatgtccgaagaaaaaaaggaggaggatttacttaacaactttatgcagagcatgtctatcgaagagcaaggggagcatttgatgctcacttag

SEQ ID NO: 175522 - protein, 485 aa, Artificial Sequence
  derived and/or modified sequence
MYKMNICNKPSNKTAPEKSVWTAPAQPSGPSPELQGQRSRRNGWSWPPHPLQIVAWLLYLFFAVIGFGILVPLLPHHWVPAGYACMGAIFAGHLVVHLTAVSIDPADANVRDKSYAGPLPIFNRSQHAHVIEDLHCNLCNVDVSARSKHCSACNKCVCGFDHHCKWLNNCVGERNYRLFLHSVASALLGVLLLVLVATYVFVEFFVNPMRLRTNRHFEVLKNHTDVWFVFLPAAPVETQAPAILALAALLILLGLLSTALLGHLLCFHIYLMWHKLTTYEYIVQHRPPQEAKGVHRELESCPPKMRPIQEMEFYMRTFRHMRPEPPGQAGPAAVNAKHSRPASPDPTPGRRDCAGPPVQVEWDRKKPLPWRSPLLLLAMWGPQAPPCLCRKRGRGACIKCERLRPRIRRRGLGPPAAAPARRRIPRTPALCTPLALPAPTTRRRQSPWTRFQWRRRAWAAPLWPPRGAGADSPRWRGRRVRPPFS

SEQ ID NO: 175523 - DNA, 1458 bp, Artificial Sequence
  derived and/or modified sequence
atgtacaagatgaacatctgcaacaagcccagcaacaagaccgcccccgagaagagcgtgtggaccgcccccgcccagcccagcggccccagccccgagctgcagggccagagaagcagaagaaacggctggagctggcccccccaccccctgcagatcgtggcctggctgctgtacctgttcttcgccgtgatcggcttcggcatcctggtgcccctgctgccccaccactgggtgcccgccggctacgcctgcatgggcgccatcttcgccggccacctggtggtgcacctgaccgccgtgagcatcgaccccgccgacgccaacgtgagagacaagagctacgccggccccctgcccatcttcaacagaagccagcacgcccacgtgatcgaggacctgcactgcaacctgtgcaacgtggacgtgagcgccagaagcaagcactgcagcgcctgcaacaagtgcgtgtgcggcttcgaccaccactgcaagtggctgaacaactgcgtgggcgagagaaactacagactgttcctgcacagcgtggccagcgccctgctgggcgtgctgctgctggtgctggtggccacctacgtgttcgtggagttcttcgtgaaccccatgagactgagaaccaacagacacttcgaggtgctgaagaaccacaccgacgtgtggttcgtgttcctgcccgccgcccccgtggagacccaggcccccgccatcctggccctggccgccctgctgatcctgctgggcctgctgagcaccgccctgctgggccacctgctgtgcttccacatctacctgatgtggcacaagctgaccacctacgagtacatcgtgcagcacagacccccccaggaggccaagggcgtgcacagagagctggagagctgcccccccaagatgagacccatccaggagatggagttctacatgagaaccttcagacacatgagacccgagccccccggccaggccggccccgccgccgtgaacgccaagcacagcagacccgccagccccgaccccacccccggcagaagagactgcgccggcccccccgtgcaggtggagtgggacagaaagaagcccctgccctggagaagccccctgctgctgctggccatgtggggcccccaggcccccccctgcctgtgcagaaagagaggcagaggcgcctgcatcaagtgcgagagactgagacccagaatcagaagaagaggcctgggcccccccgccgccgcccccgccagaagaagaatccccagaacccccgccctgtgcacccccctggccctgcccgcccccaccaccagaagaagacagagcccctggaccagattccagtggagaagaagagcctgggccgcccccctgtggccccccagaggcgccggcgccgacagccccagatggagaggcagaagagtgagaccccccttcagctag

SEQ ID NO: 175524 - DNA, 1458 bp, Artificial Sequence
  derived and/or modified sequence
atgtacaaaatgaatatttgcaataagccctctaataagaccgctccagaaaagtcggtctggaccgcacctgcacagccaagcggcccatcccctgagctacaggggcagagatccaggagaaacggttggtcatggcccccccatcccctgcaaatcgtcgcctggttactgtacctgttctttgccgtgattggatttggcattctggtgcctctcttgcctcaccactgggttccagcgggctacgcctgtatgggcgctatcttcgccggtcatttggtagtacacctcacggccgtgtcaattgaccctgccgacgctaatgtccgggacaagagctatgccggacccctaccgattttcaacaggtctcagcatgcccacgtgatcgaggacctccactgcaatttatgcaacgttgacgtatctgccaggtcaaaacattgctcagcatgcaacaaatgcgtctgtgggttcgaccaccattgtaagtggctgaataactgtgtcggggaaaggaattaccggctcttcctccacagcgtggccagtgcgttgctgggcgtgctacttctcgtgctggtagctacttacgtattcgtcgaattcttcgttaacccaatgcggctgagaaccaataggcactttgaggtgctgaaaaaccacacggacgtgtggttcgtctttctccccgcagctcctgtcgagactcaggcaccagctatcctagcactggccgcattgcttatcctcctcggcttgttgagtactgccttgctggggcatctgctgtgtttccacatctaccttatgtggcacaagctgactacttacgaatacatcgttcagcaccggcctccccaggaagctaagggagtccaccgagagctcgagtcttgccccccgaagatgcgtccaatacaggaaatggagttctatatgaggacgtttcgccatatgagaccagagccacctgggcaggctggccccgcagccgtaaacgcaaagcacagtagaccggctagcccggaccccacccccgggcggagagattgcgctgggccacctgtgcaggtggaatgggataggaagaaacctctcccttggcggtctccactcctgctgttggctatgtggggtccacaggcgcctccatgcctgtgcaggaagaggggacggggagcatgcatcaaatgcgaacgattacgtcctagaatccggaggaggggactcggcccacctgctgccgccccagccagacgtcgcataccaaggacacccgccctgtgtacaccactggccctgcctgctccaactaccagaaggcggcagtccccttggaccaggttccagtggaggaggcgcgcgtgggcagcccccttgtggccaccgcgaggagctggggctgatagtcccagatggcgaggtcgccgggtgaggcctccattctcctag

SEQ ID NO: 175525 - DNA, 1458 bp, Artificial Sequence
  derived and/or modified sequence
atgtacaagatgaacatctgcaacaagcccagcaacaagacagcccctgagaagtctgtgtggacagccccagcccagcccagcggccccagccctgagctgcagggccagaggagcagaagaaatggctggagctggccaccccaccccctgcagatcgtggcctggctgctgtacctgttctttgctgtgattggatttggcatcctggtgcccctgctgccccaccactgggtgcctgctggctacgcctgcatgggcgccatctttgctggccacctggtggtgcacctgacagctgtgtccattgatcctgcagatgccaacgtgcgggacaagagctatgccggccccctgcccatcttcaacagaagccagcacgcccacgtgattgaggacctgcactgcaacctgtgcaatgtggatgtgtctgcccggagcaagcactgcagcgcctgcaacaagtgtgtgtgtggctttgaccaccactgcaagtggctgaacaactgtgtgggggagaggaactaccgcctcttcctgcacagcgtggccagcgccctgctgggcgtgctgctgctggtgctggtggccacctacgtgtttgtggagttctttgtgaaccccatgaggctgcggaccaacagacactttgaggtgctgaagaaccacacagatgtgtggtttgtgttcctgcctgctgcccctgtggagacccaggccccagccatcctggccctggccgccctgctgatcctgctgggcctgctgagcacagccctgctgggccacctgctgtgcttccacatctacctgatgtggcacaagctgaccacctatgagtacatcgtgcagcacaggcctccccaggaggccaagggcgtgcaccgggagctggagagctgcccccccaagatgaggcccatccaggagatggagttctacatgaggaccttccgccacatgaggcctgagcccccaggccaggccggccctgctgctgtgaatgccaagcacagcaggcctgccagcccagaccccaccccaggccggcgggactgtgccggcccccctgtgcaggtggagtgggacaggaagaagcccctgccctggaggagccccctgctgctgctggccatgtggggcccccaggccccaccctgcctgtgcaggaagaggggccgcggggcctgcatcaagtgtgagcggctgcggccccgcatcagaagaagaggcctgggccccccagctgctgccccagcccggcggcgcatccccaggaccccagccctgtgcacccccctggccctgcctgcccccaccacccggcggcggcagagcccctggacccgcttccagtggaggagaagagcctgggccgcccccctgtggccacccaggggggccggggctgacagcccccgctggaggggccggcgggtgcggccccccttctcctag

SEQ ID NO: 175526 - DNA, 1458 bp, Artificial Sequence
  derived and/or modified sequence
atgtacaagatgaacatctgcaacaagcccagcaacaagaccgcccccgagaaatctgtctggaccgcgcccgctcagccatctggtccatcacccgaactgcagggccagagatcaagacgaaacggctggagttggccgccacacccccttcagatcgtggcatggctcctttatctgttttttgccgtcataggtttcggcatactggttccactgctgccgcatcactgggttccagctggatacgcctgtatgggcgcaattttcgcaggacacctggtagtgcatctgacagcagtctctatcgaccccgccgatgcaaatgtccgggacaaatcctatgccgggccactccccatctttaacaggtctcagcacgcacacgttatcgaggatctccactgtaatctgtgcaatgtagatgtttctgcccgttccaagcattgttctgcctgcaacaagtgcgtatgtggatttgaccaccactgtaagtggctgaacaactgtgttggtgaaagaaattaccgcctgttcctacactctgtcgcaagtgccctgctcggcgtgctgttgcttgtgctggtggcgacctatgtctttgttgaatttttcgtgaaccccatgagacttaggaccaaccgacactttgaagtcctgaagaatcacacagatgtctggtttgtgtttctaccggcagcaccagtcgagacacaggctccagccatcctggcactggccgccctgctcatcctcctcggactgctgagtaccgccctgttggggcatctgctgtgtttccacatctacttgatgtggcacaagctgacaacctacgagtatatcgtgcagcataggccccctcaagaggccaagggggtccatagagagttggaatcttgtccacccaaaatgcgaccgatccaggagatggagttttatatgcgtacttttcggcacatgaggcctgaaccgcccggacaggccggaccggcggctgttaatgccaaacacagtagaccagccagtccagacccgacacccgggaggcgggactgtgccggacctcctgtgcaggttgagtgggaccgtaagaagcctctgccctggagaagcccactgctgttactcgctatgtggggcccccaggctcctccctgtctgtgccggaagcgcggtcgcggggcttgcattaaatgcgaacgcttacgaccgaggatccggcggagaggtttgggaccgccagcggccgctcccgctaggcggcgtattccaaggactccggcattatgtaccccacttgcactccccgctcctaccactaggcgtagacagagcccctggacccggttccaatggcgtagacgcgcctgggccgctccgctatggccccctcggggagcaggagcagacagtcctaggtggagaggcagacgcgtgcgtccgccattttcctag

SEQ ID NO: 175527 - DNA, 1458 bp, Artificial Sequence
  derived and/or modified sequence
atgtacaaaatgaatatctgcaataagccgagcaacaagacagcccctgagaagagcgtgtggacagcccctgcacagccctccggcccttcacccgaacttcagggtcagaggtcaagacgcaatggctggagctggccaccgcatccactgcagatcgtagcctggttgttatatctcttcttcgccgtgatcggcttcggaattctcgtgcccttgttgcctcaccattgggtgccagccggatacgcctgtatgggggctattttcgcaggacatctggtcgtgcacctgactgcagtgtctattgaccccgctgacgcgaatgtgcgggacaaaagttatgccggtccactgcccatcttcaaccgctcccagcacgcccacgtaatagaagatttacactgcaacctctgtaatgtcgatgtcagcgctaggtcaaaacattgctctgcctgtaacaagtgcgtctgcggattcgatcatcattgtaaatggctgaacaattgtgtaggtgaaaggaactaccgcttgtttctacatagtgttgcttctgccctgttaggtgtcctgcttttagtgctggtggctacatacgtctttgtcgaattctttgtgaacccaatgcgcctgcgcactaacaggcatttcgaggtactaaagaatcataccgacgtgtggtttgtcttcctccctgctgcgcctgtagaaactcaagcacccgcaatccttgcattggctgctctgctgattttgctgggccttctcagtaccgcgctcttggggcacttgctgtgctttcacatatacctgatgtggcataagctcacgacttacgaatatatcgttcagcacagaccaccccaggaagccaaaggagtccacagagaattagagagttgcccacctaagatgagacctatacaggagatggagttttacatgcgaacttttcggcacatgcgccctgagcctcctggccaagctggcccagctgctgttaatgctaagcatagcaggccagccagtcctgatcctacgccagggcgaagggattgcgctgggccacctgtacaggttgaatgggaccgcaaaaaaccgctcccatggcgcagccctcttttgttgttagccatgtgggggccacaagcaccaccatgcctctgtcgaaaaagggggagaggggcttgtatcaagtgcgagcggctccggcctcgcatcaggcggagaggactgggacctcctgcagccgcaccggctagaagacggatacccagaaccccagctctctgtaccccgctcgccttgcctgctccaactactagacgacgacagtctccgtggactagatttcagtggaggcgcagggcttgggccgctccactatggccccctagaggggcaggagctgactcgcctaggtggaggggcagacgcgtccgtccacctttcagttag

SEQ ID NO: 175528 - DNA, 2047 bp, Artificial Sequence
  derived and/or modified sequence
gccggacgaggcccagccagtctgggtctggcctggccgcccctccagcctgctggagccggagccggagccggagccggagccggagccggagccagagccagagctcgaggactcaccggcccagtctccgtccgggatggggccccgctcccgggcgcgttgccgcccagtcccggggaccgtccctaccgcgagggtctgaggcgcggctgccccggggagggtggaaggccaggcgtggggcccgaacctctggctgactttggcagggcccatctggcacggcctccgcggcgcgcagctgttttcaagtcagcaaacatttactgaggatctactatgtacaagatgaacatctgcaacaagccctccaacaagacggcccctgagaagagtgtgtggacggcaccggcacagcccagcggaccctcccctgagctgcagggccagcgatcccgccggaatgggtggagctggccccctcacccgctccagattgtggcctggctgctgtacctcttctttgctgtgatcggctttgggatccttgttcccctcctgcctcaccactgggtgcccgctggctacgcttgcatgggcgccatctttgctggccaccttgtggtgcacctgaccgccgtctccatcgatccagcagatgccaacgtgcgggacaagagctatgcggggcccctgcccatcttcaaccgaagccagcacgcacatgtcattgaagacctgcactgcaacttgtgcaacgtggatgtgagcgctcgctccaagcactgcagcgcctgcaacaagtgcgtgtgcggtttcgaccaccactgcaagtggctcaacaactgtgtgggcgagcggaactaccggctctttctacacagtgttgcatccgctttactgggcgtcctgctcctggtgctggtggccacatatgtcttcgtggagttctttgtcaaccccatgcgtctgcgcaccaaccgacactttgaagtcctgaagaatcacacggatgtgtggttcgtgttcctgcctgccgcccccgtggagacccaggcccctgccatcctggccctggccgccctgctcatccttctgggcctcctgtccacagccctcctggggcacctgctctgcttccacatttatctcatgtggcacaagctcaccacctatgagtacatcgtgcagcaccgcccaccacaggaggccaagggggttcacagggagctcgagtcatgtcctcccaagatgcggcccattcaggagatggagttctacatgcggaccttcagacatatgcgcccagagccccctggccaggccgggccagcagcagtgaatgccaaacactctcgccctgcctccccggatccgaccccaggtaggagggactgtgctgggcctccggtccaggtggagtgggatagaaagaagcctctaccctggcgctcgcctctgcttcttttggcgatgtggggccctcaggctcccccgtgtctctgcagaaaaagaggaagaggcgcgtgtataaagtgcgaacgtctgagacctcggatccggcgtcggggcctagggcccccagccgccgctccagctcgtcgacggattccgcggacgccagccctgtgcacgccgctggccctgccggcgcctaccactcggcgtcggcagagtccgtggacgagattccagtggcgcagacgcgcctgggcagcgccgctctggccgccccgcggggccggggccgacagcccacgctggcgcggcaggcgcgtgcgcccgccgttttcgtgagcccgagcagcggcgagcccagggcgccgggcggccgggaggctggtctggcttagctgggccgagaggccggagggccgagttagagcggccggcctgactctctatgcaacaccccatccttgccgcaccgagtgcactttaggggcccctacggccggcgggatcggcctccctcccccacgactcagcaatacccgccccaccggctgtgatgctccaataaacttttttatgcttttgcgga

SEQ ID NO: 175529 - DNA, 91 bp, Artificial Sequence
  derived and/or modified sequence
aatggaattgaacggaaacatcagcgaatggaatcgaaaggaatcatcatggaatagattcgaatggaatggaaaggaatggaatggaatg

SEQ ID NO: 175530 - protein, 319 aa, Artificial Sequence
  derived and/or modified sequence
MTNSSFFCPVYKDLEPFTYFFYLVFLVGIIGSCFATWAFIQKNTNHRCVSIYLINLLTADFLLTLALPVKIVVDLGVAPWKLKIFHCQVTACLIYINMYLSIIFLAFVSIDRCLQLTHSCKIYRIQEPGFAKMISTVVWLMVLLIMVPNMMIPIKDIKEKSNVGCMEFKKEFGRNWHLLTNFICVAIFLNFSAIILISNCLVIRQLYRNKDNENYPNVKKALINILLVTTGYIICFVPYHIVRIPYTLSQTEVITDCSTRISLFKAKEATLLLAVSNLCFDPILYYHLSKAFRSKVTETFASPKETKAQKEKLRCENNA

SEQ ID NO: 175531 - protein, 18 aa, Artificial Sequence
  derived and/or modified sequence
MTNSSFFCPVYKDLEPFT

SEQ ID NO: 175532 - DNA, 960 bp, Artificial Sequence
  derived and/or modified sequence
atgaccaacagcagcttcttctgccccgtgtacaaggacctggagcccttcacctacttcttctacctggtgttcctggtgggcatcatcggcagctgcttcgccacctgggccttcatccagaagaacaccaaccacagatgcgtgagcatctacctgatcaacctgctgaccgccgacttcctgctgaccctggccctgcccgtgaagatcgtggtggacctgggcgtggccccctggaagctgaagatcttccactgccaggtgaccgcctgcctgatctacatcaacatgtacctgagcatcatcttcctggccttcgtgagcatcgacagatgcctgcagctgacccacagctgcaagatctacagaatccaggagcccggcttcgccaagatgatcagcaccgtggtgtggctgatggtgctgctgatcatggtgcccaacatgatgatccccatcaaggacatcaaggagaagagcaacgtgggctgcatggagttcaagaaggagttcggcagaaactggcacctgctgaccaacttcatctgcgtggccatcttcctgaacttcagcgccatcatcctgatcagcaactgcctggtgatcagacagctgtacagaaacaaggacaacgagaactaccccaacgtgaagaaggccctgatcaacatcctgctggtgaccaccggctacatcatctgcttcgtgccctaccacatcgtgagaatcccctacaccctgagccagaccgaggtgatcaccgactgcagcaccagaatcagcctgttcaaggccaaggaggccaccctgctgctggccgtgagcaacctgtgcttcgaccccatcctgtactaccacctgagcaaggccttcagaagcaaggtgaccgagaccttcgccagccccaaggagaccaaggcccagaaggagaagctgagatgcgagaacaacgcctag

SEQ ID NO: 175533 - DNA, 57 bp, Artificial Sequence
  derived and/or modified sequence
atgaccaacagcagcttcttctgccccgtgtacaaggacctggagcccttcacctag

SEQ ID NO: 175534 - DNA, 1786 bp, Artificial Sequence
  derived and/or modified sequence
ggttgctactgctgcggctaaccaaacagctcatgcttctctgaagacttgcagcaaggcttgctgaggctcacagaagatagccccagtgttttggagtggttttgaatgtgattctgagatcagactgactgagctggaatcctggctttatatcttaccagctacacaaccttggagtcttagaaattttttcttttcaataagcagtcatccttactttccctcaagatgacaaacagttcgttcttctgcccagtttataaagatctggagccattcacgtattttttttatttagttttccttgttggaattattggaagttgttttgcaacctgggcttttatacagaagaatacgaatcacaggtgtgtgagcatctacttaattaatttgcttacagccgatttcctgcttactctggcattaccagtgaaaattgttgttgacttgggtgtggcaccttggaagctgaagatattccactgccaagtaacagcctgcctcatctatatcaatatgtatttatcaattatcttcttagcatttgtcagcattgaccgctgtcttcagctgacacacagctgcaagatctaccgaatacaagaacccggatttgccaaaatgatatcaaccgttgtgtggctaatggtccttcttataatggtgccaaatatgatgattcccatcaaagacatcaaggaaaagtcaaatgtgggttgtatggagtttaaaaaggaatttggaagaaattggcatttgctgacaaatttcatatgtgtagcaatatttttaaatttctcagccatcattttaatatccaattgccttgtaattcgacagctctacagaaacaaagataatgaaaattacccaaatgtgaaaaaggctctcatcaacatacttttagtgaccacgggctacatcatatgctttgttccttaccacattgtccgaatcccgtataccctcagccagacagaagtcataactgattgctcaaccaggatttcactcttcaaagccaaagaggctacactgctcctggctgtgtcgaacctgtgctttgatcctatcctgtactatcacctctcaaaagcattccgctcaaaggtcactgagacttttgcctcacctaaagagaccaaggctcagaaagaaaaattaagatgtgaaaataatgcataaaagacaggattttttgtgctaccaattctggccttactggaccataaagttaattatagctttgaaagataaaaaaaaaaaaaacaaaaaaaaactcagtatgaaaaaatacagttagctagcaaatatggacaggtttacttagaaatcctgtttctaaatgcaagtcaagctttattgttaggcttgctgctactcattaacccaaatatttgtacaaaaaactaaagagtctcattgaacgaatgtaaaatcctgcaatatccttgaaatccaaaagaggtccatgacatagacccaaaggtattcatgagttattcatttaaatgcctggaactgacttcttgataaaaatataaaaaataatttccatgtaagttaccagaaagcccaccagcaacataattttaaagcctttcagattacttttaaaaaatgcagcttacatataacaacttgtgcctattttatttctaatctatcacttcaaaagatggtaatctttcaactcattattcctccaatttttaatgtcgaatttttttctaacacaataaccaaaagcttttatttataaaaaggcttgaaaaatata

SEQ ID NO: 175535 - DNA, 205 bp, Artificial Sequence
  derived and/or modified sequence
ctgcaatggggttgctactgctgcggctaaccaaacagctcatgcttctctgaagacttgcagcaaggcttgctgaggctcacagaagatagccccagagtcttagaaattttttcttttcaataagcagtcatccttactttccctcaagatgacaaacagttcgttcttctgcccagtttataaagatctggagccattcacg

SEQ ID NO: 175536 - DNA, 960 bp, Artificial Sequence
  derived and/or modified sequence
atgacaaacagcagcttcttctgtccagtgtataaagacctggagccctttacctattttttctatcttgtattcctggtgggaataattggaagctgttttgcaacatgggcattcattcagaagaacaccaatcaccggtgcgtatcaatatatctgatcaacttgctcaccgctgatttcctgctgaccctggccttgccggtgaaaatagtcgtggacctgggggtggcaccctggaagctaaagatttttcactgtcaggtgacggcctgtttgatctatattaatatgtacttgagcatcatcttcttagcatttgtttccattgacagatgcctgcagctgacacactcttgcaaaatctaccgaattcaggaacccggctttgccaagatgatttccacagttgtgtggctcatggtactgctgattatggtcccaaatatgatgattcccatcaaagacatcaaagaaaagtcaaacgttggctgtatggaattcaaaaaagagttcgggagaaattggcatttgctgaccaattttatttgcgttgcaattttcctaaacttcagcgccatcatcctcatttctaattgcctggttattcgccagctgtacaggaataaagacaacgagaattaccctaacgttaaaaaagcccttatcaacatcctcttagtcacgacagggtatattatctgcttcgttccataccatatcgtgcggatcccatatactctctcacagaccgaagttatcaccgactgttcaacaaggattagcctctttaaggctaaggaagccactctccttcttgcagtgagcaatttatgttttgatcctatcttgtattaccatttgtcaaaggcatttaggagtaaagtgactgaaacattcgcctcgccaaaagaaactaaggctcagaaggaaaaactgagatgtgaaaataatgcgtag

SEQ ID NO: 175537 - DNA, 57 bp, Artificial Sequence
  derived and/or modified sequence
atgaccaactcatcgttcttttgtcccgtttacaaggaccttgaaccctttacctag

SEQ ID NO: 175538 - DNA, 960 bp, Artificial Sequence
  derived and/or modified sequence
atgaccaacagcagcttcttctgccctgtgtacaaggacctggagcccttcacctacttcttctacctggtgttcctggtgggcatcatcggcagctgctttgccacctgggccttcatccagaagaacaccaaccaccgctgtgtgtccatctacctgatcaacctgctgacagctgacttcctgctgaccctggccctgcctgtgaagatcgtggtggacctgggcgtggccccctggaagctgaagatcttccactgccaggtgacagcctgcctgatctacatcaacatgtacctgagcatcatcttcctggcctttgtgtccattgaccgctgcctgcagctgacccacagctgcaagatctaccgcatccaggagcccggctttgccaagatgatcagcacagtggtgtggctgatggtgctgctgatcatggtgcccaacatgatgatccccatcaaggacatcaaggagaagagcaatgtgggctgcatggagttcaagaaggagtttggaagaaactggcacctgctgaccaacttcatctgtgtggccatcttcctgaacttcagcgccatcatcctgatcagcaactgcctggtgatccggcagctgtacagaaacaaggacaatgaaaactacccaaatgtgaagaaggccctgatcaacatcctgctggtgaccaccggctacatcatctgctttgtgccctaccacatcgtgcgcatcccctacaccctgagccagacagaggtgatcacagactgcagcacccgcatcagcctcttcaaggccaaggaggccaccctgctgctggccgtgagcaacctgtgctttgaccccatcctgtactaccacctgagcaaggccttccgcagcaaggtgacagagacctttgccagccccaaggagaccaaggcccagaaggagaagctgcgctgtgagaacaatgcctag

SEQ ID NO: 175539 - DNA, 57 bp, Artificial Sequence
  derived and/or modified sequence
atgaccaacagcagcttcttctgccctgtgtacaaggacctggagcccttcacctag

SEQ ID NO: 175540 - DNA, 960 bp, Artificial Sequence
  derived and/or modified sequence
atgaccaacagcagcttcttctgccccgtgtacaaggacctggagccttttacatacttcttctaccttgtgttcttagtcggcatcattgggtcctgctttgcgacttgggcatttattcagaaaaacactaatcacagatgcgtttccatatacctgatcaatttgcttacagccgatttcttgctcactctcgccctgcccgtcaaaattgtggtcgatctcggggtcgcaccatggaagctaaaaatcttccattgtcaggtcaccgcgtgtctgatctacataaacatgtatctttctattatttttctggcatttgtgagcatcgaccggtgcctgcaactaacccatagctgtaaaatctaccgtatccaggagcccggctttgcgaaaatgatctcaactgtagtctggcttatggtgctcctgataatggtccctaatatgatgattcctataaaagatattaaggaaaagtcgaacgtggggtgtatggagttcaaaaaagaattcggccgcaattggcatcttctgaccaacttcatatgtgttgccatcttcctcaacttctcagctatcatcctcatctccaattgcttagtgattcgccagctgtataggaataaggataatgagaattatcctaacgtcaagaaggccctgatcaatatcctgcttgtgacaacaggatacattatctgtttcgttccatatcatattgtgagaatcccttacacccttagccaaacagaggtgattacggactgttcaactcggatttccctcttcaaggcaaaggaggctactctgctcctggcagtttccaatctctgcttcgatccaatcctttactaccacttgagtaaagcttttaggagtaaagtaactgagacatttgcgtctccgaaggagacaaaggctcagaaagaaaaacttagatgtgaaaacaatgcctag

SEQ ID NO: 175541 - DNA, 57 bp, Artificial Sequence
  derived and/or modified sequence
atgaccaacagcagcttcttctgccccgtgtacaaggacctggagccatttacgtag

SEQ ID NO: 175542 - DNA, 960 bp, Artificial Sequence
  derived and/or modified sequence
atgacgaactcctcttttttttgtcctgtgtataaggatctagaaccttttacatattttttctatttggtctttctggtgggaatcatagggtcttgcttcgctacctgggccttcattcagaagaatactaaccatcgctgtgtgtctatctacctcattaaccttcttacagccgactttctgttgacattggcgctgccggttaagattgtcgtggatcttggcgtggcaccatggaaactgaaaatctttcattgccaggtaacagcatgtctcatatatattaatatgtaccttagtataatttttctcgctttcgtgtctattgatcgatgcctgcaattgacccactcgtgtaagatctaccggattcaggaaccaggcttcgccaaaatgatcagtaccgtggtctggctgatggttctccttattatggtgccaaacatgatgatccccatcaaggacattaaagagaaatcaaatgtcgggtgcatggagtttaaaaaagagtttgggaggaattggcacctattgactaatttcatctgcgtggccatctttctcaatttctccgctatcatcctcatttccaattgtctggtgatcaggcagctgtaccgaaataaagataacgaaaactacccgaatgtgaagaaagcccttattaacatacttctggttaccacgggatatatcatttgctttgtgccctaccatatcgtgcggatcccatatactttgtcccagacagaagtaatcactgactgctcaacaagaatcagccttttcaaggcaaaggaagcaaccctcctgctggctgtttcaaatttatgtttcgatccgattctgtactaccacctcagtaaagccttcagaagcaaagttactgagacatttgctagtcctaaggagactaaagcacagaaggagaagcttcgctgcgaaaacaatgcttag

SEQ ID NO: 175543 - DNA, 57 bp, Artificial Sequence
  derived and/or modified sequence
atgactaatagctctttcttttgccctgtgtacaaggacttggaacccttcacttag

SEQ ID NO: 175544 - protein, 719 aa, Artificial Sequence
  derived and/or modified sequence
MSVDKAELCGSLLTWLQTFHVPSPCASPQDLSSGLAVAYVLNQIDPSWFNEAWLQGISEDPGPNWKLKVSNLKMVLRSLVEYSQDVLAHPVSEEHLPDVSLIGEFSDPAELGKLLQLVLGCAISCEKKQDHIQRIMTLEESVQHVVMEAIQELMTKDTPDSLSPETYGNFDSQSRRYYFLSEEAEEGDELQQRCLDLERQLMLLSEEKQSLAQENAGLRERMGRPEGEGTPGLTAKKLLLLQSQLEQLQEENFRLESGREDERLRCAELEREVAELQHRNQALTSLAQEAQALKDEMDELRQSSERAGQLEATLTSCRRRLGELRELRRQVRQLEERNAGHAERTRQLEDELRRAGSLRAQLEAQRRQVQELQGQRQEEAMKAEKWLFECRNLEEKYESVTKEKERLLAERDSLREANEELRCAQLQPRGLTQADPSLDPTSTPVDNLAAEILPAELRETLLRLQLENKRLCRQEAADRERQEELQRHLEDANRARHGLETQHRLNQQQLSELRAQVEDLQKALQEQGGKTEDAISILLKRKLEEHLQKLHEADLELQRKREYIEELEPPTDSSTARRIEELQHNLQKKDADLRAMEERYRRYVDKARMVMQTMEPKQRPAAGAPPELHSLRTQLRERDVRIRHLEMDFEKSRSQREQEEKLLISAWYNMGMALQQRAGEERAPAHAQSFLAQQRLATNSRRGPLGRLASLNLRPTDKH

SEQ ID NO: 175545 - DNA, 2160 bp, Artificial Sequence
  derived and/or modified sequence
atgtcagtcgacaaggccgaactctgtggctctttgttgacctggcttcagactttccacgtcccaagcccttgtgctagtccacaagatctcagttcgggcttagctgtggcctatgtcttgaaccagatcgatccctcatggtttaacgaagcatggttgcagggcatttccgaagacccggggcccaactggaagctcaaggtctcgaacctgaagatggtgctccgaagtttggtcgaatattcacaggatgtactggcccatcccgtcagcgaggagcacttaccggacgtaagcctcatcggcgaattcagcgaccctgcagaactaggcaaacttttgcaactggtcctggggtgcgccattagttgcgaaaagaaacaggatcacatacagaggatcatgactctcgaagaatccgtgcaacacgtcgtgatggaggcgatccaagagctcatgacaaaagacacacctgatagtctttcacccgaaacgtacgggaatttcgattcgcagtcccggagatactacttcttgtccgaagaggccgaggaaggcgatgagctacagcaaagatgcttagatctagaaagacagctgatgctattgagtgaggaaaaacagtcactcgcacaggaaaatgccggacttagggaaagaatgggacggcctgagggggaggggaccccaggcctcacagccaaaaaattactccttctgcaatctcaactcgagcaactgcaagaggaaaacttccgtctggagtccggtagagaagacgagcgcctgcgatgtgccgagctggagcgggaggtggcagaactgcagcaccgtaaccaggcgttgaccagtcttgctcaggaagcccaagcattgaaggatgaaatggacgagcttaggcaatcctcggaacgcgctgggcagctcgaggcgaccctgacctcttgtcgacgaaggcttggtgagttgcgggagcttcggcggcaggtcagacagttggaggagagaaacgccggccacgccgagagaacacgacagttggaggacgaattaagaagggcaggatctctcagagctcagctggaggcacagaggaggcaagtccaggagttgcagggtcagcgtcaggaagaagccatgaaagccgagaaatggctgttcgaatgcaggaacctggaggagaagtacgagtctgtcaccaaggagaaggaacggctattagcagaacgtgactcactgcgagaggccaacgaagagttacggtgcgcgcagctccaaccgcgcggacttacacaggccgatccaagccttgatcctacgagcactccagttgacaatttagcggcagaaatcctgcccgcagagctgcgtgaaactctcctccgccttcagttagagaataagcggctctgccgccaagaagccgctgatcgggaacgtcaggaggagctgcaacgacacttagaagacgcaaaccgtgcacgccacggcctcgaaacccagcaccgtctcaaccagcagcaactctccgagttgagagcccaggtagaggatcttcagaaagccctgcaagagcagggcggcaagaccgaagatgctatttcaatcctcctcaagcgcaagttggaagagcatctgcagaaacttcacgaagccgacctggaactccagagaaaacgggagtatattgaagagcttgaaccccccaccgatagcagcacagctcgtagaattgaagaattacagcacaatctccagaaaaaagacgcagatctgcgagcgatggaggagcgctaccgacggtacgtcgataaggcccgcatggtcatgcagactatggagccaaaacagaggccagctgcgggcgccccgccagaactccacagcctacgtactcagctgcgcgagcgggatgtaaggatccggcatctggagatggattttgagaaaagtcggagtcaaagggaacaagaggaaaagctgcttattagcgcctggtataacatgggcatggctcttcagcagcgtgctggggaggaacgcgcaccagcccacgcacaatctttcctggcccagcagcggttagccacaaattccaggagaggcccactggggcgtctggcctctcttaatctgcgtcccaccgacaagcactag

SEQ ID NO: 175546 - DNA, 2610 bp, Artificial Sequence
  derived and/or modified sequence
gaggcggagcctgggcttgggggcggggcggggcctgcgcctaggggggcggggcggggcggcgctctaggccgagcgggaggtcggggctgcgggcgctcgctggtggcggacccggaggctgctgcggcgccggggctccgtggcctggattgaatccgatcgggagccatgagcgtggacaaagctgagctatgcgggtctctgctcacctggttacagacgttccacgttccgtctccctgtgccagccctcaggacctgagcagcggccttgccgtagcctatgtgctgaaccagatagacccctcctggttcaacgaggcatggctccagggcatctcggaagatccaggtcccaactggaagctgaaggtcagcaatctgaagatggtcttacggagcctagtagagtactcccaggatgtcctggcgcatcctgtgtcagaagagcatctcccagatgtgagcctcattggagagttctcagacccggcagagctcggcaagctgcttcagctggtgctgggctgtgccatcagttgcgagaaaaagcaggaccacatccagagaatcatgacgctggaagaatcggttcagcatgtggtgatggaagccatccaagagctcatgaccaaagacactcctgactccctgtcaccagagacgtatggcaactttgacagccagtcccgcaggtactatttcctaagtgaggaggctgaggagggggacgaattacagcagcgctgtctggatctggagcggcagctgatgctcctgtcagaggagaagcagagcctggcgcaagagaatgcagggctgcgggagcggatgggccggcctgaaggcgagggtaccccaggtctcactgccaagaagctgctgctgctgcaatcccagctggagcagttgcaggaggagaacttcaggctggagagtggcagggaggatgagcgcctgcgctgtgccgagctggagagggaggttgcggagctgcagcaccggaaccaggcgctgactagcctggcccaggaggcacaggccctgaaggatgagatggatgaactacggcagtcttcggagcgtgctgggcagctggaggccacgctgaccagttgccggcgccgcttgggcgagctgagggagctgcggcggcaggtgcggcagctggaggaacgcaacgccggccacgccgagcgcacgcgacaactggaggatgagctacgccgagcgggctccctgcgcgcccagctggaggcgcagcggcggcaggtgcaggaactgcagggccagcggcaggaggaggccatgaaggccgagaaatggctatttgaatgccgcaacctggaggaaaagtatgagtcggtgacaaaggagaaggagcggctgttggcggagcgggactccttgcgggaggccaatgaggagctgcgctgcgcccagctgcagccgcgggggttgacccaggccgatccctcactggatcccacctccacacccgtggataacttagccgcagagatcctgcctgcggagctcagggagacgctcctgcggcttcagctggagaacaagcggctgtgcaggcaggaggcggccgaccgggagcggcaggaggagctgcagcgccacctggaggatgccaaccgcgcgcgccacgggttggagacgcagcaccggctgaaccagcagcagctatccgagctgcgggcccaggtggaggacctgcagaaagccctgcaggagcaggggggcaagactgaagatgccatttccattttgctgaaaaggaagctggaggaacatttgcagaagcttcatgaggcagatctggagttgcagaggaagcgggagtacattgaggagctggagccacccactgacagcagcacagcccggcggatcgaggagctgcagcataacttgcagaagaaggacgcggacttgcgggccatggaggagcgataccgccgctacgtggacaaggcccgcatggtcatgcagaccatggaacccaagcagcggccagctgcgggggcacctccagaactccattccctgaggacacagctccgagaacgggatgtccgcatccgacacctggagatggactttgagaaaagccgaagtcagcgggagcaggaagaaaagctgctcatcagtgcctggtataatatgggcatggccttgcagcagcgagctggggaggagcgggcgcctgcccatgcccagtcattcctggcacagcagcggctggcaaccaattctcgccgtggacccttgggacgcctggcatctctgaaccttcgccccactgacaagcactgacagacctcacaatcaagccagcctgggctccacccaccctggcttcctccagctcacatggcgcccagcactgggcttcagccaggtgctcgagagctttgaggccatgatctctgctcttccctctcccagattggtggggagggagggcgggaggtagatataggcctgttctttttagcaatgtgattcttgttgttgattctctctctggagttcatgtgctgcctcaggagactctgattttatatttgagaaaaataaaggcgttcaatctgc

SEQ ID NO: 175547 - DNA, 2160 bp, Artificial Sequence
  derived and/or modified sequence
atgtctgtggacaaggccgagctgtgtggcagcctgctgacctggctgcagaccttccacgtgcccagcccctgtgccagcccccaggacctgagcagcggcctggccgtggcctacgtgctgaaccagattgaccccagctggttcaatgaggcctggctgcagggcatcagtgaagatcctggccccaactggaagctgaaggtgagcaacctgaagatggtgctgcggagcctggtggagtacagccaggatgtgctggcccaccctgtgtctgaggagcacctgcctgatgtgtccctcatcggggagttcagtgaccctgctgagctgggcaagctgctgcagctggtgctgggctgtgccatcagctgtgagaagaagcaggaccacatccagaggatcatgaccctggaggagagcgtgcagcacgtggtgatggaggccatccaggagctgatgaccaaggacaccccagacagcctgagccctgagacctacggcaactttgacagccagagccgccgctactacttcctgtctgaggaggccgaggagggagatgagctgcagcagcgctgcctggacctggagcggcagctgatgctgctgtctgaggagaagcagagcctggcccaggagaatgccggcctgcgggagaggatgggccggcctgagggggagggcaccccaggcctgacagccaagaagctgctgctgctgcagagccagctggagcagctgcaggaggagaacttccggctggagagcggccgggaggatgagcggctgcgctgtgccgagctggagcgggaggtggccgagctgcagcacaggaaccaggccctgaccagcctggcccaggaggcccaggccctgaaggatgagatggatgagctgcggcagagcagcgagagagctggccagctggaggccaccctgaccagctgcagaagaaggctgggggagctgcgggagctgcggcggcaggtgcggcagctggaggagagaaatgccggccacgccgagaggacccggcagctggaggatgagctgcggcgggccggcagcctgcgggcccagctggaggcccagaggcggcaggtgcaggagctgcagggccagaggcaggaggaggccatgaaggccgagaagtggctgtttgaatgtagaaacctggaggagaagtatgaatctgtgaccaaggagaaggagcggctgctggccgagcgggacagcctgcgggaggccaatgaggagctgcgctgtgcccagctgcagccccggggcctgacccaggccgaccccagcctggaccccaccagcacccctgtggacaacctggccgctgagatcctgcctgctgagctgcgggagaccctgctgcggctgcagctggagaacaagaggctgtgccggcaggaggccgctgaccgggagcggcaggaggagctgcagaggcacctggaggatgccaacagagcccggcacggcctggagacccagcaccggctgaaccagcagcagctgtctgagctgcgggcccaggtggaggacctgcagaaggccctgcaggagcagggcggcaagacagaagatgccatcagcatcctgctgaagaggaagctggaggagcacctgcagaagctgcatgaagctgacctggagctgcagaggaagcgggagtacatcgaggagctggagcccccaacagacagcagcacagccaggagaattgaggagctgcagcacaacctgcagaagaaggatgctgacctgcgggccatggaggagcgctacagaagatatgtggacaaggccaggatggtgatgcagaccatggagcccaagcagaggcctgctgctggggcccctcctgagctgcacagcctgcggacccagctgcgggagagagatgtgcgcatccgccacctggagatggactttgagaagagccgcagccagcgggagcaggaggagaagctgctgatcagcgcctggtacaacatgggcatggccctgcagcagagagctggggaggagcgggccccagcccacgcccagagcttcctggcccagcagaggctggccaccaacagcagaagaggccccctgggccgcctggccagcctgaacctgcggcccacagacaagcactag

SEQ ID NO: 175548 - DNA, 2160 bp, Artificial Sequence
  derived and/or modified sequence
atgagcgtggacaaggccgagctgtgcggcagcctgctgacctggctacagacatttcatgtacccagcccttgcgcttctccccaggacttgtcaagcggcctggctgtcgcttacgtgctgaaccaaatcgaccctagttggttcaatgaggcctggcttcagggcatctctgaggaccccgggcccaattggaagctgaaggtctcaaacttgaagatggttctgagaagcctcgtggagtatagccaggatgtgctcgcccacccggtgagcgaagagcacttgcccgatgtcagtttgattggggaattctccgatccagcagagctcgggaagcttctccaactagtgttaggctgcgccattagctgtgagaagaaacaggatcacatccaacggataatgactctggaggagtcagtccaacacgtggttatggaagcaatccaggagcttatgacgaaggatacacctgactctctgagccccgagacgtacggaaatttcgacagccaatcccgaaggtattacttcctttcagaggaagcagaggagggcgacgagctgcagcagcggtgtctggacctggagcgccaattaatgctgctgagcgaagagaagcaatctctagcacaggagaacgctgggctccgcgaaagaatgggacgcccggagggggaggggactccaggcctcactgcgaagaaacttttactgctgcaatcccagcttgagcagctacaggaagaaaatttccgattggaatccggccgcgaggatgagagactaaggtgtgctgaactagagcgcgaggtggccgaacttcagcaccgaaaccaagccctgacctccttggcacaggaagcacaagcgctgaaagatgagatggatgaactgcggcagagctcagagcgagccggtcaacttgaagctacacttacatcatgccgacgaaggttgggggagctaagagaactgcggaggcaggtcagacagctcgaagagcgaaacgccgggcacgccgagagaacgcgccaattggaggatgagctaaggcgcgcagggagcctcagagcacagctagaagcacagaggaggcaggttcaggagctacaaggccaacggcaggaggaggctatgaaggccgagaagtggcttttcgagtgtaggaacctggaggagaaatacgagagcgtgactaaggagaaagaaaggctattggctgagcgggattctctccgggaggcaaacgaggaattgcgatgcgcccagcttcaacctcgagggctaactcaggctgacccaagccttgaccccacttccacacccgtagataaccttgccgcagagatcttgcctgccgagctgcgggaaacgttactgcgacttcagctcgagaataagagactctgtcggcaagaagccgccgacagagaaaggcaggaggagttacagaggcacttggaagatgctaaccgggcaagacatggactcgaaactcaacaccgactcaatcagcagcagttatctgagttgagggcacaagtcgaagaccttcagaaagcgctgcaggagcaagggggcaaaactgaggatgctatttccattctgctgaagagaaaactggaagaacatctgcagaaactccacgaagctgatctcgagttgcagcgcaagcgggagtacattgaggaattggagccgcctacggactcctctacggcaagaagaattgaagaactccaacacaatctgcagaaaaaggatgcggatcttagagcaatggaagagagatacaggcggtacgttgacaaagccagaatggtgatgcaaacaatggaacccaaacagaggccagcagcgggggctccaccagaattacactctctgcgcacccagctgagagagcgcgacgtgaggatccggcacctggaaatggacttcgaaaagtccaggtctcagcgtgagcaggaggaaaaactgctaatctccgcatggtacaacatggggatggccctgcaacagcgagccggcgaagagcgggcccccgcacacgcccaatctttcctggcacagcagcggttggctaccaacagccggcgcggccccttagggcgattggccagccttaatcttcgccctacagacaagcactag

SEQ ID NO: 175549 - DNA, 2160 bp, Artificial Sequence
  derived and/or modified sequence
atgtctgtggacaaagccgagctatgcggctctcttctcacctggcttcagacgttccatgtcccaagtccttgcgcttctccccaggatctgtctagcggcttagcggtggcttacgtgctcaatcagattgatccatcctggttcaatgaagcctggttgcagggtatctcggaggatccgggacctaattggaaactgaaggtgagcaacttaaagatggtgctacgctcactggtggaatatagccaagatgtcctggctcaccccgtgtcagaagagcaccttcccgacgtatccctgatcggcgaattttcagaccctgccgaactggggaaactgctgcagttggtgctggggtgcgccatttcctgtgaaaaaaagcaggatcacatacagaggatcatgaccttagaagagtcggtacaacacgtagtgatggaggcaatccaggaactgatgactaaggatacacctgactcccttagtcccgagacttatggtaatttcgacagtcagagtaggcgatattatttcttaagcgaagaggcggaggagggcgacgaactccagcagcggtgcctggatctggagaggcagttgatgctgctgagcgaagaaaagcagagtctagctcaggagaacgctggtctccgggagagaatgggacgacccgagggcgagggaacccctggcctcactgctaaaaaactgcttctcctgcagagccaattagagcagctccaggaggagaatttcaggctggagtctggccgagaggacgaaagattgcggtgcgcagaattagaacgtgaggtggcagagctccagcacaggaaccaggccctgaccagcctcgcccaggaggcccaggcccttaaggatgagatggacgagctgcggcaatcatcagagcgcgcaggacagctggaggcaacactgacctcctgtaggcgacggctaggcgagctgcgcgagctgagacggcaagtgaggcaattggaggaacggaatgccggtcatgcagagcgcacccgccagcttgaggatgagctgcgcagggctggctctctgcgagctcagttagaggcccagcgccgtcaagtgcaagagctgcaagggcagaggcaggaggaagctatgaaggcggagaagtggctgtttgagtgccggaacctggaggaaaagtacgagagtgttacgaaagaaaaggaacgtttgttggctgagcgcgatagcctgcgtgaagccaacgaggaattaagatgtgcgcaactccagccccgagggctgacacaggctgacccctcacttgacccgacgagcacccctgtcgacaatcttgcagctgagatactgcccgcagagctgcgcgagacactgctgaggctgcagcttgagaacaaacgactgtgccggcaggaggcagcggatagagagaggcaggaggagttacaacgacatctcgaggatgccaaccgcgctcgccacggcctggagacacaacataggctgaaccaacagcagctgtccgaactgagagcacaggtcgaagacctgcagaaagctctgcaggagcagggaggcaagactgaggacgctatatctattttactgaaacgcaagttggaggagcacctccagaagttgcacgaagccgacctcgaactccagcggaagagagaatatattgaggagctggagcccccaactgacagctcaacagccagacgtattgaggaactgcagcataacttacaaaagaaagacgctgatcttagggcaatggaggagcgataccgcaggtatgtggacaaagcacgaatggtcatgcagaccatggagcccaagcagaggccggcagccggtgccccacccgagctgcacagtttaaggactcagctgagagaaagagatgtgcggatacggcatttggaaatggacttcgagaaaagccgttctcaacgcgagcaagaagagaagctgctcataagtgcctggtataatatgggcatggctttgcagcagcgggctggagaggagcgggctcctgcccacgcacagtcttttctggctcaacagcggctcgcaaccaattcaagacgtggcccactgggcaggctagcatctttaaatctgcgcccaactgacaaacactag

SEQ ID NO: 175550 - DNA, 2160 bp, Artificial Sequence
  derived and/or modified sequence
atgagcgtggacaaggccgagctgtgcggcagcctgctgacctggctgcagaccttccacgtgcccagcccctgcgccagcccccaggacctgagcagcggcctggccgtggcctacgtgctgaaccagatcgaccccagctggttcaacgaggcctggctgcagggcatcagcgaggaccccggccccaactggaagctgaaggtgagcaacctgaagatggtgctgagaagcctggtggagtacagccaggacgtgctggcccaccccgtgagcgaggagcacctgcccgacgtgagcctgatcggcgagttcagcgaccccgccgagctgggcaagctgctgcagctggtgctgggctgcgccatcagctgcgagaagaagcaggaccacatccagagaatcatgaccctggaggagagcgtgcagcacgtggtgatggaggccatccaggagctgatgaccaaggacacccccgacagcctgagccccgagacctacggcaacttcgacagccagagcagaagatactacttcctgagcgaggaggccgaggagggcgacgagctgcagcagagatgcctggacctggagagacagctgatgctgctgagcgaggagaagcagagcctggcccaggagaacgccggcctgagagagagaatgggcagacccgagggcgagggcacccccggcctgaccgccaagaagctgctgctgctgcagagccagctggagcagctgcaggaggagaacttcagactggagagcggcagagaggacgagagactgagatgcgccgagctggagagagaggtggccgagctgcagcacagaaaccaggccctgaccagcctggcccaggaggcccaggccctgaaggacgagatggacgagctgagacagagcagcgagagagccggccagctggaggccaccctgaccagctgcagaagaagactgggcgagctgagagagctgagaagacaggtgagacagctggaggagagaaacgccggccacgccgagagaaccagacagctggaggacgagctgagaagagccggcagcctgagagcccagctggaggcccagagaagacaggtgcaggagctgcagggccagagacaggaggaggccatgaaggccgagaagtggctgttcgagtgcagaaacctggaggagaagtacgagagcgtgaccaaggagaaggagagactgctggccgagagagacagcctgagagaggccaacgaggagctgagatgcgcccagctgcagcccagaggcctgacccaggccgaccccagcctggaccccaccagcacccccgtggacaacctggccgccgagatcctgcccgccgagctgagagagaccctgctgagactgcagctggagaacaagagactgtgcagacaggaggccgccgacagagagagacaggaggagctgcagagacacctggaggacgccaacagagccagacacggcctggagacccagcacagactgaaccagcagcagctgagcgagctgagagcccaggtggaggacctgcagaaggccctgcaggagcagggcggcaagaccgaggacgccatcagcatcctgctgaagagaaagctggaggagcacctgcagaagctgcacgaggccgacctggagctgcagagaaagagagagtacatcgaggagctggagccccccaccgacagcagcaccgccagaagaatcgaggagctgcagcacaacctgcagaagaaggacgccgacctgagagccatggaggagagatacagaagatacgtggacaaggccagaatggtgatgcagaccatggagcccaagcagagacccgccgccggcgccccccccgagctgcacagcctgagaacccagctgagagagagagacgtgagaatcagacacctggagatggacttcgagaagagcagaagccagagagagcaggaggagaagctgctgatcagcgcctggtacaacatgggcatggccctgcagcagagagccggcgaggagagagcccccgcccacgcccagagcttcctggcccagcagagactggccaccaacagcagaagaggccccctgggcagactggccagcctgaacctgagacccaccgacaagcactag

SEQ ID NO: 175551 - protein, 119 aa, Artificial Sequence
  derived and/or modified sequence
MVKMTKSKTFQAYLPNCHRTYSCIHCRAHLANHDELISKSFQGSQGRAYLFNSVVNVGCGPAEERVLLTGLHAVADIYCENCKTTLGWKYEHAFESSQKYKEGKFIIELAHMIKDNGWE

SEQ ID NO: 175552 - DNA, 360 bp, Artificial Sequence
  derived and/or modified sequence
atggtgaagatgaccaagagcaagaccttccaggcctacctgcccaactgccacagaacctacagctgcatccactgcagagcccacctggccaaccacgacgagctgatcagcaagagcttccagggcagccagggcagagcctacctgttcaacagcgtggtgaacgtgggctgcggccccgccgaggagagagtgctgctgaccggcctgcacgccgtggccgacatctactgcgagaactgcaagaccaccctgggctggaagtacgagcacgccttcgagagcagccagaagtacaaggagggcaagttcatcatcgagctggcccacatgatcaaggacaacggctgggagtag

SEQ ID NO: 175553 - DNA, 360 bp, Artificial Sequence
  derived and/or modified sequence
atggttaagatgactaagtccaagacctttcaggcttatctccctaactgtcaccgaacctacagctgcattcactgtcgggcacacctcgcaaatcatgatgagctaatctctaaatcctttcaaggcagccagggcagagcctacctgtttaactcagttgtcaacgtgggatgcggccccgccgaggagcgagtgttgctgacaggcctgcacgccgtcgccgacatatactgcgaaaattgtaaaaccactctaggctggaagtatgagcacgcttttgagagctcacagaaatataaggaaggtaagtttataatcgagctggcccacatgatcaaggataacggatgggaatag

SEQ ID NO: 175554 - DNA, 360 bp, Artificial Sequence
  derived and/or modified sequence
atggtgaagatgaccaagagcaagaccttccaggcctacctgcccaactgccacaggacctacagctgcatccactgccgggcccacctggccaaccatgatgagctgatcagcaagagcttccagggcagccagggccgggcctacctgttcaacagcgtggtgaatgtgggctgcggccctgctgaggagcgggtgctgctgaccggcctgcatgctgtggccgacatctactgtgagaactgcaagaccaccctgggctggaagtatgagcacgcctttgagagcagccagaagtacaaggagggcaagttcatcatcgagctggcccacatgatcaaggacaatggctgggagtag

SEQ ID NO: 175555 - DNA, 360 bp, Artificial Sequence
  derived and/or modified sequence
atggtgaagatgaccaagagcaagaccttccaggcctacctgcccaactgccaccgaacatattcttgtatacactgccgggctcacctggcgaaccatgatgagctgatttctaagtctttccagggctctcagggccgagcctatctgtttaattcggttgtaaatgtgggttgcggccccgccgaggaacgggttctcctgaccggactgcacgcggttgccgacatatattgcgaaaattgcaaaactacgctcggctggaagtatgagcacgcattcgagtcttcacagaagtacaaggaaggaaagtttattatagaactggcccacatgataaaggataatggatgggagtag

SEQ ID NO: 175556 - DNA, 360 bp, Artificial Sequence
  derived and/or modified sequence
atggtgaaaatgaccaagtccaaaaccttccaggcatacctgcccaactgtcaccgtacctacagctgcatccattgccgtgcccacctggctaaccatgatgagctcatttcaaaatcctttcagggatcacagggacgtgcctatctcttcaactctgtcgtgaacgttgggtgtggacctgccgaggaaagagtgctcctgacaggtctgcacgcagttgccgatatctactgtgaaaattgcaagaccacacttggatggaagtatgagcatgccttcgagagtagccagaaatacaaggaagggaagtttataattgaacttgcacacatgatcaaggacaacgggtgggagtag

SEQ ID NO: 175557 - DNA, 4329 bp, Artificial Sequence
  derived and/or modified sequence
ctccaaggctgttaacggcgtctgggccgggctacggctccaaaacaaagggcaggcggcccgcggggcggcggcgggaggatgcctcgcgccctgcctaggcgttaacggcctcagcgcgtcccgggccgcgccgggaacgcctgagagccgagcccgcgctgaccggggcccgggccggatgggcgctgcgggccggggcgcggaccgcggagcggccgttacgtttttctctcgtcccagctgtgtggacagtgccacacgccctcctggacaacgacggctcttgcgtgcattttccagtgttgcttttgtcagagaggccagcagagccacggttcttccagaaccagccctgagctgagtgaggagtgcccaggagagatggtgaaaatgacaaagtccaaaactttccaagcgtatctgccgaactgtcaccgaacgtacagctgtatccactgcagagcacacctggccaatcatgacgagctcatctccaagtcctttcaggggagccagggacgcgcctacctcttcaattccgtggtgaacgtgggctgcggccctgcagaggagagggtccttctcaccgggctgcatgcggttgccgacatctactgcgagaactgcaagaccacgctcgggtggaaatacgagcatgcctttgagagcagtcagaaatataaggaaggaaaattcatcattgagcttgctcatatgatcaaagacaatggctgggagtaatgtgcgaactttcccttctcctttgaatgctgttttgtgaaagaaactgtgaatgtaatggaaacgtaggagcatctggtgacagcctttcttgccctctgacctcaaaggctagctgcgcatagctcttgacactctcggccatctctgtgggtaaggtgtccctcggatctgtcctcttcgtgtacacagttgtttctgaaaattttcaatgagctttttctaacttctcaagttctagagaaagaattaaccaactgatgacttacctgcctagttaatatcttcctttcacctttgtcttcaatatagttgggctctgcttttttaaggttcagttgaaaaccaaactggggccgggtgcggtggctcacgcctgtaatcccagcactttgggaggccaagatgggtggatcacctgaggtcaggagttctagatcagcctggccaacatggtgaaaccccatctctactaaaaatacgaaaattagccgggcatggtggcgagtgcctgtaatcttagctactcaggaggctaaggcaggagaatcacttgaacctgggacacggaggttgcagtgagctaagatcatgccatcgcactccagcctgggggacaaaagtgagacatcgtctcaaaaaaaaaaaaaaaagctgggtatggtggcgcatgcctttaatcccagctactcgggaggctgaggcacgagaatcacttgaacccaggaggcggaggttgcagtgagccaagatcgcgccactgcactccagcctggcaatagggcgagactccgtctcaatttaaaacaagagagaaccagactgagtctctgaagaccacagggacagggtctctttagatagcaagtctcaccattcccttttttagagaaaaggtattgtagcccaccctccaccccgctgtttttcttaaatttgcagaacttcaaattggctattcctcttgcaaatgaacccttaaagtacagtgttatttaagaatcttccagaggcagtcaacagacttatacactaagggcatttttggtttttagcttgttcaaaaacagaggccagcacagatgacattttagatacactctaaattgagaatggtgtctagtggaacatgtttatttaagccagtagattccttatctagaaagcaggtgagctagcccttagagaaggctgtcccggggcccgcagaggtgcccttactgaggtgacagcctcacagggtctggtaccaggggttgtgccctcagcagtgacagcagcttaggtgtcaggcagttgctgagtggctggtccatgtctatagagtaacacactggaccgaggaaaagtcagatttcattttctaccctggatgtacttgaagaaaaagaattatttttgcatatgaaagaggccagaacccacaggaaaaacttcaaaacttgacatttgccagaatgtttaaaatttgttcagaaaaggttaaagcaacaagtttagcctttgtgcatgaagacgcctggcctgctagacgcgttgcccgtccctgcgtggtgctgtcccatgtcacttgaactgatagaggggcctgtgcaatctcctaaggcctgtgtttctgccatatattttattataaattacaatccactcatccacctgccctccaccaggagtgggcaccccataagggtttaggccactttgcagaggatggaggtcaaaaaccactcccagataagtttggttttcaacatttagtaacttgtctcagggcagagggcaggcagggggaccgaggggcagcagataggagagcactgagcccggatagttctcagcctggcaagtggctctgaagctgccttcagacaaggctagtctaggggcaagagtgcgagctggctgacaataagaacgtggccacctgcccagcttcacacctcccccgacttcagcccttcctaaacccagacctgcggtccaggcaggcactgggctgtgcccactcgagctcactgcccacacacagcatgcctttgggtgccatctctttgcccaagcctggaagccttggcaggtgggaaatgccgctgccctggtgggcatggcactgagatgcatccactcagcaggagtgacagaggcagaagttcctttaaagcacatcttccacttaggaaaggaaggaaatctttgtactgtcttggaagcctccacatccggctatggccctgcaagctgctttatccctgcgctagtctcccccgagggtttaggctggcccagcacatcctgtcctcctgagctcgcgtgcagccacccagagcgcaggggtcactgcacgctgcagggctcttgctgccatggtctcaagcctgaagaggctccgcccacaagctggcccatgaagttagcaatgcctgtggcttcagtcaattgtcttgagactgtgaagaggctgaaagacaccttcccgggtggaagaaggagttcactgaaaacttatcttaaactgacccttccctttgagtgagtcttcattcctctcccatgtgggaacccagcctccgatgccccggggactaggggaaacagttggaggttcgtgccgtccccagcctgccacgggtgcgaggacagccaagtcctgagtgactcaagatgcttcacttacatggaagaaacttctaaaactctaccgagtggtttttgtatatactaaagttctatttagagcttttctgttttgggcaagttcgctgctccttctatttgggcactttggtttttgtactgtcttttgtgacggcattgattgaacattttttactagtagtcttatgacttttgtatttttttttttttttgtaatttataccaacaacacttttatcactttttttttgttgggcttctgcaaaatacaagctcatttttaaaccaaatgaacagaccatgagctggcttcaggggaagtgctattcacaggaccatatccaccaccctcttaaattcctaaacaatatcatctaggacttctatttaagttatttaaaataaatcttccttgagagccttgggaggtgatgtcagggttataaatggcacagtgcatttgctgtaggaatgtggtttggcattgttttatacacacagtattttttataccttaatgcttattcttgatggcatctgtcagatattagaattgaaaataagaatcttcccaaaatcctttaatttacctgatgccctcatcaggtcgttaaaaattcaaatggttttaatagctaaaaaactacaaattaagctctaaaacaaacaaactacagaaatgtaaaccttcatttgccaaaggtccttggtggcctgtcccctgccctgggagcagatggccctgaagcccttccctcactgtgcaggccaccgggtgaggctggacggtcacccatggtggcttcactgcaaggagcaggactgccgagctcaagcacggggccttcagcttcccctgtcctctggccacaccgccagcccttggtccttatctgtgtgaggtttacaaataaagcttctgatgtcaaa

SEQ ID NO: 175558 - protein, 456 aa, Artificial Sequence
  derived and/or modified sequence
MDKLNKITVPASQKLRQLQKMVHDIKNNEGGIMNKIKKLKVKAPPSVPRRDYASESPADEEEQWSDDFDSDYENPDEHSDSEMYVMPAEENADDSYEPPPVEQETRPVHPALPFARGEYIDNRSSQRHSPPFSKTLPSKPSWPSEKARLTSTLPALTALQKPQVPPKPKGLLEDEADYVVPVEDNDENYIHPTESSSPPPEKAPMVNRSTKPNSSTPASPPGTASGRNSGAWETKSPPPAAPSPLPRAGKKPTTPLKTTPVASQQNASSVCEEKPIPAERHRGSSHRQEAVQSPVFPPAQKQIHQKPIPLPRFTEGGNPTVDGPLPSFSSNSTISEQEAGVLCKPWYAGACDRKSAEEALHRSNKDGSFLIRKSSGHDSKQPYTLVVFFNKRVYNIPVRFIEATKQYALGRKKNGEEYFGSVAEIIRNHQHSPLVLIDSQNNTKDSTRLKYAVKVS

SEQ ID NO: 175559 - DNA, 1371 bp, Artificial Sequence
  derived and/or modified sequence
atggataaactgaacaagatcaccgtgcccgcctcgcagaaactcagacagcttcagaagatggtccacgatatcaagaacaatgaaggggggattatgaataagatcaaaaagctgaaagtcaaggcaccccccagcgtgccccggcgggactatgccagcgagtcacccgcagacgaagaagagcagtggtctgacgatttcgattccgactatgagaatcctgacgaacactcggacagtgaaatgtacgtaatgcccgccgaagagaacgccgacgactcgtacgagcctccccctgtggagcaggaaacacggccggtgcatccagcccttccttttgcgaggggggaatatattgacaaccggtcctcacagcgccactcgcccccattctcaaaaactctgccttccaaaccgtcgtggccctctgaaaaggcacggctgacctcgaccctccccgccttgactgctcttcagaagccacaggtcccccccaaacctaagggcctgttggaggacgaagccgactacgtggtgcccgtcgaggacaatgatgagaattacatccatccaacagagtcttcttctcccccacccgagaaggcgccaatggtgaatcgtagtacaaaacctaatagcagcacccccgcaagtcctcccggaacggccagtggtagaaattccggcgcctgggagacaaagtcgccccctcccgctgcacccagtcccctcccacgtgcgggaaagaaacctactacacccctgaagacaacgcctgttgcgagccagcagaacgcctccagcgtctgtgaagagaaacctattccagctgagcggcaccgaggctcatctcacaggcaagaggccgtgcagagtcctgtctttcctccggcgcagaagcagatccatcagaagcccattcctttacctcggttcactgagggcggcaacccgacagtggacgggcccttaccgtctttttcatcaaatagcaccattagcgagcaggaagcaggggtcctgtgcaaaccatggtatgcgggggcctgtgatcgaaagagcgccgaagaggctcttcaccgatctaataaagacggttccttcttgattcgcaagtcttccggacatgattcgaagcagccttatacgctggtggtatttttcaacaaaagagtgtataacatccctgtaaggttcatcgaagctacaaaacagtatgccttgggcagaaagaaaaacggcgaagagtacttcggtagtgtcgctgagatcatccgtaaccatcagcactcgcccctggtccttatcgactctcagaacaacactaaggattccacccgactcaagtacgcagtgaaggtcagctag

SEQ ID NO: 175560 - DNA, 1371 bp, Artificial Sequence
  derived and/or modified sequence
atggacaagctgaacaagatcaccgtgcctgccagccagaagctgcggcagctgcagaagatggtgcatgacatcaagaacaatgaaggaggcatcatgaacaagatcaagaagctgaaggtgaaggccccacccagcgtgccccggcgggactatgccagcgagagccctgcagatgaggaggagcagtggagcgatgactttgacagcgactatgaaaatccagatgagcacagcgacagcgagatgtatgtgatgcctgctgaggagaatgctgatgacagctatgagcccccacctgtggagcaggagaccaggcctgtgcacccagccctgccctttgcccggggggagtacatcgacaacagaagcagccagaggcacagcccccccttcagcaagaccctgcccagcaagcccagctggcccagcgagaaggcccggctgaccagcaccctgcctgccctgacagccctgcagaagccccaggtgccccccaagcccaagggcctgctggaggatgaggccgactatgtggtgcctgtggaggacaatgatgagaactacatccaccccacagagagcagcagccccccacctgagaaggcccccatggtgaacagaagcaccaagcccaacagcagcaccccagccagccccccaggcacagccagcggcagaaattctggggcctgggagaccaagagccccccacctgctgcccccagccccctgccccgggccggcaagaagcccaccacccccctgaagaccacccctgtggccagccagcagaatgccagctctgtgtgtgaggagaagcccatcccagctgagcggcaccggggcagcagccaccggcaggaggccgtgcagagccctgtgtttcctccagcccagaagcagatccaccagaagcccatccccctgccccgcttcacagagggcggcaaccccaccgtggatggccccctgcccagcttcagcagcaacagcaccatcagcgagcaggaggccggcgtgctgtgcaagccctggtacgccggggcctgtgacaggaagtctgctgaggaggccctgcacaggagcaacaaggatggcagcttcctgatcaggaagagcagcggccatgacagcaagcagccctacaccctggtggtgttcttcaacaagagggtgtacaacatccctgtgcgcttcatcgaggccaccaagcagtatgccctgggcaggaagaagaatggagaggagtactttggatctgtggccgagatcatccggaaccaccagcacagccccctggtgctgattgacagccagaacaacaccaaggacagcacccggctgaagtatgctgtgaaggtgtcctag

SEQ ID NO: 175561 - DNA, 1371 bp, Artificial Sequence
  derived and/or modified sequence
atggacaagctgaacaagatcaccgtgcccgccagccagaagctgcgccagctgcaaaaaatggtccacgacatcaaaaataatgagggcggtattatgaataagatcaaaaaactaaaagtcaaggctcccccaagtgtgccacgccgcgactatgcctcagaatctccagctgatgaggaggaacagtggtccgacgatttcgactcagattacgaaaatcccgatgaacatagcgattctgaaatgtacgtgatgccggctgaagagaatgctgacgactcatacgaacccccgcctgtggaacaggagaccagacctgtgcatcctgcccttccattcgcccggggtgagtatattgacaatcgctcttcgcagcgccatagtccccccttctccaaaactctgccatccaagcctagctggccgtcggaaaaggctcggcttacaagcacacttccggctctgaccgccctccagaagccgcaagtgccgcctaagcctaaggggctcttagaagacgaggccgattacgtggtgcctgtggaagataacgatgagaactacattcatccaacggaatccagttccccccctccggagaaagccccaatggtgaacagaagtacaaaacctaatagcagcacacctgcgtcgccacccggcacggccagcggaaggaatagtggggcctgggagaccaaatccccacctcctgctgcaccctctccccttccaagggcgggaaagaaacccaccacccccctaaagactactcccgtcgcatcccagcagaatgcgtccagtgtatgcgaggaaaaacctattcccgcagagaggcaccggggttcctcacacaggcaggaggccgtgcagtccccagtgttcccccctgcccaaaaacagatacaccaaaagccgataccactgcccagattcaccgagggcgggaaccccactgttgatggacccctgccaagcttttcctctaacagcaccataagtgaacaggaggctggagtactctgcaagccatggtatgcaggggcttgcgataggaagtcggccgaggaagctctccatcggtcaaacaaagacgggtcattcctgatccgcaaaagcagtgggcacgattccaaacagccatacaccctcgtagtctttttcaacaaaagggtctacaatattccggtcagattcatcgaggccaccaagcagtacgcgcttggaaggaagaagaatggggaagagtacttcggctctgtagccgagatcatccggaatcaccagcactctcccttagtcctgatcgatagtcagaacaatacgaaggactcaaccagattgaaatacgccgtgaaagttagttag

SEQ ID NO: 175562 - DNA, 1371 bp, Artificial Sequence
  derived and/or modified sequence
atggataagttgaataaaataactgtgcctgcgagccaaaagcttcgacaactgcagaagatggtacacgacataaaaaataacgagggcggaataatgaataaaataaaaaagttaaaggttaaggcgcctccctccgttcccaggcgcgattatgcctcagagtcccccgctgacgaggaagaacagtggtccgacgatttcgactctgattacgaaaatcctgacgaacattcagattctgaaatgtatgtgatgcctgctgaggagaacgctgatgacagctacgaaccccctccagtcgagcaggagacacgccctgtgcatcctgctctgccattcgccaggggggaatacatcgacaaccggagcagccaacggcattctcccccattctctaagacgcttcccagcaagccttcttggccatcagagaaagctagactgacctctacgttaccggcactgacagcacttcaaaaaccgcaagtgcctcctaagccaaaggggctgctagaggatgaagctgactacgtagtaccagtcgaagataacgatgaaaactacattcaccccactgagagctcgagtccacccccagagaaagccccaatggtgaataggtctactaagccaaacagttcgaccccagcctctccaccgggaaccgcttctgggaggaacagcggagcctgggaaacaaagagcccccctcctgctgctccatctccactgcccagagctggcaagaaaccaacgacacccctgaaaactacacctgtggcttcccaacagaacgcctcctcggtgtgcgaagaaaaaccgattcccgctgagcggcacagaggcagctcacacaggcaagaagccgtgcagagccctgtctttccacccgcacagaagcagattcatcagaagcctatccccttgcccagattcacagagggcggtaatcccactgtggacggacctttgccatccttcagtagcaattcgaccatttcagagcaagaggccggtgtgctgtgtaagccatggtacgctggagcatgcgatcgcaagagtgccgaggaggccttgcaccgctcaaataaagatggctccttccttattcggaagtctagtggacatgactctaagcaaccttatactctggtggttttctttaataagcgggtgtacaatatccctgttcggttcatcgaagctacgaagcagtacgccctcggtcgaaaaaaaaacggcgaagaatatttcggaagtgtggcggagatcataaggaatcatcagcattctcctttagtgctaattgactcccaaaataacaccaaagattccacacggctcaagtatgctgtcaaggtgtcctag

SEQ ID NO: 175563 - DNA, 1784 bp, Artificial Sequence
  derived and/or modified sequence
gcagcctgcactctcagaaatcagacttgagtggccggaacccttgagaccagaggcttaccatgctgctccctaggagggccaggaactgctgacgtgaccactggacagttattcgtgtctcttacaattaccaaacagaatggacaagcttaataaaataaccgtccccgccagtcagaagttgaggcagcttcaaaagatggtccatgatattaaaaacaatgaaggtggaataatgaataaaatcaaaaagctaaaagtcaaagcacctccaagtgttcctcgaagggactacgcttcagagagccctgctgacgaagaggagcagtggtccgatgactttgacagcgactatgaaaatccagatgagcactcggactcagagatgtacgtgatgcccgccgaggagaacgctgatgacagctacgagccgcctccagtagagcaggaaaccaggccggttcacccagccctgcccttcgccagaggcgagtatatagacaatcgatcaagccagaggcattccccacccttcagcaagacacttcccagtaagcccagctggccttcagagaaagcaaggctcacctccaccctgccggccctgactgctttgcagaaacctcaagtcccacccaaacccaaaggcctccttgaggatgaggctgattatgtggtccccgtggaagataatgatgaaaactatattcatcccacagaaagcagttcacctccacctgaaaaagctcccatggtgaatagatcaaccaagccaaattcctcaacgcccgcctctcctccaggaacagcttcaggtcgaaacagtggggcctgggaaaccaagtcacctccaccagctgcaccatccccgttgccacgggccgggaaaaaaccaacgacaccactgaagacaactccagttgcctctcaacagaatgcttcaagtgtttgtgaagaaaaacctatacctgctgaacgccaccgagggtcaagtcacagacaagaagctgtgcagtcaccagtgtttcctcctgcccagaaacaaatccaccaaaaacccatacctctgccaagatttacagaagggggaaacccaactgtggatgggcccctacccagcttttcatctaattccactatttcagaacaggaagctggcgttctctgcaagccatggtatgctggagcctgtgatcgaaagtctgctgaagaggcattgcacagatcaaacaaggatggatcatttcttattcggaaaagctctggccatgattccaaacaaccatatacactagttgtattctttaataagcgagtatataatattcctgtgcgatttattgaagcaacaaaacaatatgccttgggcagaaagaaaaatggtgaagagtactttggaagtgttgctgaaatcatcaggaatcatcaacatagtcctttggttcttattgacagtcagaataacacaaaagattccaccagactgaagtatgcagttaaagtttcataaagggggaaaaaaaagatcaataccattgcttcagacactttcccaaagtttctccttttgagaaaaagtcccaaaacttcatattttggattatgaatcatccagtaataaaatggaagatggagtcagctattgaagtggtcatccatttctttttaagaagctcatgtggacttgttctattgcctgacctgatgaactgttaatatctggtgaggttgagttatcatgctactaatattttccaaataaatatttttatttttaaaaa

SEQ ID NO: 175564 - DNA, 1371 bp, Artificial Sequence
  derived and/or modified sequence
atggacaagctgaacaagatcaccgtgcccgccagccagaagctgagacagctgcagaagatggtgcacgacatcaagaacaacgagggcggcatcatgaacaagatcaagaagctgaaggtgaaggccccccccagcgtgcccagaagagactacgccagcgagagccccgccgacgaggaggagcagtggagcgacgacttcgacagcgactacgagaaccccgacgagcacagcgacagcgagatgtacgtgatgcccgccgaggagaacgccgacgacagctacgagcccccccccgtggagcaggagaccagacccgtgcaccccgccctgcccttcgccagaggcgagtacatcgacaacagaagcagccagagacacagcccccccttcagcaagaccctgcccagcaagcccagctggcccagcgagaaggccagactgaccagcaccctgcccgccctgaccgccctgcagaagccccaggtgccccccaagcccaagggcctgctggaggacgaggccgactacgtggtgcccgtggaggacaacgacgagaactacatccaccccaccgagagcagcagccccccccccgagaaggcccccatggtgaacagaagcaccaagcccaacagcagcacccccgccagcccccccggcaccgccagcggcagaaacagcggcgcctgggagaccaagagccccccccccgccgcccccagccccctgcccagagccggcaagaagcccaccacccccctgaagaccacccccgtggccagccagcagaacgccagcagcgtgtgcgaggagaagcccatccccgccgagagacacagaggcagcagccacagacaggaggccgtgcagagccccgtgttcccccccgcccagaagcagatccaccagaagcccatccccctgcccagattcaccgagggcggcaaccccaccgtggacggccccctgcccagcttcagcagcaacagcaccatcagcgagcaggaggccggcgtgctgtgcaagccctggtacgccggcgcctgcgacagaaagagcgccgaggaggccctgcacagaagcaacaaggacggcagcttcctgatcagaaagagcagcggccacgacagcaagcagccctacaccctggtggtgttcttcaacaagagagtgtacaacatccccgtgagattcatcgaggccaccaagcagtacgccctgggcagaaagaagaacggcgaggagtacttcggcagcgtggccgagatcatcagaaaccaccagcacagccccctggtgctgatcgacagccagaacaacaccaaggacagcaccagactgaagtacgccgtgaaggtgagctag

SEQ ID NO: 175565 - protein, 639 aa, Artificial Sequence
  derived and/or modified sequence
MSRSPDAKEDPVECPLCMEPLEIDDINFFPCTCGYQICRFCWHRIRTDENGLCPACRKPYPEDPAVYKPLSQEELQRIKNEKKQKQNERKQKISENRKHLASVRVVQKNLVFVVGLSQRLADPEVLKRPEYFGKFGKIHKVVINNSTSYAGSQGPSASAYVTYIRSEDALRAIQCVNNVVVDGRTLKASLGTTKYCSYFLKNMQCPKPDCMYLHELGDEAASFTKEEMQAGKHQEYEQKLLQELYKLNPNFLQLSTGSVDKNKNKVTPLQSPIDKPSDSLSIGNGDNSQQISNSDTPSPPPGLSKSNPVIPISSSNHSARSPFEGAVTESQSLFSDNFRHPNPIPSGLPPFPSSPQTSSDWPTAPEPQSLFTSETIPVSSSTDWQAAFGFGSSKQPEDDLGFDPFDVTRKALADLIEKELSVQDQPSLSPTSLQNSSSHTTTAKGPGSGFLHPAAATNANSLNSTFSVLPQRFPQFQQHRAVYNSFSFPGQAARYPWMAFPRNSIMHLNHTANPTSNSNFLDLNLPPQHNTGLGGIPVAGIPASSGNSLDSLQDDNPPHWLKSLQALTEMDGPSAAPSQTHHSAPFSTQIPLHRASWNPYPPPSNPSSFHSPPPGFQTAFRPPSKTPTDLLQSSTLDRH

SEQ ID NO: 175566 - DNA, 3333 bp, Artificial Sequence
  derived and/or modified sequence
cggaggagtcttaccctaatgtaagatggtggcccgtctggctgtggaacccaccgaaagctgagagtctctctctcagccgtaaaggtcggactcgctgaagcaatcaggcccggttctgaagagttttttccccgacgctcgttcggtggtttcttgtgaggacgcggcagcccgtggagtcggctgagggaaaagcgaggcaaggcaggcgggtcgtcaaagtcctacattttagctttcagtgctgaacttccttctcccttaaattattataaacttttgctgctgtttaataaacgtgaagatgtctcgcagtcctgatgcgaaggaagaccctgtggagtgccctctttgcatggagcccttggagatagatgatatcaactttttcccttgcacctgtggctaccagatttgccgattttgttggcatcgaattcgcactgatgaaaatgggctttgtcctgcatgtagaaagccatatccagaagacccagcagtttataaaccactctcccaggaagagctgcaaaggataaagaatgagaaaaaacagaaacaaaatgagagaaaacagaaaatatcagaaaatcgcaaacatttggctagtgtacgtgtcgtacaaaaaaacctcgtctttgttgtaggtttatctcagcgcctagcagacccagaggttttaaaacgaccagaatattttgggaagtttggtaaaatacataaagttgtcatcaataatagcacatcatatgcaggctcacagggtccaagtgccagtgcttatgtaacctatatccggtcagaagacgctctcagagccatacagtgtgtcaacaatgtggtagtagatggcagaacacttaaggcatctctaggtacaacaaaatactgcagttacttcttaaagaatatgcagtgtccaaaacctgactgcatgtatcttcatgaattgggggatgaggcggccagcttcacaaaagaggaaatgcaggcgggtaaacaccaagaatatgaacagaagctacttcaagaattatataaattaaatcccaattttcttcagctatctacgggttcagttgataaaaataagaacaaagtgacaccactgcagagccccattgacaaaccttcagattctctcagtatagggaacggtgataattcccagcagatatctaacagtgatacgccttcaccaccacctggtttgtcaaaatccaatccagtcatccccatcagttcatccaatcacagtgcacggtccccttttgaaggggcagtaacagagtcacagtcgttattctcagacaattttcgccatcccaaccctatcccaagtgggcttcctcctttccccagctccccacagacatccagtgactggcctacagcaccagaaccacagagcctcttcacatcagaaacaatcccagtatcatcctctacagactggcaagcagcttttggctttggttcttctaaacaaccagaggatgacttgggttttgatcccttcgatgtcactcgaaaagccttagcagacctgattgagaaggaactgtccgttcaagaccaaccttccctttcgcccacatctcttcagaactcctcttcacacactacaaccgccaaaggtccaggctctggattcctgcatcctgctgcagctacaaatgccaattctctcaatagtaccttttcagtcttgccccagaggttccctcaatttcagcagcaccgagcggtttataattcattcagttttccaggccaggcagcccgctatccttggatggcctttccacgcaatagcatcatgcacttgaaccacacagcaaaccccacctcaaatagtaatttcttggacttgaatctcccgccacagcacaacacaggtctgggagggatccctgtagcaggtattccagcgtcttcaggaaacagtttagactctcttcaagatgacaatcctccacactggctaaaatcccttcaggccctcacagagatggacggccccagcgctgctccatcacagacccaccacagcgcccccttcagcacacagatcccgctgcacagagccagttggaatccctaccctcctccttcaaacccttccagcttccactccccacccccaggctttcagacggccttcagaccccccagcaaaacccccacagatttactacagagttcaacactggaccgccattaggcaaagaggagcaaccattagaaaatgcaggatttgtcccactctgttttctccctctcagcccaccacccacagctcccttctcatctcttatgttctgaagaatccagtacctgatcaattttttttctccctaaccccagatgcaatgcgatcacagggtcattaccatctctttattaattgtaaaaatttttgttgatccagcatttgagtgacactgttgaatgtttctaaaaatgcctttttaaggagagaaaaaaaaatcaaagggcagtctcaatacttagaaaattattgtttgtctgttgcgcataataatgacataatctgcttagcagaaaatgacgattaatctataggaaagctcaagtaaatgcattatcaactgcagaagtttgaaaaccaggttcatttacgtgagattgctaaatgcatgggggaaagcagtggtcctagcatccatcttgtattcagcttatcattattgcagggaaaatgcttttaatttaaattaatttttaattcttttggcaagttgatggcaaggacttgattgtgtcattaagcaaaagaatgtattggaagttgatggaaagacaaattcatctgtagtagtaactggccgattgctaaagagttcataaggaggtgagaagtaatttttttaaaggagaaaaattttttggctttagatttaaagtaaattgaaatgttttaaagaaaaaagtattcacagatttaatacctattaataatataagagctgaaatgtaagtcatttcttcagtccttctcctctgtcggaatcttttttgttttaccataaattcacctgacgagggcactctgagatagcactgctctggggccatctgatcaccatcgggagcaaatctctgacctccttgcctgcagcttttacttaaccctgtagtttctggacgtttgtgcagtattgaaaagacaggagaaaagcaaacagaaacctggttataacctgacgctaaaactaaaaacaaggaaatgtacctctttcttcagaattaaaactaaaatcttaaataaaacagaaaacttgatgatgaaaaaaaaaaaaaaaaaaa

SEQ ID NO: 175567 - DNA, 1920 bp, Artificial Sequence
  derived and/or modified sequence
atgtctcgcagtcccgacgccaaggaggaccctgtggaatgtcccttatgcatggagcccctcgagatcgacgacatcaatttcttcccttgtacatgtggctaccagatctgcagattttgttggcacaggatcaggaccgacgaaaacggcctctgtcctgcatgccggaagccatacccggaggaccccgccgtgtacaagccactgtcacaggaagaactgcaacgcatcaaaaatgagaagaagcagaagcaaaatgaaaggaagcagaagatctctgagaatcggaaacatcttgcgtccgttcgagtcgtgcagaagaacctcgtctttgtggtgggattgtcacagaggttagccgatcctgaagtgttgaagcggcccgagtactttggaaagtttggaaaaatacataaggtcgtcattaacaacagtacatcctacgctgggagccagggccccagcgcctccgcgtatgtgacgtacattcggtcagaagacgcattgcgcgccatccaatgcgttaataacgtcgtggtggacggccgcaccctgaaggcatctctcggcaccactaaatactgctcatacttcctgaagaacatgcagtgccccaagcccgactgtatgtacctgcacgaacttggagacgaagcagcatcattcactaaagaagagatgcaggccgggaaacaccaggaatacgaacagaagctgttgcaggaactatataagttaaatccgaacttccttcagttgtcgacgggttccgttgataaaaacaaaaacaaagtgactcccttgcagagccctattgataaacccagtgactccttgagcattggtaatggggacaacagccaacagatcagtaattcagacactccctcgcctcctccaggactgtccaaatcgaatcctgtgatacctatctctagctcaaaccattcagccagatcaccctttgagggtgctgtcacagagtcccagagtctcttcagcgacaatttccggcatccgaatcctatccccagcggcctgccacctttccccagctccccccaaacctccagtgattggcccaccgcacctgaaccacaaagtttattcaccagcgagaccataccagttagctcatctaccgactggcaggccgcgtttgggtttggaagcagcaagcagccagaagacgacttgggcttcgatccatttgatgtcaccaggaaagctctggccgacctgattgaaaaggagctgtcagtccaggatcaaccttctctctccccaacatccctgcaaaattcgagcagccatacaacaactgcgaaaggtccgggatccggctttttgcaccctgccgccgccaccaatgcaaattctctaaattccaccttttctgtcttgcctcagcggtttccacaattccagcagcaccgcgccgtttataacagcttttcttttcctgggcaggcggcccggtacccatggatggcattccccagaaattccataatgcacctgaatcacacagcgaaccctaccagtaactcgaacttcctcgatctcaatctgcccccgcagcataacacaggactgggcggcattcctgtggccgggattcccgcctctagcggtaacagcttagattcactccaagacgacaatcctccacactggctgaagtccctacaggcgctgacagagatggatggccccagcgccgctccatctcagactcaccatagcgcccctttctctacccagattccactgcaccgagcttcatggaacccatatcctcccccaagcaatccatctagtttccattccccaccaccaggctttcagaccgctttcaggcctccatctaaaacacccacagatttgctgcagagcagtacattggataggcactag

SEQ ID NO: 175568 - DNA, 1920 bp, Artificial Sequence
  derived and/or modified sequence
atgagccgcagcccagatgccaaggaggaccctgtggagtgccccctgtgcatggagcccctggagattgatgacatcaacttcttcccctgcacctgtggctaccagatctgccgcttctgctggcaccgcatcagaacagatgaaaatggcctgtgcccagcctgcaggaagccctacccagaggaccctgctgtgtacaagcccctgagccaggaggagctgcagaggatcaagaatgagaagaagcagaagcagaatgaaaggaagcagaagatcagtgaaaataggaagcacctggcctctgtgcgggtggtgcagaagaacctggtgtttgtggtgggcctgagccagaggctggccgaccctgaggtgctgaagaggcctgagtactttgggaagtttgggaagatccacaaggtggtgatcaacaacagcaccagctatgccggcagccagggccccagcgccagcgcctacgtgacctacatccgctcagaagatgccctgcgggccatccagtgtgtgaacaacgtggtggtggatggccgcaccctgaaggccagcctgggcaccaccaagtactgcagctacttcctgaagaacatgcagtgccccaagccagactgcatgtacctgcacgagctgggagatgaggccgccagcttcaccaaggaggagatgcaggccggcaagcaccaggagtatgagcagaagctgctgcaggagctgtacaagctgaaccccaacttcctgcagctgagcacaggctctgtggacaagaacaagaacaaggtgacccccctgcagagccccatcgacaagcccagcgacagcctgagcattggaaatggagacaacagccagcagatcagcaacagcgacacccccagccccccacctggcctgagcaagagcaaccctgtgatccccatcagcagcagcaaccacagcgcccggagcccctttgaaggagctgtgacagagagccagagcctcttcagtgacaacttccgccaccccaaccccatccccagcggcctgccccccttccccagcagcccccagaccagcagtgactggcccacagcccctgagccccagagcctcttcaccagcgagaccatccctgtgagcagcagcacagactggcaggccgccttcggcttcggcagcagcaagcagccagaagatgacctgggctttgacccctttgatgtgaccaggaaggccctggccgacctgattgagaaggagctgtctgtgcaggaccagcccagcctgagccccaccagcctgcagaacagcagcagccacaccaccacagccaagggccctggcagcggcttcctgcaccctgctgctgccaccaatgccaacagcctgaacagcaccttctctgtgctgccccagcgcttcccccagttccagcagcacagagctgtgtacaacagcttctccttccctggccaggccgcccgctacccctggatggccttccccaggaacagcatcatgcacctgaaccacacagccaaccccaccagcaacagcaacttcctggacctgaacctgcccccccagcacaacacaggcctgggcggcatccctgtggccggcatcccagccagcagcggcaacagcctggacagcctgcaggatgacaaccccccccactggctgaagagcctgcaggccctgacagagatggatggccccagcgctgcccccagccagacccaccacagcgcccccttcagcacccagatccccctgcaccgggcctcctggaacccctaccccccacccagcaaccccagcagcttccacagccccccacctggcttccagacagccttccggccccccagcaagacccccacagacctgctgcagagcagcaccctggacagacactag

SEQ ID NO: 175569 - DNA, 1920 bp, Artificial Sequence
  derived and/or modified sequence
atgagccggagccccgacgccaaggaggaccccgtggagtgccccctttgcatggaacccctggagatcgacgacatcaatttttttccttgtacctgtggctatcagatttgcagattctgttggcacagaataaggaccgatgagaacggattatgccccgcatgcagaaagccctatcccgaggatcccgcagtttacaagcccctcagccaggaggaacttcaaaggattaagaatgaaaagaagcaaaagcagaacgaacgtaagcagaaaatctcagagaataggaagcacttagctagcgtgcgggtggtgcagaagaatttggtctttgtggtggggttatcacaacggctggccgacccggaagtcctgaagagacccgaatatttcgggaaatttggaaagatccataaagtggttatcaacaactccacctcatatgccggctcccaaggaccaagcgctagtgcttacgtcacctatattaggtctgaagacgccctgagagccattcaatgtgtgaacaacgttgtggtagacggcagaacactgaaagcatctctcggcactacgaagtactgtagttatttcttgaaaaatatgcaatgccctaaacccgattgcatgtacctgcacgaattgggcgatgaggcagctagcttcactaaggaggagatgcaggccggcaagcaccaagaatatgagcagaaactgttgcaggagctgtataagctgaaccctaactttttgcaactgagcactggaagcgttgataaaaacaaaaataaagtgacaccactgcaatcccctatagacaaacctagtgatagtttgtcaattggcaatggagacaacagccaacagatcagcaattcagatacaccatcccccccaccaggcttatccaagtccaaccctgtcatacctatatcttcttccaaccatagcgcccggtccccattcgagggagcggttacagagtctcagtccttgtttagtgacaatttcaggcacccgaatccaattcccagcggcttacctcccttcccttcaagcccccagacgagttctgattggcctaccgcgcctgaaccccagtccctgtttacctccgagactatcccagtgagctccagtactgattggcaggccgccttcggttttggcagctccaaacagcctgaagatgacttgggattcgaccccttcgatgtcacccgtaaggccctggcagacctcattgagaaggagctgagtgtacaggatcagcccagtctctctcctacatccctacagaattcttcctcccataccaccacagcgaagggtcctggttccggcttcttgcatcctgccgccgccaccaatgccaacagcctcaattccacctttagtgtgctgccccagcggttccctcagttccagcagcatagggccgtctacaacagtttcagtttccctggccaggctgcacgatacccctggatggcgttccctcgcaactcgatcatgcatttgaatcacacagcaaatcccaccagcaattctaattttctggatcttaacctgccgccacagcataatacaggattgggcggtataccagtggctggcatcccagcatccagcggcaacagcctggactccctgcaggatgataatccaccccactggcttaagagtctgcaggccctgaccgagatggatggtccgtcggccgcaccctcccagacacatcacagcgctcccttcagcacccagattccgctccaccgtgcctcctggaatccatatcctcccccctcgaatccaagctcatttcactcaccccccccaggcttccagacagccttccgcccgccttccaaaacacccaccgatctattgcagtcctcaaccctggatagacactag

SEQ ID NO: 175570 - DNA, 1920 bp, Artificial Sequence
  derived and/or modified sequence
atgagtaggtcacctgatgcgaaggaagaccctgtggagtgccctttatgcatggagccactcgagattgatgacatcaattttttcccctgtacatgcggttaccagatttgtcggttctgctggcatcgaattcggacagacgagaacggcctctgccccgcatgccgcaagccgtaccccgaagacccagcagtgtacaaacctctctctcaggaggagctacaaaggatcaagaacgaaaaaaaacagaaacagaatgagagaaaacagaagatctccgagaaccggaagcacttggccagtgttcgcgtggtccaaaagaatctcgtgtttgtcgtgggcctgagccaaaggctggccgaccccgaagttctgaagcgccctgagtattttgggaagttcggaaagatacacaaggtggtgattaataattctacctcttatgcagggagccaaggtcctagtgccagtgcttacgtcacttatattaggtcagaggatgctctgagagctatccagtgtgtcaacaacgtggtcgtggacggtaggaccttgaaagcatctcttggcaccaccaaatactgttcttacttcctgaagaacatgcaatgccctaaacctgactgtatgtacctacatgagctcggggacgaggcagccagcttcacaaaggaggaaatgcaggccggaaagcaccaagagtacgagcagaagttactccaagagttgtataagctcaatcccaactttctgcagctcagcaccggatcagtcgacaaaaataagaacaaggtcacccccttgcagagccctatcgataagcccagcgattccctatctatcggtaacggcgataattcacaacaaatctccaattccgatacgccctctccaccgccaggcctctctaaaagtaatcctgtaatccctattagctcttccaaccacagcgctaggtctccttttgaaggtgctgttactgaaagccagtccctattttccgacaatttccgccatcccaaccccataccttctgggttgcccccatttccatcctcgcctcagaccagttctgattggccaaccgcccctgagccccagtccctgtttacctcagagacaatcccggtgagctcctcgaccgattggcaggctgctttcgggtttggtagtagcaagcagccggaggatgacttaggattcgatccctttgacgtcactcgtaaggctttggcagacttaatcgaaaaggagctgtcagtgcaggaccagccctcactgagtcctacttccctgcagaattcatcctctcacactaccacagctaaggggcctgggagtgggtttctacatcctgccgctgctacaaatgcaaatagtctgaatagcactttctcagttctgcctcaacggtttccccagttccagcaacaccgggctgtgtataattccttctccttccctggccaagctgcgcgttacccttggatggcctttcctagaaattccattatgcacttaaaccacacggcaaaccccaccagtaattccaacttcctagacctgaacctgccccctcaacataataccgggctgggcggaattccagtggcaggcattcccgctagcagcggcaacagcctggattcactacaggatgacaaccctcctcattggctgaagtctctccaggcattgacagagatggatggcccatccgctgctcccagccaaacccaccattcggcgcctttctcaactcagatacctctgcatagggcgagctggaatccctaccctccaccatccaatccttctagttttcactccccgcctcctggcttccagacagccttccgtcctccaagcaagaccccaaccgacctgctgcagagtagtaccctggatcgccactag

SEQ ID NO: 175571 - DNA, 2215 bp, Artificial Sequence
  derived and/or modified sequence
accctaatgtaagatggtggcccgtctggctgtggaacccaccgaaagctgagagtctctctctcagccgtaaaggtcggactcgctgaagcaatcaggcccggttctgaagagttttttccccgacgctcgttcggtggtttcttgtgaggacgcggcagcccgtggagtcggctgagggaaaagcgaggcaaggcaggcgggtcgtcaaagtcctacattttagctttcagtgctgaacttccttctcccttaaattattataaacttttgctgctgtttaataaacgtgaagatgtctcgcagtcctgatgcgaaggaagaccctgtggagtgccctctttgcatggagcccttggagatagatgatatcaactttttcccttgcacctgtggctaccagatttgccgattttgttggcatcgaattcgcactgatgaaaatgggctttgtcctgcatgtagaaagccatatccagaagacccagcagtttataaaccactctcccaggaagagctgcaaaggataaagaatgagaaaaaacagaaacaaaatgagagaaaacagaaaatatcagaaaatcgcaaacatttggctagtgtacgtgtcgtacaaaaaaacctcgtctttgttgtaggtttatctcagcgcctagcagacccagaggttttaaaacgaccagaatattttgggaagtttggtaaaatacataaagttgtcatcaataatagcacatcatatgcaggctcacagggtccaagtgccagtgcttatgtaacctatatccggtcagaagacgctctcagagccatacagtgtgtcaacaatgtggtagtagatggcagaacacttaaggcatctctaggtacaacaaaatactgcagttacttcttaaagaatatgcagtgtccaaaacctgactgcatgtatcttcatgaattgggggatgaggcggccagcttcacaaaagaggaaatgcaggcgggtaaacaccaagaatatgaacagaagctacttcaagaattatataaattaaatcccaattttcttcagctatctacgggttcagttgataaaaataagaacaaagtgacaccactgcagagccccattgacaaaccttcagattctctcagtatagggaacggtgataattcccagcagatatctaacagtgatacgccttcaccaccacctggtttgtcaaaatccaatccagtcatccccatcagttcatccaatcacagtgcacggtccccttttgaaggggcagtaacagagtcacagtcgttattctcagacaattttcgccatcccaaccctatcccaagtgggcttcctcctttccccagctccccacagacatccagtgactggcctacagcaccagaaccacagagcctcttcacatcagaaacaatcccagtatcatcctctacagactggcaagcagcttttggctttggttcttctaaacaaccagaggatgacttgggttttgatcccttcgatgtcactcgaaaagccttagcagacctgattgagaaggaactgtccgttcaagaccaaccttccctttcgcccacatctcttcagaactcctcttcacacactacaaccgccaaaggtccaggctctggattcctgcatcctgctgcagctacaaatgccaattctctcaatagtaccttttcagtcttgccccagaggttccctcaatttcagcagcaccgagcggtttataattcattcagttttccaggccaggcagcccgctatccttggatggcctttccacgcaatagcatcatgcacttgaaccacacagcaaaccccacctcaaatagtaatttcttggacttgaatctcccgccacagcacaacacaggtctgggagggatccctgtagcaggtattccagcgtcttcaggaaacagtttagactctcttcaagatgacaatcctccacactggctaaaatcccttcaggccctcacagagatggacggccccagcgctgctccatcacagacccaccacagcgcccccttcagcacacagatcccgctgcacagagccagttggaatccctaccctcctccttcaaacccttccagcttccactccccacccccaggctttcagacagccttcagaccccccagcaaaacccccacagatttactacagagttcaacactggaccgccattag

SEQ ID NO: 175572 - DNA, 1920 bp, Artificial Sequence
  derived and/or modified sequence
atgagcagaagccccgacgccaaggaggaccccgtggagtgccccctgtgcatggagcccctggagatcgacgacatcaacttcttcccctgcacctgcggctaccagatctgcagattctgctggcacagaatcagaaccgacgagaacggcctgtgccccgcctgcagaaagccctaccccgaggaccccgccgtgtacaagcccctgagccaggaggagctgcagagaatcaagaacgagaagaagcagaagcagaacgagagaaagcagaagatcagcgagaacagaaagcacctggccagcgtgagagtggtgcagaagaacctggtgttcgtggtgggcctgagccagagactggccgaccccgaggtgctgaagagacccgagtacttcggcaagttcggcaagatccacaaggtggtgatcaacaacagcaccagctacgccggcagccagggccccagcgccagcgcctacgtgacctacatcagaagcgaggacgccctgagagccatccagtgcgtgaacaacgtggtggtggacggcagaaccctgaaggccagcctgggcaccaccaagtactgcagctacttcctgaagaacatgcagtgccccaagcccgactgcatgtacctgcacgagctgggcgacgaggccgccagcttcaccaaggaggagatgcaggccggcaagcaccaggagtacgagcagaagctgctgcaggagctgtacaagctgaaccccaacttcctgcagctgagcaccggcagcgtggacaagaacaagaacaaggtgacccccctgcagagccccatcgacaagcccagcgacagcctgagcatcggcaacggcgacaacagccagcagatcagcaacagcgacacccccagccccccccccggcctgagcaagagcaaccccgtgatccccatcagcagcagcaaccacagcgccagaagccccttcgagggcgccgtgaccgagagccagagcctgttcagcgacaacttcagacaccccaaccccatccccagcggcctgccccccttccccagcagcccccagaccagcagcgactggcccaccgcccccgagccccagagcctgttcaccagcgagaccatccccgtgagcagcagcaccgactggcaggccgccttcggcttcggcagcagcaagcagcccgaggacgacctgggcttcgaccccttcgacgtgaccagaaaggccctggccgacctgatcgagaaggagctgagcgtgcaggaccagcccagcctgagccccaccagcctgcagaacagcagcagccacaccaccaccgccaagggccccggcagcggcttcctgcaccccgccgccgccaccaacgccaacagcctgaacagcaccttcagcgtgctgccccagagattcccccagttccagcagcacagagccgtgtacaacagcttcagcttccccggccaggccgccagatacccctggatggccttccccagaaacagcatcatgcacctgaaccacaccgccaaccccaccagcaacagcaacttcctggacctgaacctgcccccccagcacaacaccggcctgggcggcatccccgtggccggcatccccgccagcagcggcaacagcctggacagcctgcaggacgacaaccccccccactggctgaagagcctgcaggccctgaccgagatggacggccccagcgccgcccccagccagacccaccacagcgcccccttcagcacccagatccccctgcacagagccagctggaacccctaccccccccccagcaaccccagcagcttccacagccccccccccggcttccagaccgccttcagaccccccagcaagacccccaccgacctgctgcagagcagcaccctggacagacactag

SEQ ID NO: 175573 - protein, 792 aa, Artificial Sequence
  derived and/or modified sequence
MAAPSLLNWRRVSSFTGPVPRARHGHRAVAIRELMIIFGGGNEGIADELHVYNTATNQWFLPAVRGDIPPGCAAHGFVCDGTRILVFGGMVEYGRYSNELYELQASRWLWKKVKPHPPPSGLPPCPRLGHSFSLYGNKCYLFGGLANESEDSNNNVPRYLNDFYELELQHGSGVVGWSIPVTKGVVPSPRESHTAVIYCKKDSGSPKMYVFGGMCGARLDDLWQLDLETMSWSKPETKGTVPLPRSLHTASVIGNKMYIFGGWVPHKGENTETSPHDCEWRCTSSFSYLNLDTTEWTTLVSDSQEDKKNSRPRPRAGHCAVAIGTRLYFWSGRDGYKKALNSQVCCKDLWYLDTEKPPAPSQVQLIKATTNSFHVKWDEVSTVEGYLLQLSTDLPYQAASSDSSAAPNMQGVRMDPHRQGSNNIVPNSINDTINSTKTEQPATKETSMKNKPDFKALTDSNAILYPSLASNASNHNSHVVDMLRKNEGPHTSANVGVLSSCLDVRTVIPETSVSSTVSSTQTMVTQQTIKTESSSTNGAVVKDETSLTTFSTKSEVDETYALPATKISRVETHATATPFSKETPSNPVATVKAGERQWCDVGIFKNNTALVSQFYLLPKGKQSISKVGNADVPDYSLLKKQDLVPGTGYRFRVAAINGCGIGPFSKISEFKTCIPGFPGAPSAVRISKNVEGIHLSWEPPTSPSGNILEYSAYLAIRTAQIQDNPSQLVFMRIYCGLKTSCIVTAGQLANAHIDYTSRPAIVFRISAKNEKGYGPATQVRWLQGNNKKAPLN

SEQ ID NO: 175574 - DNA, 5743 bp, Artificial Sequence
  derived and/or modified sequence
acgtgaccccagcacagctggaggcgggtccccgccctccccagggagcagccggttgaggcgggagcggtgcattgtgggcagaggggcgggggttgggaagatggcggctcccagcctcctcaactggaggcgagtttcttccttcacggggccggtcccccgcgcccggcacggacaccgagcggtggccatccgggagctgatgatcatctttggagggggaaatgagggcatcgcggatgagctgcacgtctacaacacggctacgaatcagtggtttctgccagctgttagaggagatatccctccaggctgtgctgcccatggatttgtctgtgatggtaccagaatattagtatttgggggaatggttgaatatggaagatacagcaatgagttatatgagttacaagcaagtcgttggttatggaaaaaagtgaaaccccatccccctccttctggtttacctccttgtcctcggcttggacatagcttctctttatatggtaacaaatgctatttgtttggtggcctggcaaacgaaagcgaagattcaaacaataatgttcccagatatttaaatgatttttatgagttggagctacagcatggctctggtgttgtgggttggagcattccagtgactaaaggggttgtgccttctccaagagaatcccacacagctgttatatattgcaaaaaagattctggaagtcctaaaatgtatgtttttggtggaatgtgtggtgctcgcctggatgacctatggcagcttgacttagaaactatgtcatggtcaaaaccagaaactaaagggacagtgccacttccacgaagccttcatacagccagtgttataggaaacaagatgtacatttttggtggatgggtcccacataagggggaaaatactgagacttcacctcatgattgtgaatggagatgtaccagttcattttcttacctaaatctggatacaacagagtggaccaccctagtatcagattctcaggaagataaaaaaaattcaagaccaagaccaagagctggccactgtgctgttgcaatcggcactcgattgtatttttggagtggaagagatggctacaaaaaagcactgaatagtcaagtttgctgcaaggatctttggtatcttgatactgagaaaccaccggcaccatctcaagtacagctgatcaaagccactaccaactcctttcatgtcaagtgggatgaagtgtctacagttgagggctatcttttgcagttgagtacagacttgccataccaagctgcatcatcagattcttcagcagcaccaaatatgcaaggagtcaggatggaccctcacagacaaggcagtaataacatcgttcctaacagtatcaatgatacaataaacagcacaaaaactgaacagccagccacaaaagaaacttcaatgaaaaacaaaccagactttaaagcactgacggattctaatgccattttatatccatctttggcatcaaatgcttctaatcataatagtcatgtggtggatatgctaaggaaaaatgaaggtcctcacacttcagcaaatgtaggtgttctaagtagttgcctggatgtaagaacagtaattcctgaaacatctgtatccagtactgtttccagcacacaaactatggtaacccagcagaccattaaaactgaatcatccagtacaaatggggcagttgttaaagatgaaacttcactaacaacattcagtaccaaatctgaagttgatgaaacatatgcactgcctgcaacgaagatcagccgtgtagagacacatgctacagcaacgccgttttctaaagagactccttcaaatccagtggccacagtgaaagcgggagaacgacaatggtgtgatgtgggaatttttaaaaataatacagctttggtgagccagttttatttgctgccaaaagggaagcaaagcatctcaaaggtaggaaatgcagatgtacctgactacagcttgcttaagaaacaagatcttgttccaggcacaggatacagattcagggttgctgcaatcaatggttgtgggataggtcctttcagcaaaatcagtgaatttaaaacttgtattcctggttttcctggagctccttctgcagtcagaatttcaaagaatgttgaaggtatccacctttcctgggaacctccaacctcaccttctggaaatattttggaatattcagcctacttggctatccgcacagcacagatacaagataatccaagtcaacttgtgttcatgaggatttattgtggtcttaagacatcatgtatagtaactgctgggcaacttgcaaatgcacatattgattatacatccaggcctgccattgtgttcaggatatcagcaaagaatgaaaagggatatggaccagctacacaagttcggtggcttcaaggtaacaataagaaagcacctttaaattgaattggtttttttactgaagctattgtgatgatgattatttattagtaactggttatgaagatttgtcatttaaaagagtattctctggctgtatttccagcagttatgaacttgagtttgtaaattgttcttaaaatgtatttgctgaattatagatccaaataaaagaaaagaagcaaagactctctgaaaattagtatatgagttcttccttacagatatagctcttttataaagaaaaacagtgaaattaagataaaagctagaaagctttattaccccaatatcttttataagggctgtgtaacccagtcatcctagagttattgagatgattctggtaactggctgttgtatactatgctgtcttatatagtaaatgttctctacattgtaaatgtcctacctttgagtactccttctatctttattctatatgagcagtgttcctctaacaactgtcttctattggataatatgtgtgatactataataattctaatagttatttgattcctttctttgtttacagttagcacagagcttaagaaattaaaaaagaggcaagtttagaaactgcttttgaacttttattattttccaagaatcatggtaaaatacaacaagaacaatgagttttcttgattcttaccaggccaatatatttgaatatatttttggccaaagcacttaacttatctggccctcattttcctcataacagatgagggagttaaagcagtttatcttttaggtccctttcagcactaaggttttgtgtttttagtagaagtgaagtatgtccctgaacattttcatctgtcttaatggctctaattttgcttttgctaaaattaaaatcttcataattgaattcaaaattaaagtatatgtcctcctattggagaaaaaaacaagcaccttaacaggacacaagttttaaaatagtgttttaaacatttgtaagatttttgtaaatgctctaaatgttttatttttgcattgtttttaccttgaaattgtataaacttttttactatgaaaatataagcattagacagctaactcaggttccattacaaccttaaagatacagataggcattataaacactctgctacaggtaacttgttttaaaccttttaggaatttcatggttccactgcctatttaaatctggaattaatatacagagcaataattgcagaaaagatatttcaaactaagagcttcaataactgcaggggcacaggtctatctttttttataccacataaccttatgccagtttaggttgactgagtagctatgtcctcaaatttcatgtatgataccccccagcaaagatggatttaattgtgcagaattgatatatatgtgtgttccagttactaatttaaagtgtatagaatattttaatatataatttttgtaaagaactgggatttttatactacagtatttgtaattaatgtgtctcactaattaagtttctcttgaagaaaatatgcaaattgttagacacataatgagtggtttccaaactctaaagataaaataaatgcactactatggtgttgttagaataccttttttgtggctgtatgaatctttactctttaaatgtgtactttacaatgtttacaaggagcttctctggtttgttatcccagcaatgcccttggtgagagcttcattctgcatttgtttaattcatatgctttgcttttggcatatgcttgctttttgcactagtagaattttaacttacctcattattatgtttgtaatcatttgtctagcttctgtaatgtatctgatataggctaaacaaatacttaaccaaagttaaaatacatggtaagcaattttgcacatattaaatattagggtttgttgtgtatatgtgtatacttaattataaaagaatatgaatggaaagttatactaaaagtatatgtttcaagcccagttattttaaagatctattgctttaatagaaaaagtttggcttttaaccctttcttctctgcattaattaacaacgtgcatcttgaagcccttctcctgataacaaggaataagttgattttaagcaaaggatagaatatttgtttgagtgtgcacatttatacctgtttagtatttgattcagttaagcctccactcttctggatcaggaggtgattctgaacctgtggttctaacatatgacttaactgtttagagggaagagaagtctttctatactgagggatttgttaaaatcataaatgtttttgccctgagacttagcccagattctattttttttttttttttggcatttgtacattaagcaccagtcatatttatctctgtgataagggattgctgactaaaaaatgccattaagaaatctctgtggctttgacattagtagttaataagagatcttagagctgtgtgctgatgaatagaatgaattggagcaaatagcaagagaagtgcatttagcttcttatgatttgcacattttctaaatgaagatccctttgtgtagcagtaggctgtatcatgcagatatttttcataggatttgcactgagttaaatgactttctttactcttcccagtcaggtaagcagttcaaatataacaagactttgtgccagtcctcttctgtgttctgcaactctggctctcataagtagtaaaaatatttttgatgttgcatgctctcagaattatgttttctaaaatatcatattggcttcattttagtttaataaacttctttggcaacttaattagacatagggtatatataaactcaattttatctgcattttttaaaaaattgaaataatctgattgcatgtatgaaggactcctgcctcattacccaattacataaatacaattatctataggaaggtgaaattgttgatctattatttcaaagacttgtagactagcaaagattcattctgattagaaataaggtctatagctaaagatatttttattttaaaaaattacagcccttgtaacaaaaatcatttgtaacattggatatgaagacattattagtatttaaaattattgtagtcatttgatcataaatgaagtagcttgcaaaatagacttggtctttgaccctttaaggtgtaactgactgactgttgtgtttttcaagactgattttaggcagttttatgtatcgtgtaccaatgatatgtaaaataaagcaccttttctactataaacaaaaaaaaaaaa

SEQ ID NO: 175575 - DNA, 2379 bp, Artificial Sequence
  derived and/or modified sequence
atggctgctccatcactcttgaactggcgccgtgttagctcctttacgggccccgtccctagagctcgacacggccatcgggcggttgccatccgtgaattaatgatcatcttcggggggggcaatgagggtatcgccgatgaactccacgtgtacaacacagcaacaaaccagtggttcctgccagctgtgcggggtgacattcctcccggttgtgctgcacacggcttcgtttgtgacggcactcgcatcctcgtgttcggcggcatggtggagtacgggcgctactctaacgagctttatgagttgcaggcatcccgctggctttggaaaaaagttaagccgcaccctccaccttcaggcctacctccctgtcctcgcttgggccattcattctctctttacggcaataagtgctatctcttcgggggactggccaacgaatctgaggattctaacaataatgtaccacgatacctcaatgacttctacgagctggagctgcaacacggctcaggcgttgttggctggtccatccccgtgaccaagggcgtcgtgccttctccacgtgagagccacactgctgtgatttactgcaagaaggactctggtagtcctaaaatgtacgtgttcggaggcatgtgtggagccagacttgatgatctctggcagttggatctagagaccatgtcatggtcaaagcctgaaaccaaaggcaccgttccattgccccgcagtctacacactgcaagcgtaatcggcaataagatgtacatttttgggggttgggtcccacacaagggcgagaacaccgagactagcccacatgactgcgaatggcggtgcacaagttcctttagctacctgaatctggataccaccgaatggactacacttgtcagcgattcgcaagaagacaaaaagaattcgagacctagaccccgcgctggacactgtgccgtggcgatcgggacccgcctttatttctggagcggacgggacggctataaaaaagcactgaattcacaggtgtgttgtaaagatctctggtatctcgatacagagaaaccaccagctccatctcaagtgcagctgattaaggcgaccaccaacagcttccatgtgaaatgggatgaggtgtccaccgtggagggctacctgttgcagttgtccacagacttgccataccaggcagcgagctctgacagttcagccgcgccaaatatgcagggagtgaggatggacccacataggcaaggaagcaataacatcgtgccgaattccatcaatgacacaatcaactcgaccaaaacggagcagccagccaccaaggaaaccagcatgaagaacaaacctgactttaaagcactcaccgattcaaacgctatcctttatccaagcctggcctcaaatgccagtaatcataattctcatgttgtcgacatgttgcggaagaacgagggaccccatacctccgccaatgtcggagtgctgagcagctgcctggacgtccgtaccgtcatcccagaaacttccgtgagtagcaccgtaagctcaactcaaaccatggtgacccaacagaccattaagaccgagtcatcatcaacaaacggagcagtcgtgaaggacgagacaagtctcacgacgtttagcacgaaatctgaagtagacgagacttacgcattgcctgcaacaaaaatttcgagggtcgagacacacgccaccgctacaccattcagtaaagagacacctagtaatcccgttgctacagtgaaagcaggggaacggcagtggtgcgatgtgggcatattcaaaaacaatacagctctcgtgtctcaattttacctcctgcccaaagggaagcaaagtatctctaaagttggaaatgccgatgttcccgactacagcctgctgaaaaaacaagacctggtgcctggcacgggctatcgtttccgggtcgccgccataaatggctgcggcattggacctttttctaaaatcagcgaatttaagacatgcatcccaggctttcccggtgcaccatcagccgttaggatttccaaaaacgtcgaagggattcacctgagctgggagccccctacttctccatctggcaatatcttagaatatagtgcatacttggcaatacgaactgcgcagatccaggataacccaagccaactggtgttcatgcgcatttactgtggactgaaaacatcttgcatcgtgactgctggccagctagcgaatgcacacatcgactacacttcacggcccgcaattgtctttaggatttcggcaaaaaacgagaaaggatacgggcccgcgacccaggtcagatggctgcagggaaataacaaaaaagcaccactcaactag

SEQ ID NO: 175576 - DNA, 4071 bp, Artificial Sequence
  derived and/or modified sequence
cacgtgaccccagcacagctggaggcgggtccccgccctccccagggagcagccggttgaggcgggagcggtgcattgtgggcagaggggcgggggttgggaagatggcggctcccagcctcctcaactggaggcgagtttcttccttcacggggccggtcccccgcgcccggcacggacaccgagcggtggccatccgggagctgatgatcatctttggagggggaaatgagggcatcgcggatgagctgcacgtctacaacacggctacgaatcagtggtttctgccagctgttagaggagatatccctccaggctgtgctgcccatggatttgtctgtgatggtaccagaatattagtatttgggggaatggttgaatatggaagatacagcaatgagttatatgagttacaagcaagtcgttggttatggaaaaaagtgaaaccccatccccctccttctggtttacctccttgtcctcggcttggacatagcttctctttatatggtaacaaatgctatttgtttggtggcctggcaaacgaaagcgaagattcaaacaataatgttcccagatatttaaatgatttttatgagttggagctacagcatggctctggtgttgtgggttggagcattccagtgactaaaggggttgtgccttctccaagagaatcccacacagctgttatatattgcaaaaaagattctggaagtcctaaaatgtatgtttttggtggaatgtgtggtgctcgcctggatgacctatggcagcttgacttagaaactatgtcatggtcaaaaccagaaactaaagggacagtgccacttccacgaagccttcatacagccagtgttataggaaacaagatgtacatttttggtggatgggtcccacataagggggaaaatactgagacttcacctcatgattgtgaatggagatgtaccagttcattttcttacctaaatctggatacaacagagtggaccaccctagtatcagattctcaggaagataaaaaaaattcaagaccaagaccaagagctggccactgtgctgttgcaatcggcactcgattgtatttttggagtggaagagatggctacaaaaaagcactgaatagtcaagtttgctgcaaggatctttggtatcttgatactgagaaaccaccggcaccatctcaagtacagctgatcaaagccactaccaactcctttcatgtcaagtgggatgaagtgtctacagttgagggctatcttttgcagttgagtacagacttgccataccaagctgcatcatcagattcttcagcagcaccaaatatgcaaggagtcaggatggaccctcacagacaaggcagtaataacatcgttcctaacagtatcaatgatacaataaacagcacaaaaactgaacagccagccacaaaagaaacttcaatgaaaaacaaaccagactttaaagcactgacggattctaatgccattttatatccatctttggcatcaaatgcttctaatcataatagtcatgtggtggatatgctaaggaaaaatgaaggtcctcacacttcagcaaatgtaggtgttctaagtagttgcctggatgtaagaacagtaattcctgaaacatctgtatccagtactgtttccagcacacaaactatggtaacccagcagaccattaaaactgaatcatccagtacaaatggggcagttgttaaagatgaaacttcactaacaacattcagtaccaaatctgaagttgatgaaacatatgcactgcctgcaacgaagatcagccgtgtagagacacatgctacagcaacgccgttttctaaagagactccttcaaatccagtggccacagtgaaagcgggagaacgacaatggtgtgatgtgggaatttttaaaaataatacagctttggtgagccagttttatttgctgccaaaagggaagcaaagcatctcaaaggtaggaaatgcagatgtacctgactacagcttgcttaagaaacaagatcttgttccaggcacaggatacagattcagggttgctgcaatcaatggttgtgggataggtcctttcagcaaaatcagtgaatttaaaacttgtattcctggttttcctggagctccttctgcagtcagaatttcaaagaatgttgaaggtatccacctttcctgggaacctccaacctcaccttctggaaatattttggaatattcagcctacttggctatccgcacagcacagatacaagataatccaagtcaacttgtgttcatgaggatttattgtggtcttaagacatcatgtatagtaactgctgggcaacttgcaaatgcacatattgattatacatccaggcctgccattgtgttcaggatatcagcaaagaatgaaaagggatatggaccagctacacaagttcggtggcttcaaggtaacaataagaaagcacctttaaattgaattggtttttttactgaagctattgtgatgatgattatttattagtaactggttatgaagatttgtcatttaaaagagtattctctggctgtatttccagcagttatgaacttgagtttgtaaattgttcttaaaatgtatttgctgaattatagatccaaataaaagaaaagaagcaaagactctctgaaaattagtatatgagttcttccttacagatatagctcttttataaagaaaaacagtgaaattaagataaaagctagaaagctttattaccccaatatcttttataagggctgtgtaacccagtcatcctagagttattgagatgattctggtaactggctgttgtatactatgctgtcttatatagtaaatgttctctacattgtaaatgtcctacctttgagtactccttctatctttattctatatgagcagtgttcctctaacaactgtcttctattggataatatgtgtgatactataataattctaatagttatttgattcctttctttgtttacagttagcacagagcttaagaaattaaaaaagaggcaagtttagaaactgcttttgaacttttattattttccaagaatcatggtaaaatacaacaagaacaatgagttttcttgattcttaccaggccaatatatttgaatatatttttggccaaagcacttaacttatctggccctcattttcctcataacagatgagggagttaaagcagtttatcttttaggtccctttcagcactaaggttttgtgtttttagtagaagtgaagtatgtccctgaacattttcatctgtcttaatggctctaattttgcttttgctaaaattaaaatcttcataattgaattcaaaattaaagtatatgtcctcctattggagaaaaaaacaagcaccttaacaggacacaagttttaaaatagtgttttaaacatttgtaagatttttgtaaatgctctaaatgttttatttttgcattgtttttaccttgaaattgtataaacttttttactatgaaaatataagcattagacagctaactcaggttccattacaaccttaaagatacagataggcattataaacactctgctacaggtaacttgttttaaaccttttaggaatttcatggttccactgcctatttaaatctggaattaatatacagagcaataattgcagaaaagatatttcaaactaagagcttcaataactgcaggggcacaggtctatctttttttataccacataaccttatgccagtttaggttgactgagtagctatgtcctcaaatttcatgtatgataccccccagcaaagatggatttaattgtgcagaattgatatatatgtgtgttccagttactaatttaaagtgtatagaatattttaatatataatttttgtaaagaactgggatttttatactacagtatttgtaattaatgtgtctcactaattaagtttctcttgaagaaaatatgcaaattgttagacacataatgagtggtttccaaactctaaagataaaataaatgcactactatggtgttgttagaata

SEQ ID NO: 175577 - DNA, 2379 bp, Artificial Sequence
  derived and/or modified sequence
atggccgcccccagcctgctgaactggaggagagtgagcagcttcaccggccctgtgccccgggcccggcacggccacagagctgtggccatccgggagctgatgatcatctttggaggcggcaatgaaggaattgctgatgagctgcacgtgtacaacacagccaccaaccagtggttcctgcctgctgtgcggggggacatccccccaggctgtgccgcccacggctttgtgtgtgatggcacccgcatcctggtgtttggaggcatggtggagtatggccgctacagcaatgagctgtatgagctgcaggccagccgctggctgtggaagaaggtgaagccccaccccccacccagcggcctgcccccctgcccccggctgggccacagcttcagcctgtatggcaacaagtgctacctgtttggaggcctggccaatgaaagtgaggacagcaacaacaacgtgccccgctacctgaatgacttctatgagctggagctgcagcacggcagcggcgtggtgggctggagcatccctgtgaccaagggcgtggtgcccagcccccgggagagccacacagctgtgatctactgcaagaaggacagcggcagccccaagatgtatgtgtttggaggcatgtgtggggcccggctggatgacctgtggcagctggacctggagaccatgtcctggagcaagccagagaccaagggcaccgtgcccctgcccaggagcctgcacacagcctctgtgattggcaacaagatgtacatctttggaggctgggtgccccacaagggagaaaatacagagaccagcccccatgactgtgagtggcgctgcaccagcagcttctcctacctgaacctggacaccacagagtggaccaccctggtgtctgacagccaggaggacaagaagaacagccggccccggccccgggccggccactgtgctgtggccatcggcacccggctgtacttctggagcggcagagatggctacaagaaggccctgaacagccaggtgtgctgcaaggacctgtggtacctggacacagagaagcccccagcccccagccaggtgcagctgatcaaggccaccaccaacagcttccacgtgaagtgggatgaggtgtccacagtggagggctacctgctgcagctgagcacagacctgccctaccaggccgccagcagtgacagcagcgctgcccccaacatgcagggcgtgaggatggacccccaccggcagggcagcaacaacatcgtgcccaacagcatcaatgacaccatcaacagcaccaagacagagcagcctgccaccaaggagacctccatgaagaacaagccagacttcaaggccctgacagacagcaatgccatcctgtaccccagcctggccagcaatgccagcaaccacaacagccacgtggtggacatgctgaggaagaatgaaggcccccacaccagcgccaacgtgggcgtgctgagcagctgcctggatgtgaggacagtcatccctgagacctctgtgagcagcacagtgagcagcacccagaccatggtgacccagcagaccatcaagacagagagcagcagcaccaatggagctgtggtgaaggatgagaccagcctgaccaccttcagcaccaagtctgaggtggatgagacctacgccctgcctgccaccaagatcagccgggtggagacccacgccacagccacccccttcagcaaggagacccccagcaaccctgtggccaccgtgaaggccggggagcggcagtggtgtgatgtgggcatcttcaagaacaacacagccctggtgtcccagttctacctgctgcccaagggcaagcagagcatcagcaaggtgggcaatgctgatgtgcctgactacagcctgctgaagaagcaggacctggtgcccggcaccggctaccgcttccgggtggccgccatcaatggctgcggcatcggccccttcagcaagatcagcgagttcaagacctgcatccctggcttccctggggcccccagcgctgtgcgcatcagcaagaatgtggagggcatccacctgtcctgggagccccccaccagccccagcggcaacatcctggagtacagcgcctacctggccatcagaacagcccagatccaggacaaccccagccagctggtgttcatgaggatctactgcggcctgaagaccagctgcatcgtgacagctggccagctggccaatgcccacatcgactacaccagcaggcctgccatcgtgttccgcatcagcgccaagaatgagaagggctacggccctgccacccaggtgcgctggctgcagggcaacaacaagaaggcccccctgaactag

SEQ ID NO: 175578 - DNA, 2379 bp, Artificial Sequence
  derived and/or modified sequence
atggccgcccccagcctgctgaactggcggcgggtgagcagcttcaccggacctgtgcccagagccaggcacggtcaccgggcggtagccattcgggaactaatgataatttttggaggaggcaacgaagggatcgcagatgagctgcacgtgtataatacggctaccaaccagtggttcttacccgctgtgcgcggcgatatacccccggggtgcgcggcccatggttttgtctgcgacggcactcggatcctggtgtttggtggcatggtcgaatacgggagatattcaaatgaattgtacgaacttcaagcgagtagatggctttggaaaaaagtcaaaccacacccaccccccagtggcctgcctccctgcccccggctggggcattccttcagcctgtatgggaacaagtgttacctttttggaggtttggcaaacgagtcagaagatagtaataataatgtgcctcggtacttaaacgacttttacgagctcgagctgcagcacggctctggagtggttggatggagcatccctgtgaccaaaggggtagtaccaagtccccgtgagtcccacactgccgttatatattgtaaaaaggatagcggaagccccaagatgtacgtgtttggcggcatgtgtggcgctagactggacgatctgtggcaattagacctggagacaatgtcctggtctaagcctgagaccaaaggcaccgttcctcttcctagatcgctacatacagcctccgttattgggaacaaaatgtatatcttcggaggatgggttccacacaagggcgaaaatactgaaacttcaccacatgactgcgaatggagatgcacatcatcgttttcttaccttaatttggatactaccgaatggaccactctggtttccgatagtcaggaagataagaaaaattctcggccgcgccctagagccggtcactgcgcagtcgccatcggtacacgcctgtatttctggtccggcagggatggatacaaaaaagccctgaatagtcaggtgtgttgtaaagacctttggtacctcgataccgagaagcctcctgcaccctcacaggtccagctgataaaggcaaccactaattcctttcatgtcaagtgggatgaagtctccacggtggagggttatttgttacagctctctacagacctgccctaccaggccgcttcctcggacagctccgccgctcctaatatgcagggggtcaggatggaccctcaccggcaaggaagcaacaatatagtccccaatagtattaacgacactattaactcaacaaagactgagcagcctgcgaccaaggagacgtcgatgaaaaacaaacccgatttcaaggccttgactgacagtaacgctattctctacccctccctcgcatcaaatgcgtctaatcataactcacacgtggtagacatgctcagaaagaacgagggacctcatactagcgctaatgtgggcgttctttcctcctgtctcgacgtgagaacagtgatcccagaaacatcagtcagctcaaccgtctctagcacccagaccatggtcacacagcagaccattaaaactgagagctctagtaccaatggcgccgtggtgaaggacgaaacgagcttgaccaccttttctactaaatctgaagtggatgagacctacgcactgcccgccacaaagatttcacgtgtagaaactcatgccacagccacccccttcagtaaggaaactcctagcaatcctgtcgccaccgtaaaggccggcgaacgtcagtggtgcgacgtaggtatctttaagaataacacagcccttgtgtcacaattctatctgctgccaaaaggcaaacagagtatctctaaggttggcaacgcagacgtgcccgactacagtctcttgaaaaaacaagaccttgtgcccgggacagggtaccgcttcagagttgcggccattaatggttgtggtatcggccctttctcaaagatttccgagttcaagacctgcataccgggatttccaggggccccaagcgcagtcaggattagcaagaacgtcgaaggcatacacctgagctgggagccaccgacgagcccctctgggaacatactcgagtactcggcgtatctggcaattagaaccgctcagatccaggacaatccgtcccagcttgtcttcatgagaatatattgtggtctgaaaacaagctgcattgtcacggcaggacagctagcaaatgctcacattgattatacctcccgccctgccattgtcttcagaatctccgccaaaaatgaaaagggttacggaccagccactcaggtgaggtggctgcaaggcaataacaagaaagccccattgaactag

SEQ ID NO: 175579 - DNA, 2379 bp, Artificial Sequence
  derived and/or modified sequence
atggccgctccttcacttctcaattggcgaagagtgtcaagcttcactggtcccgtccccagggccagacacgggcacagagctgtggccatacgagagctgatgattatttttggaggcggtaatgagggtatcgccgacgaattacacgtgtataacactgccacaaaccagtggtttctcccggcagtaaggggtgatatccctcctggctgtgctgctcacgggttcgtgtgcgacggaacacgcatactggtctttggaggcatggttgagtatggccgatactctaacgagctgtacgagctgcaggcctcaagatggctgtggaagaaggtgaagccgcatcccccacctagtggactcccaccttgtccccgtctcggacatagctttagcctctatggtaacaaatgctatttgtttggcggattagcaaatgaatcagaggacagtaacaataatgtacctcgctacttgaacgacttctacgagctcgagttgcagcacgggagcggagtcgtgggttggtcaattcctgtgaccaagggcgtggtgcctagtcccagagagtcacatactgccgtgatttactgcaagaaggactctggaagtcccaaaatgtacgttttcggcggaatgtgcggtgctaggctggatgacctatggcagcttgacctagaaacgatgtcatggtccaaacctgagacaaaggggacggtgcctctcccgagatcactgcatactgcttctgtcataggaaacaaaatgtacatctttggcggatgggttccccacaagggtgaaaacactgagacttccccgcacgattgtgagtggaggtgcactagctctttcagctatctaaatctagatactacggaatggacaacccttgtcagcgactcacaggaagataaaaaaaacagccgaccaaggccacgcgctggccactgcgcggtcgcaatcggaacaagactgtatttctggtcaggcagggacgggtacaaaaaggccctcaacagtcaggtttgttgcaaagacctctggtatctggatacagaaaaaccacccgcaccctcccaagtgcagctcattaaggctaccaccaattctttccatgttaaatgggatgaagtctctacggtcgaaggatacttgctgcagctgtctacagatctcccttatcaggctgctagcagcgactctagcgctgcgcctaacatgcagggcgtgcgcatggacccccacaggcagggaagtaataacatagtccccaattccattaatgacaccattaattctactaaaaccgagcaacctgctacaaaggagacctctatgaagaacaaacccgacttcaaggctctcactgactctaatgctatactgtacccatctctggcttccaacgcaagcaatcataattctcacgtggtagatatgttgaggaagaatgagggaccacacacaagcgcgaatgttggcgtgttgtccagctgtttggatgtgcgcacagtgatacccgaaaccagcgttagtagcacagtgtcaagcactcagactatggttacgcagcagaccattaaaacagaaagctcctcaactaacggtgccgtggtgaaggacgagacctcactgaccactttctctaccaagtcagaggtcgacgaaacctacgccctgccggcaaccaaaatttctagagtggagacgcacgctaccgccacccctttctcaaaggagactcctagcaatcccgttgcaaccgttaaggccggagagcgccagtggtgcgatgtaggaatatttaaaaacaacaccgcgttagtaagccaattttacctcttgccaaagggcaagcagagcatctcaaaggtcgggaacgcagacgttcccgattactccctgctcaagaaacaagatctggttcccggaactggttacaggttcagggtcgcagccatcaatggatgtgggatcgggccattctccaaaatcagcgaatttaagacctgcataccgggattccccggtgcaccctcagccgtcagaatcagcaaaaacgtagagggtattcacctttcctgggagcctcctacgtctccttcaggcaatatactggaatattcagcatacttagcgatccggaccgctcagatccaagacaacccttcccaattggtcttcatgaggatctactgtggcctgaagacgtcatgtatagtgacggctggtcagctggccaacgcccatatcgactacacttcgagacccgcaattgtgttcaggattagcgccaagaacgagaagggatacgggcctgccacacaggtgcggtggttgcagggtaataacaagaaagcccctctcaactag

SEQ ID NO: 175580 - DNA, 2379 bp, Artificial Sequence
  derived and/or modified sequence
atggccgcccccagcctgctgaactggagaagagtgagcagcttcaccggccccgtgcccagagccagacacggccacagagccgtggccatcagagagctgatgatcatcttcggcggcggcaacgagggcatcgccgacgagctgcacgtgtacaacaccgccaccaaccagtggttcctgcccgccgtgagaggcgacatcccccccggctgcgccgcccacggcttcgtgtgcgacggcaccagaatcctggtgttcggcggcatggtggagtacggcagatacagcaacgagctgtacgagctgcaggccagcagatggctgtggaagaaggtgaagccccaccccccccccagcggcctgcccccctgccccagactgggccacagcttcagcctgtacggcaacaagtgctacctgttcggcggcctggccaacgagagcgaggacagcaacaacaacgtgcccagatacctgaacgacttctacgagctggagctgcagcacggcagcggcgtggtgggctggagcatccccgtgaccaagggcgtggtgcccagccccagagagagccacaccgccgtgatctactgcaagaaggacagcggcagccccaagatgtacgtgttcggcggcatgtgcggcgccagactggacgacctgtggcagctggacctggagaccatgagctggagcaagcccgagaccaagggcaccgtgcccctgcccagaagcctgcacaccgccagcgtgatcggcaacaagatgtacatcttcggcggctgggtgccccacaagggcgagaacaccgagaccagcccccacgactgcgagtggagatgcaccagcagcttcagctacctgaacctggacaccaccgagtggaccaccctggtgagcgacagccaggaggacaagaagaacagcagacccagacccagagccggccactgcgccgtggccatcggcaccagactgtacttctggagcggcagagacggctacaagaaggccctgaacagccaggtgtgctgcaaggacctgtggtacctggacaccgagaagccccccgcccccagccaggtgcagctgatcaaggccaccaccaacagcttccacgtgaagtgggacgaggtgagcaccgtggagggctacctgctgcagctgagcaccgacctgccctaccaggccgccagcagcgacagcagcgccgcccccaacatgcagggcgtgagaatggacccccacagacagggcagcaacaacatcgtgcccaacagcatcaacgacaccatcaacagcaccaagaccgagcagcccgccaccaaggagaccagcatgaagaacaagcccgacttcaaggccctgaccgacagcaacgccatcctgtaccccagcctggccagcaacgccagcaaccacaacagccacgtggtggacatgctgagaaagaacgagggcccccacaccagcgccaacgtgggcgtgctgagcagctgcctggacgtgagaaccgtgatccccgagaccagcgtgagcagcaccgtgagcagcacccagaccatggtgacccagcagaccatcaagaccgagagcagcagcaccaacggcgccgtggtgaaggacgagaccagcctgaccaccttcagcaccaagagcgaggtggacgagacctacgccctgcccgccaccaagatcagcagagtggagacccacgccaccgccacccccttcagcaaggagacccccagcaaccccgtggccaccgtgaaggccggcgagagacagtggtgcgacgtgggcatcttcaagaacaacaccgccctggtgagccagttctacctgctgcccaagggcaagcagagcatcagcaaggtgggcaacgccgacgtgcccgactacagcctgctgaagaagcaggacctggtgcccggcaccggctacagattcagagtggccgccatcaacggctgcggcatcggccccttcagcaagatcagcgagttcaagacctgcatccccggcttccccggcgcccccagcgccgtgagaatcagcaagaacgtggagggcatccacctgagctgggagccccccaccagccccagcggcaacatcctggagtacagcgcctacctggccatcagaaccgcccagatccaggacaaccccagccagctggtgttcatgagaatctactgcggcctgaagaccagctgcatcgtgaccgccggccagctggccaacgcccacatcgactacaccagcagacccgccatcgtgttcagaatcagcgccaagaacgagaagggctacggccccgccacccaggtgagatggctgcagggcaacaacaagaaggcccccctgaactag

SEQ ID NO: 175581 - protein, 275 aa, Artificial Sequence
  derived and/or modified sequence
MYLEHTSHCPHHDDDTAMDTPLPRPRPLLAVERTGQRPLWAPSLELPKPVMQPLPAGAFLEEVAEGTPAQTESEPKVLDPEEDLLCIAKTFSYLRESGWYWGSITASEARQHLQKMPEGTFLVRDSTHPSYLFTLSVKTTRGPTNVRIEYADSSFRLDSNCLSRPRILAFPDVVSLVQHYVASCTADTRSDSPDPAPTPALPMPKEDAPSDPALPAPPPATAVHLKLVQPFVRRSSARSLQHLCRLVINRLVADVDCLPLPRRMADYLRQYPFQL

SEQ ID NO: 175582 - DNA, 828 bp, Artificial Sequence
  derived and/or modified sequence
atgtatcttgagcatacctctcactgtcctcaccacgacgatgatactgcaatggacacacctttgccccggccaagacccctactggccgtagaacgtactggccagagacccctttgggccccaagccttgagcttccaaaaccggtgatgcaacccctccccgcgggagccttcctcgaagaagtggccgaaggtacccctgcacagactgagagcgaaccaaaagttctcgatcccgaggaagatctactatgtatcgcaaagacgttttcctatcttagagaatccgggtggtattggggttccatcacggcgtcagaagcccgccaacacctccagaaaatgcctgagggcacgttcctggtaagggactcaacgcatccaagctacctcttcactttaagcgtgaagaccacaagaggccccaccaacgtgagaatcgagtacgccgattcatcattccgtctagattccaactgcctgtccaggccgcggattctagccttccctgacgtggtgtcattagtccagcactacgtggcttcctgcaccgcagacaccaggtccgactccccagaccctgccccaacccctgctctgcccatgcccaaggaagacgccccgagcgatccagccctgcctgcaccgcccccagccaccgcagtgcatcttaagttagtgcagccatttgtgcgcaggtctagcgctcgctctctgcagcatctgtgccgtctcgtcatcaatcgacttgtggccgatgtcgactgcctccccctgccaaggaggatggcagactacttacggcagtaccctttccagctgtag

SEQ ID NO: 175583 - DNA, 828 bp, Artificial Sequence
  derived and/or modified sequence
atgtacctggagcacaccagccactgcccccaccatgatgatgacacagccatggacacccccctgccccggccccggcccctgctggccgtggagaggacaggccagaggcccctgtgggcccccagcctggagctgcccaagcctgtgatgcagcccctgcctgctggggccttcctggaggaggtggccgagggcaccccagcccagacagaaagtgagcccaaggtgctggaccctgaggaggacctgctgtgcatcgccaagaccttctcctacctgcgggagagcggctggtactggggcagcatcacagccagcgaggcccggcagcacctgcagaagatgcctgagggcaccttcctggtgcgggacagcacccaccccagctacctgttcaccctgtctgtgaagaccacccggggccccaccaacgtgcgcatcgagtatgctgacagcagcttccggctggacagcaactgcctgagccggccccgcatcctggccttcccagatgtggtgtccctggtgcagcactacgtggccagctgcacagctgacaccaggagtgacagcccagaccctgcccccaccccagccctgcccatgcccaaggaggatgcccccagcgaccctgccctgcctgcccctcctccagccacagctgtgcacctgaagctggtgcagccctttgtgagaagaagcagcgcccggagcctgcagcacctgtgccgcctggtgatcaaccggctggtggctgatgtggactgcctgcccctgcccaggaggatggctgactacctgcggcagtaccccttccagctgtag

SEQ ID NO: 175584 - DNA, 828 bp, Artificial Sequence
  derived and/or modified sequence
atgtacctggagcacaccagccactgcccccaccacgacgacgacaccgctatggatacccccttgccacgccctcggcctctcctggctgtggaacggactgggcaaaggcctttatgggcccctagcctggagctgcctaagcctgtgatgcagccccttcctgccggggctttcctggaggaggtggcagagggcactcccgctcagactgaaagtgagcccaaggtcttggatcctgaagaagatctcctctgtattgccaaaacttttagctacttgagagagtctggatggtactgggggtccatcacagcgtctgaggcccgtcagcacttacagaagatgcctgaaggcactttcctggttcgcgattctacccacccgagctacctgtttacactcagtgtgaaaacaactaggggaccaacaaacgtgaggattgagtacgccgattcttcatttcgactggattcaaactgcctaagtcgtcctcgtatactcgccttccctgatgtcgtgtccctggttcagcactatgtcgctagctgtacagcggacacacgaagcgactccccagatcctgcacccacaccggcactgcccatgccaaaagaggatgctcccagcgaccccgccttgcccgcccccccacctgcgacagccgtccatttgaaattagtccagccttttgttcgccggtcaagtgcccgttctctgcagcatttgtgccgattggtgatcaataggttagttgcggatgtcgactgtctgcctcttcccagacggatggccgactacctgcgccaatacccgtttcagttgtag

SEQ ID NO: 175585 - DNA, 828 bp, Artificial Sequence
  derived and/or modified sequence
atgtatctcgagcacacctcgcattgtccccatcacgatgacgacacagctatggacacccccctgccacgccctagaccactactggccgtggaacgaactggccagcggccactgtgggctcctagtttggagttaccaaagcctgtgatgcagccgctgccagccggagcttttcttgaggaagttgccgagggaacgccagcacagacagagtccgagcccaaggtgctggacccggaggaggatctcctgtgtatcgcgaagaccttcagctacctaagggaatccggctggtactgggggtcaatcaccgcttccgaagctcgacaacatcttcaaaagatgccggaggggaccttcctggtaagggacagcactcacccttcttatttgttcaccctgagtgttaagacaactcgcggtcctactaacgtgcgaattgaatacgcggacagctcctttcgtcttgattcaaattgcttgtcccgtccaagaattctcgcctttcccgacgtggttagcctggttcaacattatgtcgcttcctgcaccgctgataccagaagcgatagtccagaccctgcccctacccctgccctccctatgcctaaagaggatgcaccttccgacccagcacttcctgcacccccaccagccactgcggtccaccttaagctggtccaaccgtttgtgcgtagaagttccgctcggtccctgcaacatctctgtcggctggtcatcaacaggctcgttgccgatgttgattgcctccctctgcctaggcgaatggctgattatctccggcagtatccctttcagctgtag

SEQ ID NO: 175586 - DNA, 2167 bp, Artificial Sequence
  derived and/or modified sequence
tccctgtcctgcgcccgcgcgccccgggagcctacccagcacgcgctccgcgcccactggttccctccagccgccgccgtccagccgagtccccactccggagtcgccgctgccgcggggacatggtcctctgcgttcaggggtgagcacccccttgtaagctcagggctactgttgggtgtcagggaacaaagttttagactgctgcgctccaaagcgggcacacacatgtacctagaacacaccagccactgtccccaccatgatgatgacacagccatggacacacccctgcccagacctcgtcctttgctggctgtggagcggactgggcagcggcccctgtgggccccgtccctggaactgcccaagccagtcatgcagcccttgcctgctggggccttcctcgaggaggtggcagagggtaccccagcccagacagagagtgagccaaaggtgctggacccagaggaggatctgctgtgcatagccaagaccttctcctaccttcgggaatctggctggtattggggttccattacggccagcgaggcccgacaacacctgcagaagatgccagaaggcacgttcttagtacgtgacagcacgcaccccagctacctgttcacgctgtcagtgaaaaccactcgtggccccaccaatgtacgcattgagtatgccgactccagcttccgtctggactccaactgcttgtccaggccacgcatcctggcctttccggatgtggtcagccttgtgcagcactatgtggcctcctgcactgctgatacccgaagcgacagccccgatcctgctcccaccccggccctgcctatgcctaaggaggatgcgcctagtgacccagcactgcctgctcctccaccagccactgctgtacacctaaaactggtgcagccctttgtacgcagaagcagtgcccgcagcctgcaacacctgtgccgccttgtcatcaaccgtctggtggccgacgtggactgcctgccactgccccggcgcatggccgactacctccgacagtaccccttccagctctgactgtacggggcaatctgcccaccctcacccagtcgcaccctggaggggacatcagccccagctggacttgggcccccactgtccctcctccaggcatcctggtgcctgcatacctctggcagctggcccaggaagagccagcaagagcaaggcatgggagaggggaggtgtcacacaacttggaggtaaatgcccccaggccgcatgtggcttcattatactgagccatgtgtcagaggatggggagacaggcaggaccttgtctcacctgtgggctgggcccagacctccactcgcttgcctgccctggccacctgaactgtatgggcactctcagccctggtttttcaatccccagggtcgggtaggacccctactggcagccagcctctgtttctgggaggatgacatgcagaggaactgagatcgacagtgactagtgaccccttgttgaggggtaagccaggctaggggactgcacaattatacactatttatttatttattctccttggggttggtgtcaggggcgagccaaccccacctctatgccctgagccctggtagtccagagaccccaactctgccctggcttctctggttcttccctgtggaaagcccatcctgagacatcttgctggaaccaaggcaatcctggatgtcctggtactgacccacccgtctgtgaatgtgtccactctcttctgcccccagccatatttggggaggatggacaactacaataggtaagaaaatgcagccggagcctcagtccccagcagagcctgtgtctcaccccctcacaggacagagctgtatctgcatagagctggtctcactgtggcgcaggccccggggggagtgcctgtgctgtcaggaagagggggtgctggtttgagggccgccactgcagttctgctaggtctgcttcctgcccaggaaggtgcctgcacatgagaggagagaaatacacgtctgataagacttcatgaaataataattatagcaaagaacagtttggtggtcttttctcttccactgatttttctgtaatgacattatacctttattacctctttattttattacctctataataaaatgatacctt

SEQ ID NO: 175587 - DNA, 828 bp, Artificial Sequence
  derived and/or modified sequence
atgtacctggagcacaccagccactgcccccaccacgacgacgacaccgccatggacacccccctgcccagacccagacccctgctggccgtggagagaaccggccagagacccctgtgggcccccagcctggagctgcccaagcccgtgatgcagcccctgcccgccggcgccttcctggaggaggtggccgagggcacccccgcccagaccgagagcgagcccaaggtgctggaccccgaggaggacctgctgtgcatcgccaagaccttcagctacctgagagagagcggctggtactggggcagcatcaccgccagcgaggccagacagcacctgcagaagatgcccgagggcaccttcctggtgagagacagcacccaccccagctacctgttcaccctgagcgtgaagaccaccagaggccccaccaacgtgagaatcgagtacgccgacagcagcttcagactggacagcaactgcctgagcagacccagaatcctggccttccccgacgtggtgagcctggtgcagcactacgtggccagctgcaccgccgacaccagaagcgacagccccgaccccgcccccacccccgccctgcccatgcccaaggaggacgcccccagcgaccccgccctgcccgcccccccccccgccaccgccgtgcacctgaagctggtgcagcccttcgtgagaagaagcagcgccagaagcctgcagcacctgtgcagactggtgatcaacagactggtggccgacgtggactgcctgcccctgcccagaagaatggccgactacctgagacagtaccccttccagctgtag

SEQ ID NO: 175588 - protein, 510 aa, Artificial Sequence
  derived and/or modified sequence
TGGGVAPAGQVRTATWARRARPYRKMAARTGTELASAASTTAPGSSKRRKRHPWHTVSRRPGRTPKWRLPRISARAPYRLRRLRRHTYWPPRRPVAASRCWPVGATPLGSVGGRTGKMDAATLTYDTLRFAEFEDFPETSEPVWILGRKYSIFTEKDEILSDVASRLWFTYRKNFPAIGGTGPTSDTGWGCMLRCGQMIFAQALVCRHLGRDWRWTQRKRQPDSYFSVLNAFIDRKDSYYSIHQIAQMGVGEGKSIGQWYGPNTVAQVLKKLAVFDTWSSLAVHIAMDNTVVMEEIRRLCRTSVPCAGATAFPADSDRHCNGFPAGAEVTNRPSPWRPLVLLIPLRLGLTDINEAYVETLKHCFMMPQSLGVIGGKPNSAHYFIGYVGEELIYLDPHTTQPAVEPTDGCFIPDESFHCQHPPCRMSIAELDPSIAVGFFCKTEDDFNDWCQQVKKLSLLGGALPMFELVELQPSHLACPDVLNLSLDSSDVERLERFFDSEDEDFEILSL

SEQ ID NO: 175589 - protein, 319 aa, Artificial Sequence
  derived and/or modified sequence
MLRCGQMIFAQALVCRHLGRDWRWTQRKRQPDSYFSVLNAFIDRKDSYYSIHQIAQMGVGEGKSIGQWYGPNTVAQVLKKLAVFDTWSSLAVHIAMDNTVVMEEIRRLCRTSVPCAGATAFPADSDRHCNGFPAGAEVTNRPSPWRPLVLLIPLRLGLTDINEAYVETLKHCFMMPQSLGVIGGKPNSAHYFIGYVGEELIYLDPHTTQPAVEPTDGCFIPDESFHCQHPPCRMSIAELDPSIAVGFFCKTEDDFNDWCQQVKKLSLLGGALPMFELVELQPSHLACPDVLNLSLDSSDVERLERFFDSEDEDFEILSL

SEQ ID NO: 175590 - protein, 393 aa, Artificial Sequence
  derived and/or modified sequence
MDAATLTYDTLRFAEFEDFPETSEPVWILGRKYSIFTEKDEILSDVASRLWFTYRKNFPAIGGTGPTSDTGWGCMLRCGQMIFAQALVCRHLGRDWRWTQRKRQPDSYFSVLNAFIDRKDSYYSIHQIAQMGVGEGKSIGQWYGPNTVAQVLKKLAVFDTWSSLAVHIAMDNTVVMEEIRRLCRTSVPCAGATAFPADSDRHCNGFPAGAEVTNRPSPWRPLVLLIPLRLGLTDINEAYVETLKHCFMMPQSLGVIGGKPNSAHYFIGYVGEELIYLDPHTTQPAVEPTDGCFIPDESFHCQHPPCRMSIAELDPSIAVGFFCKTEDDFNDWCQQVKKLSLLGGALPMFELVELQPSHLACPDVLNLSLDSSDVERLERFFDSEDEDFEILSL

SEQ ID NO: 175591 - protein, 379 aa, Artificial Sequence
  derived and/or modified sequence
MWHLDFGLHTGKTFQPLPFIIVVYPGAGRRWGLVLSLASHRRRTEAGGGTGPTSDTGWGCMLRCGQMIFAQALVCRHLGRDWRWTQRKRQPDSYFSVLNAFIDRKDSYYSIHQIAQMGVGEGKSIGQWYGPNTVAQVLKKLAVFDTWSSLAVHIAMDNTVVMEEIRRLCRTSVPCAGATAFPADSDRHCNGFPAGAEVTNRPSPWRPLVLLIPLRLGLTDINEAYVETLKHCFMMPQSLGVIGGKPNSAHYFIGYVGEELIYLDPHTTQPAVEPTDGCFIPDESFHCQHPPCRMSIAELDPSIAVGFFCKTEDDFNDWCQQVKKLSLLGGALPMFELVELQPSHLACPDVLNLSLDSSDVERLERFFDSEDEDFEILSL

SEQ ID NO: 175592 - DNA, 2892 bp, Artificial Sequence
  derived and/or modified sequence
gcgccggcacacctattggcccccgcggcgtcccgtcgccgcgtcgcgttgctggcccgtcggagcgacgccgctcgggtcagtcggcggccggactgggaagatggacgcagctactctgacctacgacactctccggtttgctgagtttgaagattttcctgagacctcagagcccgtttggatactgggtagaaaatacagcattttcacagaaaaggacgagatcttgtctgatgtggcatctagactttggtttacatacaggaaaaactttccagccattggggggacaggccccacctcggacacaggctggggctgcatgctgcggtgtggacagatgatctttgcccaagccctggtgtgccggcacctaggccgagattggaggtggacacaaaggaagaggcagccagacagctacttcagcgtcctcaacgcattcatcgacaggaaggacagttactactccattcaccagatagcgcaaatgggagttggcgaaggcaagtccataggccagtggtacgggcccaacactgtcgcccaggtcctgaagaagcttgctgtcttcgatacgtggagctccttggcggtccacattgcaatggacaacactgttgtgatggaggaaatcagaaggttgtgcaggaccagcgttccctgtgcaggcgccactgcgtttcctgcagattccgaccggcactgcaacggattccctgccggagctgaggtcaccaacaggccgtcgccatggagacccctggtacttctcattcccctgcgcctggggctcacggacatcaacgaggcctacgtggagacgctgaagcactgcttcatgatgccccagtccctgggcgtcatcggagggaagcccaacagcgcccactacttcatcggctacgttggtgaggagctcatctacctggacccccacaccacgcagccagccgtggagcccactgatggctgcttcatcccggacgagagcttccactgccagcacccgccgtgccgcatgagcatcgcggagcttgacccgtccatcgctgtggggtttttctgtaagactgaagatgacttcaatgattggtgccagcaagtcaaaaagctgtctctgcttggaggtgccctgcccatgtttgagctggtggagctgcagccttcacatctggcctgccccgacgtcctgaacctgtccctagattcttctgatgtagagcgactggaaagattcttcgactcagaagatgaagactttgaaatcctgtccctttgaaaatcctggggtcgggggtggcacctgtgagagcctggggctcctggtgccgctgcgtttcatccatcccgcccgctcgcctgccgagggctgcgccccgtgctgcctccccccagagggccacccgctgtgctcgtggactgaggctgcgctgcccgggaggccttactgcttggtgtcagactgcccagctcagagtgcccgtcagggcctgtgcatccgcacgcggagccgtctgttaggagcttccagagtgttctctcgacactgccagccccgtgttagcacctgggcctcagtcccacttgctcccaggcgccggttctgtggttggtttggaattaaagtcctgtttgaagttgtcagacacagacatgaatttctgggcgctccctgagtcagagtctcagaagacctgtgcaggctggcgtgagaggagcggcagccacactgcggccccacgcccaaggactgggctgctctcgaggggggcgcgcccaccgctgtgtcctctctgcccagcctggcttaccaagggctacctcagtgggagatgaggttggaggaacgaaggcgaggttcctccttgctttggggagaaaagtattcaggaagtgggtgtgtgggaaacctgaagatggcgtgcacaggacacagcgtgggcggcctgggcagaagggcggctggctgtcctggagctgctgctggagcctgccctcagagtgtccctttccagtgctgtggcattctgtggcagcttccccaggtgtggtgacggggggggggcggggcctccacctgtgacagccaggcttgagggtggacggcgtgcctctcccaggagccttccccatgtccttgccttgctgagaattgccctcccatgccgctgaggtgttaggtggtttagggccaaaaggggaaaaccacttgagtcttgtggtgtgtggtgggcagacaccacagggtggcatcacctggtggcatttccagaacctcagccccgattccagcacccaccaccgcctgaccctgtgtaacctgctgtcccgggtcccagagtgcactctgccccgctgctctgctgcctgtcctgggaaagtatctttgccccactaggaaatgtaaacaggagggcttggggagcgtgggcacttttctcatgagcagctactgcggcgttggcaggactcgctgctgctgctgctgcttgtgtaggtcggggagccagagatccccgaggacgcgcgccggacagtcggcactgaccggcccacctggtagcagaggacacccccagccccccaagcattgaagacatagtgtatttcctcgtatcctttctcccttgggtgtagttggggtggggaagcagggaaggctggtgcgatctccattccttgggctccacgtccgagttcatggtgcgccgctgtgctgggagctgcagtggtaatgtgtgggacaccttgaccaaaggggagctttgtctcgtgtgttttgaaaaaggcttaatgaagagaatgttgttcattcttagtagtatagtttgcaattcttaatggcaaataataagtttcagtagaaaacaaaaaaaaaaaaaaaaa

SEQ ID NO: 175593 - DNA, 1533 bp, Artificial Sequence
  derived and/or modified sequence
accggcggcggcgtggcccccgccggccaggtgagaaccgccacctgggccagaagagccagaccctacagaaagatggccgccagaaccggcaccgagctggccagcgccgccagcaccaccgcccccggcagcagcaagagaagaaagagacacccctggcacaccgtgagcagaagacccggcagaacccccaagtggagactgcccagaatcagcgccagagccccctacagactgagaagactgagaagacacacctactggccccccagaagacccgtggccgccagcagatgctggcccgtgggcgccacccccctgggcagcgtgggcggcagaaccggcaagatggacgccgccaccctgacctacgacaccctgagattcgccgagttcgaggacttccccgagaccagcgagcccgtgtggatcctgggcagaaagtacagcatcttcaccgagaaggacgagatcctgagcgacgtggccagcagactgtggttcacctacagaaagaacttccccgccatcggcggcaccggccccaccagcgacaccggctggggctgcatgctgagatgcggccagatgatcttcgcccaggccctggtgtgcagacacctgggcagagactggagatggacccagagaaagagacagcccgacagctacttcagcgtgctgaacgccttcatcgacagaaaggacagctactacagcatccaccagatcgcccagatgggcgtgggcgagggcaagagcatcggccagtggtacggccccaacaccgtggcccaggtgctgaagaagctggccgtgttcgacacctggagcagcctggccgtgcacatcgccatggacaacaccgtggtgatggaggagatcagaagactgtgcagaaccagcgtgccctgcgccggcgccaccgccttccccgccgacagcgacagacactgcaacggcttccccgccggcgccgaggtgaccaacagacccagcccctggagacccctggtgctgctgatccccctgagactgggcctgaccgacatcaacgaggcctacgtggagaccctgaagcactgcttcatgatgccccagagcctgggcgtgatcggcggcaagcccaacagcgcccactacttcatcggctacgtgggcgaggagctgatctacctggacccccacaccacccagcccgccgtggagcccaccgacggctgcttcatccccgacgagagcttccactgccagcaccccccctgcagaatgagcatcgccgagctggaccccagcatcgccgtgggcttcttctgcaagaccgaggacgacttcaacgactggtgccagcaggtgaagaagctgagcctgctgggcggcgccctgcccatgttcgagctggtggagctgcagcccagccacctggcctgccccgacgtgctgaacctgagcctggacagcagcgacgtggagagactggagagattcttcgacagcgaggacgaggacttcgagatcctgagcctgtag

SEQ ID NO: 175594 - DNA, 1709 bp, Artificial Sequence
  derived and/or modified sequence
agacgggcgggggagtcgccccggcggggcaagtccgtaccgcgacatgggcgcgccgagcacgtccgtaccgcaagatggctgctcggacggggacagagctcgcctctgccgcctcgacaactgctcctgggtcctctaagaggaggaagcgccacccatggcacacagtgtcccgtcggcccggccgtacgccaaaatggcggctcccgcgtatttccgctcgcgcgccgtatcgtcttcgccgcctgcgccggcacacctattggcccccgcggcgtcccgtcgccgcgtcgcgttgctggcccgtcggagcgacgccgctcgggtcagtcggcggccggactgggaagatggacgcagctactctgacctacgacactctccggtttgctgagtttgaagattttcctgagacctcagagcccgtttggatactgggtagaaaatacagcattttcacagaaaaggacgagatcttgtctgatgtggcatctagactttggtttacatacaggaaaaactttccagccattggggggacaggccccacctcggacacaggctggggctgcatgctgcggtgtggacagatgatctttgcccaagccctggtgtgccggcacctaggccgagattggaggtggacacaaaggaagaggcagccagacagctacttcagcgtcctcaacgcattcatcgacaggaaggacagttactactccattcaccagatagcgcaaatgggagttggcgaaggcaagtccataggccagtggtacgggcccaacactgtcgcccaggtcctgaagaagcttgctgtcttcgatacgtggagctccttggcggtccacattgcaatggacaacactgttgtgatggaggaaatcagaaggttgtgcaggaccagcgttccctgtgcaggcgccactgcgtttcctgcagattccgaccggcactgcaacggattccctgccggagctgaggtcaccaacaggccgtcgccatggagacccctggtacttctcattcccctgcgcctggggctcacggacatcaacgaggcctacgtggagacgctgaagcactgcttcatgatgccccagtccctgggcgtcatcggagggaagcccaacagcgcccactacttcatcggctacgttggtgaggagctcatctacctggacccccacaccacgcagccagccgtggagcccactgatggctgcttcatcccggacgagagcttccactgccagcacccgccgtgccgcatgagcatcgcggagcttgacccgtccatcgctgtggggtttttctgtaagactgaagatgacttcaatgattggtgccagcaagtcaaaaagctgtctctgcttggaggtgccctgcccatgtttgagctggtggagctgcagccttcacatctggcctgccccgacgtcctgaacctgtccctagattcttctgatgtagagcgactggaaagattcttcgactcagaagatgaagactttgaaatcctgtccctttgaaaatcctggggtcgggggtggcacctgtgagagcctggggctcctggtgccgctgcgtttcatccatcccgcccgctcgcctgccgagggctgcgccccgtgctgcctccccccagagggccacccgctgtgctcgtggactgaggctgcgctgcccgggaggccttactgctt

SEQ ID NO: 175595 - DNA, 1182 bp, Artificial Sequence
  derived and/or modified sequence
atggacgccgccaccctgacctacgacaccctgagattcgccgagttcgaggacttccccgagaccagcgagcccgtgtggatcctgggcagaaagtacagcatcttcaccgagaaggacgagatcctgagcgacgtggccagcagactgtggttcacctacagaaagaacttccccgccatcggcggcaccggccccaccagcgacaccggctggggctgcatgctgagatgcggccagatgatcttcgcccaggccctggtgtgcagacacctgggcagagactggagatggacccagagaaagagacagcccgacagctacttcagcgtgctgaacgccttcatcgacagaaaggacagctactacagcatccaccagatcgcccagatgggcgtgggcgagggcaagagcatcggccagtggtacggccccaacaccgtggcccaggtgctgaagaagctggccgtgttcgacacctggagcagcctggccgtgcacatcgccatggacaacaccgtggtgatggaggagatcagaagactgtgcagaaccagcgtgccctgcgccggcgccaccgccttccccgccgacagcgacagacactgcaacggcttccccgccggcgccgaggtgaccaacagacccagcccctggagacccctggtgctgctgatccccctgagactgggcctgaccgacatcaacgaggcctacgtggagaccctgaagcactgcttcatgatgccccagagcctgggcgtgatcggcggcaagcccaacagcgcccactacttcatcggctacgtgggcgaggagctgatctacctggacccccacaccacccagcccgccgtggagcccaccgacggctgcttcatccccgacgagagcttccactgccagcaccccccctgcagaatgagcatcgccgagctggaccccagcatcgccgtgggcttcttctgcaagaccgaggacgacttcaacgactggtgccagcaggtgaagaagctgagcctgctgggcggcgccctgcccatgttcgagctggtggagctgcagcccagccacctggcctgccccgacgtgctgaacctgagcctggacagcagcgacgtggagagactggagagattcttcgacagcgaggacgaggacttcgagatcctgagcctgtag

SEQ ID NO: 175596 - DNA, 1140 bp, Artificial Sequence
  derived and/or modified sequence
atgtggcacctggacttcggcctgcacaccggcaagaccttccagcccctgcccttcatcatcgtggtgtaccccggcgccggcagaagatggggcctggtgctgagcctggccagccacagaagaagaaccgaggccggcggcggcaccggccccaccagcgacaccggctggggctgcatgctgagatgcggccagatgatcttcgcccaggccctggtgtgcagacacctgggcagagactggagatggacccagagaaagagacagcccgacagctacttcagcgtgctgaacgccttcatcgacagaaaggacagctactacagcatccaccagatcgcccagatgggcgtgggcgagggcaagagcatcggccagtggtacggccccaacaccgtggcccaggtgctgaagaagctggccgtgttcgacacctggagcagcctggccgtgcacatcgccatggacaacaccgtggtgatggaggagatcagaagactgtgcagaaccagcgtgccctgcgccggcgccaccgccttccccgccgacagcgacagacactgcaacggcttccccgccggcgccgaggtgaccaacagacccagcccctggagacccctggtgctgctgatccccctgagactgggcctgaccgacatcaacgaggcctacgtggagaccctgaagcactgcttcatgatgccccagagcctgggcgtgatcggcggcaagcccaacagcgcccactacttcatcggctacgtgggcgaggagctgatctacctggacccccacaccacccagcccgccgtggagcccaccgacggctgcttcatccccgacgagagcttccactgccagcaccccccctgcagaatgagcatcgccgagctggaccccagcatcgccgtgggcttcttctgcaagaccgaggacgacttcaacgactggtgccagcaggtgaagaagctgagcctgctgggcggcgccctgcccatgttcgagctggtggagctgcagcccagccacctggcctgccccgacgtgctgaacctgagcctggacagcagcgacgtggagagactggagagattcttcgacagcgaggacgaggacttcgagatcctgagcctgtag

SEQ ID NO: 175597 - DNA, 1533 bp, Artificial Sequence
  derived and/or modified sequence
acaggcgggggagtcgcccccgcggggcaagtgcgcacagctacctgggcaagacgagcccgaccctataggaagatggctgcacgaactggcacagaacttgcctctgctgcttccacaacagctcccgggtcttccaagcgaaggaaaaggcacccgtggcacactgtgtcgcggagacccggtcggactcccaaatggcgtttgcctaggatctccgccagagccccttatcggctgcggcgcctgcgccgccacacgtactggcccccgcggcgaccagtggccgcctccaggtgctggcctgttggagcgactcctctaggtagcgtggggggccggaccggaaaaatggacgcagctactttgacatatgatactctgagattcgcagagttcgaggatttccctgagacgtccgagcctgtgtggatcctcgggcggaagtactccattttcactgagaaagatgagattttaagtgatgtggcttcgcgactgtggttcacataccggaagaacttccccgctattgggggaacaggcccaacaagcgatacagggtggggctgcatgctccggtgcggccagatgatcttcgctcaggctctggtctgccgccacctcgggagagactggagatggacccaacgcaagagacagcccgattcatatttctcagtcttgaatgctttcattgaccgtaaggactcatactattctatccatcagattgcgcagatgggagtcggggaagggaaaagcattggccagtggtacggacctaacactgtggcacaagttttgaagaagctcgcagtgttcgatacatggagctctctcgctgttcacatcgccatggataacacagtggtgatggaggagatcaggaggctttgcaggacaagtgtgccgtgcgctggcgcgaccgctttccctgctgattcagatcggcactgcaacgggttccctgctggagcagaggtcacgaaccgccctagtccttggaggccactcgtgctactgatccctttacggttaggactcacagatatcaatgaagcctatgtggagactttaaagcactgcttcatgatgcctcagagcttgggggtgatcggaggcaaacccaacagcgcccattacttcatcgggtatgttggtgaggaattgatctatctggaccctcacaccacgcagcccgctgtggagcccacagacgggtgtttcattcctgacgaaagtttccactgccaacaccccccgtgccggatgagtatcgccgagctcgacccatcaattgcagtaggctttttttgcaagactgaggacgactttaatgattggtgtcaacaggtaaaaaagctctctctgctggggggcgcgttgcccatgttcgagttggtagagctacagcctagtcacctggcatgtcccgatgtgctcaatcttagtctggattcctccgacgtggagcggcttgagcgctttttcgattctgaggacgaagatttcgagatcctgtccttatag

SEQ ID NO: 175598 - DNA, 1182 bp, Artificial Sequence
  derived and/or modified sequence
atggatgcagccacgcttacatacgatacgttgcgatttgcagagtttgaggattttcccgagacatcagaaccagtgtggattctggggcgaaagtattccatcttcaccgaaaaggatgaaattctatccgatgtggctagcaggctgtggttcacctacagaaaaaattttcccgccattggtggaacaggccctacatccgatacaggttgggggtgcatgctgcgatgtgggcagatgatcttcgcacaggcgttagtgtgtcgccacttaggacgcgactggagatggactcaacgtaagaggcaaccggatagttatttcagcgtgctgaatgcctttattgatcgcaaagacagctactactcaatccaccaaattgctcagatgggagttggcgagggcaaatctatcggccagtggtacggtcccaatactgtggctcaggtgttgaagaaactggcagtgtttgatacctggagctccctcgccgttcacattgcaatggacaacaccgtggtcatggaagagatccggaggctgtgccgcacttcagtcccctgtgccggagccactgcattcccagccgatagtgaccgccattgtaatggattcccagcaggtgctgaggtgaccaatcgccctagcccttggagaccactcgtcctgctgatcccattgaggttgggcttgactgacatcaatgaggcctatgtggagactttgaaacactgctttatgatgccgcaaagcttgggcgtgatcggcggaaagcccaactcagctcattatttcatcggttatgttggggaggagttaatttatctagatcctcacacaacccagcctgccgtggagcctactgatggatgctttatccctgacgaaagctttcactgtcagcacccaccatgcaggatgagcattgccgaactggacccgtccattgccgtgggattcttctgtaagaccgaggatgactttaatgattggtgtcaacaagtgaagaaactcagtctgctggggggagccttgcccatgttcgaactcgttgaacttcagccttcccacctggcttgtcccgatgttttgaatctgtcgctcgattcatcggacgttgagagactcgagcggtttttcgacagcgaagacgaagatttcgaaatactgagcttatag

SEQ ID NO: 175599 - DNA, 1140 bp, Artificial Sequence
  derived and/or modified sequence
atgtggcacttggattttgggctgcatacaggcaaaactttccagcctctcccctttatcatagtggtgtatccaggcgccggcagacgttggggccttgtactgtcactggcttcacaccggcggaggacggaggcgggtggtggaaccgggcccacaagtgacactggatggggatgtatgctgcgctgtggacaaatgatttttgcccaggctctagtgtgccgtcatctgggaagagattggcgctggacccagcgaaagaggcagcccgacagctacttttcagttctcaatgccttcatagaccggaaagattcctactacagtatccatcagatcgcacagatgggtgttggcgagggaaagagtatagggcagtggtatggacctaacacagtcgcccaagtgctgaaaaaattggcggtgtttgacacatggtcctcattggctgttcacatcgctatggacaatactgtggtgatggaagagattaggcgtctatgccggacgagcgtgccatgtgctggggccacagccttccccgccgattccgatcgacattgtaatggattccctgccggcgccgaagtaactaaccgaccctcaccttggaggcccctagttcttttgattccactgcgtttggggctaaccgacataaatgaagcctacgtagagacactaaagcattgctttatgatgccccaatctttgggagtcatcggcggaaagccgaacagcgctcactatttcatcggctatgtgggggaagagcttatatatctagacccccacacgacccagcccgcagtggaaccgactgacggatgtttcattcccgatgaatctttccactgtcagcaccctccttgccggatgtccatcgccgagctggacccgtctattgctgtcggatttttctgcaaaaccgaggatgacttcaacgattggtgccagcaggtcaagaagctgagcctactaggtggcgccttacctatgttcgagttagtggagctgcagcccagccaccttgcttgcccagacgtcttaaatctctcccttgactcaagcgacgtggaaaggctagagcgctttttcgactcagaagacgaggacttcgaaatcttgtcactgtag

SEQ ID NO: 175600 - DNA, 1533 bp, Artificial Sequence
  derived and/or modified sequence
actggaggcggcgtggccccagctggccaggtgaggacagccacctgggcccggcgggcccggccctacaggaagatggccgccaggactggaacagagctggccagcgctgccagcaccacagcccctggcagcagcaagaggaggaagaggcacccctggcacacagtgtccagaagacctggccgcacccccaagtggaggctgccccgcatcagcgcccgggccccctaccgcctgcggcggctgcggcggcacacctactggccaccccggcggcctgtggccgccagccgctgctggcctgtgggcgccacccccctgggctctgtgggcggccgcacaggcaagatggatgctgccaccctgacctatgacaccctgcgctttgctgagtttgaggacttccctgagaccagcgagcctgtgtggatcctgggcaggaagtacagcatcttcacagagaaggatgagatcctgagtgatgtggccagccggctgtggttcacctacaggaagaacttccctgccatcggcggcaccggccccaccagtgacaccggctggggctgcatgctgcgctgtggccagatgatctttgcccaggccctggtgtgccgccacctgggccgggactggcgctggacccagaggaagaggcagcctgacagctacttctctgtgctgaatgccttcatcgacaggaaggacagctactacagcatccaccagatcgcccagatgggcgtgggggagggcaagagcatcggccagtggtacggccccaacacagtggcccaggtgctgaagaagctggccgtgtttgacacctggagcagcctggccgtgcacatcgccatggacaacacagtggtgatggaggagatccggcggctgtgcaggacctctgtgccctgtgccggggccacagccttccctgctgacagcgacagacactgcaatggcttccctgctggagctgaggtgaccaaccggcccagcccctggaggcccctggtgctgctgatccccctgcggctgggcctgacagacatcaatgaggcctacgtggagaccctgaagcactgcttcatgatgccccagagcctgggcgtgattggaggcaagcccaacagcgcccactacttcatcggctacgtgggggaggagctgatctacctggacccccacaccacccagcctgctgtggagcccacagatggctgcttcatcccagatgagagcttccactgccagcaccccccctgcaggatgagcattgctgagctggaccccagcattgctgtgggcttcttctgcaagacagaagatgacttcaatgactggtgccagcaggtgaagaagctgagcctgctgggcggggccctgcccatgtttgagctggtggagctgcagcccagccacctggcctgcccagatgtgctgaacctgagcctggacagcagtgatgtggagcggctggagcgcttctttgacagtgaagatgaagattttgagatcctgagcctgtag

SEQ ID NO: 175601 - DNA, 1182 bp, Artificial Sequence
  derived and/or modified sequence
atggatgctgccaccctgacctatgacaccctgcgctttgctgagtttgaggacttccctgagaccagcgagcctgtgtggatcctgggcaggaagtacagcatcttcacagagaaggatgagatcctgagtgatgtggccagccggctgtggttcacctacaggaagaacttccctgccatcggcggcaccggccccaccagtgacaccggctggggctgcatgctgcgctgtggccagatgatctttgcccaggccctggtgtgccgccacctgggccgggactggcgctggacccagaggaagaggcagcctgacagctacttctctgtgctgaatgccttcatcgacaggaaggacagctactacagcatccaccagatcgcccagatgggcgtgggggagggcaagagcatcggccagtggtacggccccaacacagtggcccaggtgctgaagaagctggccgtgtttgacacctggagcagcctggccgtgcacatcgccatggacaacacagtggtgatggaggagatccggcggctgtgcaggacctctgtgccctgtgccggggccacagccttccctgctgacagcgacagacactgcaatggcttccctgctggagctgaggtgaccaaccggcccagcccctggaggcccctggtgctgctgatccccctgcggctgggcctgacagacatcaatgaggcctacgtggagaccctgaagcactgcttcatgatgccccagagcctgggcgtcatcggcggcaagcccaacagcgcccactacttcatcggctacgtgggggaggagctgatctacctggacccccacaccacccagcctgctgtggagcccacagatggctgcttcatcccagatgagagcttccactgccagcaccccccctgcaggatgagcattgctgagctggaccccagcattgctgtgggcttcttctgcaagacagaagatgacttcaatgactggtgccagcaggtgaagaagctgagcctgctgggcggggccctgcccatgtttgagctggtggagctgcagcccagccacctggcctgcccagatgtgctgaacctgagcctggacagcagtgatgtggagcggctggagcgcttctttgattctgaagatgaggactttgagatcctgagcctgtag

SEQ ID NO: 175602 - DNA, 1140 bp, Artificial Sequence
  derived and/or modified sequence
atgtggcacctggactttggcctgcacacaggcaagaccttccagcccctgcccttcatcatcgtggtgtacccaggagctggaagacgctggggcctggtgctgagcctggccagccacagaagaagaacagaggccggcggcggcaccggccccaccagtgacaccggctggggctgcatgctgcgctgtggccagatgatctttgcccaggccctggtgtgccgccacctgggccgggactggcgctggacccagaggaagaggcagcctgacagctacttctctgtgctgaatgccttcatcgacaggaaggacagctactacagcatccaccagatcgcccagatgggcgtgggggagggcaagagcatcggccagtggtacggccccaacacagtggcccaggtgctgaagaagctggccgtgtttgacacctggagcagcctggccgtgcacatcgccatggacaacacagtggtgatggaggagatccggcggctgtgcaggacctctgtgccctgtgccggggccacagccttccctgctgacagcgacagacactgcaatggcttccctgctggagctgaggtgaccaaccggcccagcccctggaggcccctggtgctgctgatccccctgcggctgggcctgacagacatcaatgaggcctacgtggagaccctgaagcactgcttcatgatgccccagagcctgggcgtcatcggcggcaagcccaacagcgcccactacttcatcggctacgtgggggaggagctgatctacctggacccccacaccacccagcctgctgtggagcccacagatggctgcttcatcccagatgagagcttccactgccagcaccccccctgcaggatgagcattgctgagctggaccccagcattgctgtgggcttcttctgcaagacagaagatgacttcaatgactggtgccagcaggtgaagaagctgagcctgctgggcggggccctgcccatgtttgagctggtggagctgcagcccagccacctggcctgcccagatgtgctgaacctgagcctggacagcagtgatgtggagcggctggagcgcttctttgattctgaagatgaggactttgagatcctgagcctgtag

SEQ ID NO: 175603 - DNA, 1533 bp, Artificial Sequence
  derived and/or modified sequence
accggcggcggcgtggcccccgccggccaggtgcggaccgccacctgggctaggcgggcacgaccttatcggaagatggccgctagaaccggcaccgagctggccagtgcagccagcactacagccccaggatccagtaagcgtaggaagcgtcacccatggcatacggtgtctcgccgtcctgggcgaacccccaagtggaggctgccacggatttctgctcgcgcaccttataggttgaggcggctgcgccgccacacatattggccaccacggcgtcccgtggctgcgtctagatgctggcccgtgggggctacccctcttgggtccgtagggggacggaccggtaaaatggatgcagccacgttaacatacgacacgctgcgctttgctgaatttgaagattttcctgagaccagcgaacctgtctggatcctggggcggaagtactcaatcttcactgaaaaagatgagatcctatctgatgtggcgtcccgcctgtggttcacatataggaagaatttccctgccatcggcggcacaggcccaaccagcgatactgggtggggatgcatgttgcggtgtggccaaatgatctttgcacaagcgctggtgtgtagacatctgggccgggattggcgctggacacaacgaaaacgccagcccgactcctacttctcagttttgaacgcattcatcgaccgaaaggattcatactattccatacaccagattgctcagatgggcgtgggggaaggaaagtcgatcggacagtggtatggcccaaatacggtggcccaggtcctcaagaagctggcagtgttcgatacttggtcgtcccttgccgttcatattgcaatggacaacaccgtggtgatggaggagataaggaggttgtgtaggacctccgtcccctgtgcaggcgccacagctttccccgcagactcagaccggcattgtaatggctttccggcaggagccgaagtgacaaatcgcccatcaccatggcgacccctggtgctgctaattcccctccggctgggcttgacagatatcaacgaagcttatgtagagacgctaaagcactgtttcatgatgccacaatcactcggagtgatcgggggaaaaccgaacagcgcgcactactttatcggctatgtaggggaggagttgatttatcttgaccctcataccactcagccagccgtggaaccaaccgacggatgctttatcccagacgagtctttccattgccagcacccaccgtgtaggatgtccattgcggaacttgaccccagcatagcagttgggttcttttgtaaaacggaggatgacttcaacgactggtgtcaacaagtgaagaagctgtcccttctcggcggtgccttgcccatgttcgagctggtcgagctgcagcccagccacttggcttgtcccgatgtgctgaacctctccttagatagctcagatgtggaaaggctggagcgcttctttgactcggaagacgaagacttcgagattctgagtttatag

SEQ ID NO: 175604 - DNA, 1384 bp, Artificial Sequence
  derived and/or modified sequence
agtcggcggccggactgggaagatggacgcagctactctgacctacgacactctccggtttgctgagtttgaagattttcctgagacctcagagcccgtttggatactgggtagaaaatacagcattttcacagaaaaggacgagatcttgtctgatgtggcatctagactttggtttacatacaggaaaaactttccagccattggaggttgtcgggacatttcactctccagtaaatgtggcccttggcgttactgagtcctaagaggggggacaggccccacctcggacacaggctggggctgcatgctgcggtgtggacagatgatctttgcccaagccctggtgtgccggcacctaggccgagattggaggtggacacaaaggaagaggcagccagacagctacttcagcgtcctcaacgcattcatcgacaggaaggacagttactactccattcaccagatagcgcaaatgggagttggcgaaggcaagtccataggccagtggtacgggcccaacactgtcgcccaggtcctgaagaagcttgctgtcttcgatacgtggagctccttggcggtccacattgcaatggacaacactgttgtgatggaggaaatcagaaggttgtgcaggaccagcgttccctgtgcaggcgccactgcgtttcctgcagattccgaccggcactgcaacggattccctgccggagctgaggtcaccaacaggccgtcgccatggagacccctggtacttctcattcccctgcgcctggggctcacggacatcaacgaggcctacgtggagacgctgaagcactgcttcatgatgccccagtccctgggcgtcatcggagggaagcccaacagcgcccactacttcatcggctacgttggtgaggagctcatctacctggacccccacaccacgcagccagccgtggagcccactgatggctgcttcatcccggacgagagcttccactgccagcacccgccgtgccgcatgagcatcgcggagcttgacccgtccatcgctgtggggtttttctgtaagactgaagatgacttcaatgattggtgccagcaagtcaaaaagctgtctctgcttggaggtgccctgcccatgtttgagctggtggagctgcagccttcacatctggcctgccccgacgtcctgaacctgtccctagattcttctgatgtagagcgactggaaagattcttcgactcagaagatgaagactttgaaatcctgtccctttgaaaatcctggggtcgggggtggcacctgtgagagcctggggctcctggtgccgctgcgtttcatccatcccgcccgctcgcctgccgagggctgcgccccgtgctgcctccccccaga

SEQ ID NO: 175605 - DNA, 1182 bp, Artificial Sequence
  derived and/or modified sequence
atggacgccgccaccctgacctacgacaccctgcggttcgccgagttcgaagattttcctgagacatctgaacctgtgtggattctagggcgaaagtacagtatatttacagagaaggatgaaatactgagtgatgtcgcctcaagattgtggttcacgtaccggaagaatttcccagccattgggggtacagggccgacctccgatactggatgggggtgcatgctccgatgcggacagatgattttcgcccaggctctagtctgccggcatctgggccgagactggagatggacgcagaggaagaggcagcccgactcttacttttcagtgctcaatgctttcatcgaccggaaagactcctattactctatacatcagattgcccagatgggggttggagaaggaaagtctatcggccagtggtacggaccgaataccgtggcccaggtgcttaaaaagctcgccgtgttcgatacctggtctagtctcgcagtccacattgccatggacaacacagtggttatggaagagatccggcggctatgccggacttctgtaccgtgcgcaggggccaccgcatttcccgctgactcagaccgccattgtaatgggtttccagccggggcagaggtcaccaatcgccctagcccttggaggcctttggttctcctcatccctctgcgtttaggcctgaccgatatcaatgaggcatacgtggaaaccctgaagcactgttttatgatgcctcagagcctgggcgtcatcgggggaaagcccaatagcgcacactacttcataggttatgtaggcgaggagttgatttacttagatccacataccactcagcctgcggtggagcccacagatggatgttttattcccgacgagtcattccactgtcagcacccaccctgtcggatgagtatcgccgagctggacccttctatcgctgtagggttcttctgcaagaccgaggacgacttcaacgactggtgtcaacaggttaagaaactgtccctgcttggcggcgctctgcccatgttcgagttagtggagctccagccatctcacttggcctgtcctgatgtattgaacttaagcctcgactcctccgacgtcgagcgactggaaagattcttcgatagcgaggatgaggacttcgaaattctgagcttgtag

SEQ ID NO: 175606 - DNA, 2878 bp, Artificial Sequence
  derived and/or modified sequence
gcgccggcacacctattggcccccgcggcgtcccgtcgccgcgtcgcgttgctggcccgtcggagcgacgccgctcgggtcagtcggcggccggactgggaagatggacgcagctactctgacctacgacactctccggtttgctgagtttgaagattttcctgagacctcagagcccgtttggatactgggtagaaaatacagcattttcacagaaaaggacgagatcttgtctgatgtggcatctagactttggtttacatacaggaaaaactttccagccattggggggacaggccccacctcggacacaggctggggctgcatgctgcggtgtggacagatgatctttgcccaagccctggtgtgccggcacctaggccgagattggaggtggacacaaaggaagaggcagccagacagctacttcagcgtcctcaacgcattcatcgacaggaaggacagttactactccattcaccagatagcgcaaatgggagttggcgaaggcaagtccataggccagtggtacgggcccaacactgtcgcccaggtcctgaagaagcttgctgtcttcgatacgtggagctccttggcggtccacattgcaatggacaacactgttgtgatggaggaaatcagaaggttgtgcaggaccagcgttccctgtgcaggcgccactgcgtttcctgcagattccgaccggcactgcaacggattccctgccggagctgaggtcaccaacaggccgtcgccatggagacccctggtacttctcattcccctgcgcctggggctcacggacatcaacgaggcctacgtggagacgctgaagcactgcttcatgatgccccagtccctgggcgtcatcggagggaagcccaacagcgcccactacttcatcggctacgttggtgaggagctcatctacctggacccccacaccacgcagccagccgtggagcccactgatggctgcttcatcccggacgagagcttccactgccagcacccgccgtgccgcatgagcatcgcggagcttgacccgtccatcgctgtggggtttttctgtaagactgaagatgacttcaatgattggtgccagcaagtcaaaaagctgtctctgcttggaggtgccctgcccatgtttgagctggtggagctgcagccttcacatctggcctgccccgacgtcctgaacctgtccctagattcttctgatgtagagcgactggaaagattcttcgactcagaagatgaagactttgaaatcctgtccctttgaaaatcctggggtcgggggtggcacctgtgagagcctggggctcctggtgccgctgcgtttcatccatcccgcccgctcgcctgccgagggctgcgccccgtgctgcctccccccagagggccacccgctgtgctcgtggactgaggctgcgctgcccgggaggccttactgcttggtgtcagactgcccagctcagagtgcccgtcagggcctgtgcatccgcacgcggagccgtctgttaggagcttccagagtgttctctcgacactgccagccccgtgttagcacctgggcctcagtcccacttgctcccaggcgccggttctgtggttggtttggaattaaagtcctgtttgaagttgtcagacacagacatgaatttctgggcgctccctgagtcagagtctcagaagacctgtgcaggctggcgtgagaggagcggcagccacactgcggccccacgcccaaggactgggctgctctcgaggggggcgcgcccaccgctgtgtcctctctgcccagcctggcttaccaagggctacctcagtgggagatgaggttggaggaacgaaggcgaggttcctccttgctttggggagaaaagtattcaggaagtgggtgtgtgggaaacctgaagatggcgtgcacaggacacagcgtgggcggcctgggcagaagggcggctggctgtcctggagctgctgctggagcctgccctcagagtgtccctttccagtgctgtggcattctgtggcagcttccccaggtgtggtgacggggggggggcggggcctccacctgtgacagccaggcttgagggtggacggcgtgcctctcccaggagccttccccatgtccttgccttgctgagaattgccctcccatgccgctgaggtgttaggtggtttagggccaaaaggggaaaaccacttgagtcttgtggtgtgtggtgggcagacaccacagggtggcatcacctggtggcatttccagaacctcagccccgattccagcacccaccaccgcctgaccctgtgtaacctgctgtcccgggtcccagagtgcactctgccccgctgctctgctgcctgtcctgggaaagtatctttgccccactaggaaatgtaaacaggagggcttggggagcgtgggcacttttctcatgagcagctactgcggcgttggcaggactcgctgctgctgctgctgcttgtgtaggtcggggagccagagatccccgaggacgcgcgccggacagtcggcactgaccggcccacctggtagcagaggacacccccagccccccaagcattgaagacatagtgtatttcctcgtatcctttctcccttgggtgtagttggggtggggaagcagggaaggctggtgcgatctccattccttgggctccacgtccgagttcatggtgcgccgctgtgctgggagctgcagtggtaatgtgtgggacaccttgaccaaaggggagctttgtctcgtgtgttttgaaaaaggcttaatgaagagaatgttgttcattcttagtagtatagtttgcaattcttaatggcaaataataagtttcagtagaaaacaaa

SEQ ID NO: 175607 - DNA, 1140 bp, Artificial Sequence
  derived and/or modified sequence
atgtggcacctggacttcggcctgcacaccggcaagaccttccagccactaccattcattatcgtggtgtatcctggcgcaggaaggagatggggtctcgtgttatccctggcgtcgcacaggagacgaaccgaggccggcggaggtacagggccaacaagcgatactggttgggggtgcatgctgaggtgcgggcaaatgattttcgcccaggcccttgtgtgtcgccacctgggaagggattggcggtggacccagagaaagcgccaacccgacagttattttagcgtgttgaacgcatttatcgaccgaaaagatagttattactcaattcatcagatagcacagatgggagtgggcgagggcaagtccatcggccagtggtacggccctaacacggtggctcaagtgttgaagaaactggcagtgttcgacacttggtctagtctggcagtgcatattgctatggacaatacggtagtgatggaagaaattcgcagattatgtaggacatccgtcccctgcgcgggagctaccgcttttcccgccgattctgacagacactgcaacggatttcccgccggtgcagaggtaacgaaccgccccagcccgtggcgaccattggtgctcctgatacccttgaggttgggtcttaccgatatcaatgaggcctatgtcgagactctgaaacactgtttcatgatgccccagtcccttggagtgattggaggaaagccaaattcagcgcactatttcataggctacgtgggagaggaactaatatacctcgacccccatacaacacaacctgctgtggagcctaccgatggatgtttcattcccgatgaaagctttcactgtcagcaccccccatgccgcatgtccatcgctgagttagaccccagtatcgctgtgggcttcttctgcaaaaccgaggacgacttcaacgactggtgccagcaggtgaaaaaactcagcctccttgggggggctctcccaatgttcgaactggtggaactgcagcctagtcatctggcctgcccagacgtgctgaatctgagtcttgactcctctgacgttgagcggctggagaggttcttcgactccgaagacgaggacttcgagatcttgagcctgtag

SEQ ID NO: 175608 - DNA, 1533 bp, Artificial Sequence
  derived and/or modified sequence
accgggggaggtgtagcccctgctggacaagtgaggaccgctacttgggccagacgggctaggccataccggaaaatggccgctcgcacggggactgagttggcttctgccgctagtaccacggccccaggaagcagtaaacgcaggaaaagacacccatggcacactgtgtctagaagacccggtaggactcctaaatggcgcctaccccgtatctcagcaagggctccatatcggctgaggaggcttcggagacacacatattggcctccaagacgaccagtggctgccagccgatgctggcccgtgggtgcaactccgttgggctccgtgggtggtcgcaccgggaagatggatgccgctacccttacttacgacactctgaggtttgccgagttcgaggacttcccagagacatcggagcctgtgtggatcctaggacggaaatactctatcttcaccgagaaggacgagatcctgagtgatgtggccagccgcctttggttcacctacaggaagaactttcctgcaattggcggaaccggaccaacttcggataccgggtggggttgcatgctcaggtgcggccagatgatctttgcccaggctttggtttgccgccaccttggcagggactggagatggacgcaaaggaagagacaaccagacagttatttttcagtacttaatgcttttattgacaggaaagacagttattatagtatacatcagatcgcccagatgggcgtgggtgaaggcaagagcatcgggcagtggtacggcccaaataccgttgcccaggtcctgaagaaattggctgtgttcgacacctggagtagcttagcggtgcatatcgctatggacaacacggttgtgatggaggagattcggagattgtgccggaccagtgtgccatgtgccggagctaccgcttttccagccgattcagaccgacactgcaacgggttcccggcaggagctgaagtgaccaatcgaccatctccatggaggccactggtgcttttaataccccttcgactcgggcttactgacatcaacgaagcatatgttgaaacactgaaacactgcttcatgatgcctcagtcactgggcgtcatcggagggaagcccaacagcgcacactatttcataggctacgtcggggaagaactcatatacctggacccacacacaacccagcctgcagttgagccaacagatggttgcttcatcccggacgagtccttccattgccagcacccaccttgccggatgtctatcgcagaactggatcctagcatcgctgtgggcttcttttgcaaaacagaggatgattttaatgattggtgccagcaggtcaagaaactttctctcctggggggagccctcccgatgtttgagctcgtagaactgcagccttcccacctagcctgccctgacgtcctgaacctcagtctggattcatcagacgtcgagcgacttgaaagattttttgacagcgaagacgaggacttcgagatcctgagtctttag

SEQ ID NO: 175609 - DNA, 1182 bp, Artificial Sequence
  derived and/or modified sequence
atggacgcagccacgttaacatatgacacactgagattcgctgaattcgaagacttccctgagaccagcgaacctgtctggattctcgggcgaaaatattcaatcttcactgagaaggatgagatcctctctgacgttgcttccaggttatggttcacctaccggaagaatttccctgctatagggggtacgggcccaacctctgataccggatggggctgcatgctgcgctgtggtcagatgatttttgcacaggccctcgtctgtcgacatctaggtagagactggagatggacgcaaagaaagcggcaacccgattcatatttctccgtgctcaacgccttcattgatcgcaaggacagctactactcaattcaccaaatagctcaaatgggggtaggggaagggaaatcaattggtcagtggtatgggccaaacactgtggcccaagtcctcaaaaaattagccgtattcgacacgtggagctctctggctgttcacattgcgatggataatactgtggtgatggaggagatcagacgcttgtgcagaaccagcgtcccgtgtgcgggtgcaaccgccttccccgctgattcagacaggcactgtaatgggtttccggctggcgctgaggtcactaatcgtccatctccttggcgtcccctggttttgcttatcccactgaggctcgggcttactgacattaacgaggcctatgttgagacactgaagcactgttttatgatgccacagtccctgggggttatcggcggaaagccaaatagcgcccattattttatagggtatgtcggagaggagttaatctatctggacccacataccacccaaccagcggtcgaacccactgacggttgttttatcccggatgagagttttcactgccagcacccaccttgtcgaatgtcaattgcagagctggatccctcaatcgctgtggggtttttttgtaagaccgaggacgactttaacgactggtgccagcaagtgaagaagttatcgcttcttgggggagcactgcccatgtttgaactcgttgagttacagccatctcatttggcctgccccgatgtcctgaatctgtccctggacagttcagacgtggagcgccttgagcggttcttcgattcagaggatgaggacttcgagatcttgagtttatag

SEQ ID NO: 175610 - DNA, 1140 bp, Artificial Sequence
  derived and/or modified sequence
atgtggcaccttgatttcggcttgcataccgggaagacatttcagcctctcccctttattatcgtggtctacccgggagcgggtaggcgttgggggctggtgctttccctggcgagtcaccggaggcgaaccgaggccggagggggtacaggacctacaagtgacacaggctggggttgcatgctcaggtgtggtcagatgatctttgcccaggccctggtgtgccggcatctaggacgagattggaggtggacgcaaagaaagaggcaaccagattcctacttttccgtcttgaatgcctttattgataggaaggattcgtattattccatccaccagatcgcccagatgggagtaggagagggcaaaagcatcgggcagtggtacgggccaaacaccgtggcccaggtgctcaaaaagctagccgtgttcgatacatggagttccctcgcagtgcatatcgcgatggacaacacagtggtgatggaggaaatccgtcgcttgtgccgcacctctgtgccgtgtgccggtgccacagcctttcccgcagattcggatcggcactgtaacggctttcctgctggcgcagaggtgaccaatcgaccctctccctggcgccctttagtcttgttaatccctctaagactgggcttgactgacatcaacgaagcctacgttgaaacgcttaaacactgctttatgatgcctcagagtctgggagtcattgggggaaagcctaattctgctcactactttattggttatgtgggtgaggagttgatttacttggacccccatacaacccagcccgcagttgagcccactgacgggtgttttattccggatgagtcttttcattgtcaacacccaccttgtcggatgagcattgctgaactggaccctagcattgcagttgggtttttctgtaaaaccgaggatgacttcaacgattggtgccagcaagtgaagaaactctccctattgggaggggcattgcctatgtttgagctggttgagttgcagccatctcatctggcctgcccagatgtgttgaacctaagtctggactcttccgatgttgagcgtttagagcgcttcttcgatagcgaagatgaagacttcgagattctatccctgtag

SEQ ID NO: 175611 - DNA, 1654 bp, Artificial Sequence
  derived and/or modified sequence
agtcggcggccggactgggaagatggacgcagctactctgacctacgacactctccggtttgctgagtttgaagattttcctgagacctcagagcccgtttggatactgggtagaaaatacagcattttcacagaaaaggacgagatcttgtctgatgtggcatctagactttggtttacatacaggaaaaactttccagccattgccattcatcattgttgtataccctggagctggaaggagatggggactggttctcagccttgcctctcaccggcggagaactgaggccggaggggggacaggccccacctcggacacaggctggggctgcatgctgcggtgtggacagatgatctttgcccaagccctggtgtgccggcacctaggccgagattggaggtggacacaaaggaagaggcagccagacagctacttcagcgtcctcaacgcattcatcgacaggaaggacagttactactccattcaccagatagcgcaaatgggagttggcgaaggcaagtccataggccagtggtacgggcccaacactgtcgcccaggtcctgaagaagcttgctgtcttcgatacgtggagctccttggcggtccacattgcaatggacaacactgttgtgatggaggaaatcagaaggttgtgcaggaccagcgttccctgtgcaggcgccactgcgtttcctgcagattccgaccggcactgcaacggattccctgccggagctgaggtcaccaacaggccgtcgccatggagacccctggtacttctcattcccctgcgcctggggctcacggacatcaacgaggcctacgtggagacgctgaagcactgcttcatgatgccccagtccctgggcgtcatcggagggaagcccaacagcgcccactacttcatcggctacgttggtgaggagctcatctacctggacccccacaccacgcagccagccgtggagcccactgatggctgcttcatcccggacgagagcttccactgccagcacccgccgtgccgcatgagcatcgcggagcttgacccgtccatcgctgtggggtttttctgtaagactgaagatgacttcaatgattggtgccagcaagtcaaaaagctgtctctgcttggaggtgccctgcccatgtttgagctggtggagctgcagccttcacatctggcctgccccgacgtcctgaacctgtccctagattcttctgatgtagagcgactggaaagattcttcgactcagaagatgaagactttgaaatcctgtccctttgaaaatcctggggtcgggggtggcacctgtgagagcctggggctcctggtgccgctgcgtttcatccatcccgcccgctcgcctgccgagggctgcgccccgtgctgcctccccccagagggccacccgctgtgctcgtggactgaggctgcgctgcccgggaggccttactgcttggtgtcagactgcccagctcagagtgcccgtcagggcctgtgcatccgcacgcggagccgtctgttaggagcttccagagtgttctctcgacactgccagccccgtgttagcacctgggcctcagtcccacttgctcccaggcgccggttctgtggttggtttggaattaaagtcctgtttgaag

SEQ ID NO: 175612 - protein, 657 aa, Artificial Sequence
  derived and/or modified sequence
MGEEDYYLELCERPVQFEKANPVNCVFFDEANKQVFAVRSGGATGVVVKGPDDRNPISFRMDDKGEVKCIKFSLENKILAVQRTSKTVDFCNFIPDNSQLEYTQECKTKNANILGFCWTSSTEIVFITDQGIEFYQVLPEKRSLKLLKSHNLNVNWYMYCPESAVILLSTTVLENVLQPFHFRAGTMSKLPKFEIELPAAPKSTKPSLSERDIAMATIYGQLYVLFLRHHSRTSNSTGAEVVLYHLPREGACKKMHILKLNRTGKFALNVVDNLVVVHHQDTETSVIFDIKLRGEFDGSVTFHHPVLPARSIQPYQIPITGPAAVTSQSPVPCKLYSSSWIVFQPDIIISASQGYLWNLQVKLEPIVNLLPDKGRLMDFLLQRKECKMVILSVCSQMLSESDRASLPVIATVFDKLNHEYKKYLDAEQSYAMAVEAGQSRSSPLLKRPVRTQAVLDQSDVYTHVLSAFVEKKEMPHKFVIAVLMEYIRSLNQFQIAVQHYLHELVIKTLVQHNLFYMLHQFLQYHVLSDSKPLACLLLSLESFYPPAHQLSLDMLKRLSTANDEIVEVLLSKHQVLAALRFIRGIGGHDNISARKFLDAAKQTEDNMLFYTIFRFFEQRNQRLRGSPNFTPGEHCEEHVAFFKQIFGDQALMRPTTF

SEQ ID NO: 175613 - DNA, 2173 bp, Artificial Sequence
  derived and/or modified sequence
ccgcgccgggcccagagccgcagccgcagccgccgctacagtccgggccgggctccaccgcgcatcctgctccactctggcgaccgcccccggggcccccgccgcgggcgcggcgcccgccatgggcgaggaggactactatctggagctgtgcgagcggccggtgcagttcgagaaggcgaaccctgtcaactgcgtcttcttcgatgaggccaacaagcaggtttttgctgttcgatctggtggagctactggcgtggtagttaaaggcccagatgataggaatcccatctcatttagaatggatgacaaaggagaagtgaagtgcattaagttttccttagaaaataagatattggctgttcagaggacctcaaagactgtggatttttgtaattttatccctgataattcccagctggaatacacacaggagtgcaagactaagaatgccaacattctaggattctgctggactagttcaactgaaattgtcttcataacagatcaaggaatcgaattttaccaggtattaccagagaaacggagtctgaaactcttgaagagccacaatctcaatgtgaattggtacatgtactgccccgagagcgccgtgatcttgctgtctaccacggtcctggagaatgtcctgcagccttttcactttagggctggcactatgtcgaagctgcccaaatttgagattgaattaccagctgcgcctaagtcaactaaacccagcctttccgaaagagacatcgcaatggctaccatatacgggcagctgtatgttctcttcttgaggcatcattctcggacctccaacagcacaggagcggaggtggtcctctatcatctaccacgagaaggtgcctgtaaaaagatgcacatattgaagttaaataggacgggaaagtttgccctgaacgtggtggacaacctggtagtcgtgcatcatcaggatacagagacatcggtaatattcgatatcaagttacggggagagtttgacggctccgttaccttccaccaccccgtgcttcccgctcgatcgatccagccctatcagatccccatcacaggtcctgctgccgtgaccagccagtctcctgttccatgtaaactctattcttcatcttggattgtctttcaacctgacatcattatcagcgcaagccaaggttacctctggaacctccaagtgaaacttgagcccatagtaaatctcttaccagacaaaggaagactcatggactttctcctccagagaaaggaatgcaagatggtcatcctgtctgtctgttcacagatgttaagtgagtcagacagagcatcgctgcccgtgatagccactgtttttgataaactcaaccatgagtataaaaagtacctggatgccgagcagagttatgcgatggcggtggaagcagggcagagccgaagcagcccgctcctcaagaggccggtgcggacccaggcggtgctggaccagtcagatgtgtacacccatgtcctgtcagcctttgtggaaaagaaggagatgcctcataaatttgtgatagccgtgctgatggaatacattcgttctcttaaccagtttcagattgcagtacagcattacctacatgaacttgttatcaaaacccttgtccagcacaacctcttttatatgctgcatcagttcctgcagtaccacgtcctcagcgactccaaacctttggcttgtctgctgttatccctagagagtttctatcctcctgctcatcagctatctctggacatgctgaagcgactttcaacagcaaatgatgaaatagtagaagttctcctttccaaacaccaagtgttagctgccttaaggtttatccggggcattggtggccatgacaacatttctgcacgaaaatttttagatgctgcaaagcagactgaagacaacatgcttttctatacaatattccgcttttttgaacagcgaaaccagcgtttgcgagggagccccaatttcacaccaggggaacactgtgaagaacatgttgcttttttcaaacagatttttggagaccaagctctaatgaggcctacaacattctgaaatcacttgctgtttttttatataaaaatgtgtacaaagttaatttattgcattaataaagctctttaaactataaaa

SEQ ID NO: 175614 - DNA, 1944 bp, Artificial Sequence
  derived and/or modified sequence
gcagccgccgctacagtccgggccgggctccaccgcgcatcctgctccactctggcgaccgcccccggggcccccgccgcgggcgcggcgcccgccatgggcgaggaggactactatctggagctgtgcgagcggccggtgcagttcgagaaggcgaaccctgtcaactgcgtcttcttcgatgaggccaacaagcaggtttttgctgttcgatctggtggagctactggcgtggtagttaaaggcccagatgataggaatcccatctcatttaggtattaccagagaaacggagtctgaaactcttgaagagccacaatctcaatgtgaattggtacatgtactgccccgagagcgccgtgatcttgctgtctaccacggtcctggagaatgtcctgcagccttttcactttagggctggcactatgtcgaagctgcccaaatttgagattgaattaccagctgcgcctaagtcaactaaacccagcctttccgaaagagacatcgcaatggctaccatatacgggcagctgtatgttctcttcttgaggcatcattctcggacctccaacagcacaggagcggaggtggtcctctatcatctaccacgagaaggtgcctgtaaaaagatgcacatattgaagttaaataggacgggaaagtttgccctgaacgtggtggacaacctggtagtcgtgcatcatcaggatacagagacatcggtaatattcgatatcaagttacggggagagtttgacggctccgttaccttccaccaccccgtgcttcccgctcgatcgatccagccctatcagatccccatcacaggtcctgctgccgtgaccagccagtctcctgttccatgtaaactctattcttcatcttggattgtctttcaacctgacatcattatcagcgcaagccaaggttacctctggaacctccaagtgaaacttgagcccatagtaaatctcttaccagacaaaggaagactcatggactttctcctccagagaaaggaatgcaagatggtcatcctgtctgtctgttcacagatgttaagtgagtcagacagagcatcgctgcccgtgatagccactgtttttgataaactcaaccatgagtataaaaagtacctggatgccgagcagagttatgcgatggcggtggaagcagggcagagccgaagcagcccgctcctcaagaggccggtgcggacccaggcggtgctggaccagtcagatgtgtacacccatgtcctgtcagcctttgtggaaaagaaggagatgcctcataaatttgtgatagccgtgctgatggaatacattcgttctcttaaccagtttcagattgcagtacagcattacctacatgaacttgttatcaaaacccttgtccagcacaacctcttttatatgctgcatcagttcctgcagtaccacgtcctcagcgactccaaacctttggcttgtctgctgttatccctagagagtttctatcctcctgctcatcagctatctctggacatgctgaagcgactttcaacagcaaatgatgaaatagtagaagttctcctttccaaacaccaagtgttagctgccttaaggtttatccggggcattggtggccatgacaacatttctgcacgaaaatttttagatgctgcaaagcagactgaagacaacatgcttttctatacaatattccgcttttttgaacagcgaaaccagcgtttgcgagggagccccaatttcacaccaggggaacactgtgaagaacatgttgcttttttcaaacagatttttggagaccaagctctaatgaggcctacaacattctgaaatcacttgctgtttttttatataaaaatgtgtacaaagttaatttattgcattaataaagctctttaaactataaaatgttataaagtgtatctacaacctc

SEQ ID NO: 175615 - DNA, 1945 bp, Artificial Sequence
  derived and/or modified sequence
agccgcagccgcagccgccgctacagtccgggccgggctccaccgcgcatcctgctccactctggcgaccgcccccggggcccccgccgcgggcgcggcgcccgccatgggcgaggaggactactatctggagctgtgcgagcggccggtgcagttcgagaaggcgaaccctgtcaactgcgtcttcttcgatgaggccaacaagcaggtttttgctgttcgatctggtggagctactggcgtggtagttaaaggcccagatgataggaatcccatctcatttaggatttttgtaattttatccctgataattcccagctggaatacacacaggagtgcaagactaagaatgccaacattctaggattctgctggactagttcaactgaaattgtcttcataacagatcaaggaatcgaattttaccaggtattaccagagaaacggagtctgaaactcttgaagagccacaatctcaatgtgaattggtacatgtactgccccgagagcgccgtgatcttgctgtctaccacggtcctggagaatgtcctgcagccttttcactttagggctggcactatgtcgaagctgcccaaatttgagattgaattaccagctgcgcctaagtcaactaaacccagcctttccgaaagagacatcgcaatggctaccatatacgggcagctgtatgttctcttcttgaggcatcattctcggacctccaacagcacaggagcggaggtggtcctctatcatctaccacgagaaggtgcctgtaaaaagatgcacatattgaagttaaataggacgggaaagtttgccctgaacgtggtggacaacctggtagtcgtgcatcatcaggatacagagacatcggtaatattcgatatcaagttacggggagagtttgacggctccgttaccttccaccaccccgtgcttcccgctcgatcgatccagccctatcagatccccatcacaggtcctgctgccgtgaccagccagtctcctgttccatgtaaactctattcttcatcttggattgtctttcaacctgacatcattatcagcgcaagccaaggttacctctggaacctccaagtgaaacttgagcccatagtaaatctcttaccagacaaaggaagactcatggactttctcctccagagaaaggaatgcaagatggtcatcctgtctgtctgttcacagatgttaagtgagtcagacagagcatcgctgcccgtgatagccactgtttttgataaactcaaccatgagtataaaaagtacctggatgccgagcagagttatgcgatggcggtggaagcagggcagagccgaagcagcccgctcctcaagaggccggtgcggacccaggcggtgctggaccagtcagatgtgtacacccatgtcctgtcagcctttgtggaaaagaaggagatgcctcataaatttgtgatagccgtgctgatggaatacattcgttctcttaaccagtttcagattgcagtacagcattacctacatgaacttgttatcaaaacccttgtccagcacaacctcttttatatgctgcatcagttcctgcagtaccacgtcctcagcgactccaaacctttggcttgtctgctgttatccctagagagtttctatcctcctgctcatcagctatctctggacatgctgaagatgctgcaaagcagactgaagacaacatgcttttctatacaatattccgcttttttgaacagcgaaaccagcgtttgcgagggagccccaatttcacaccaggggaacactgtgaagaacatgttgcttttttcaaacagatttttggagaccaagctctaatgaggcctacaacattctgaaatcacttgctgtttttttatataaaaatgtgtacaaagttaatttattgcattaataaagctctttaaactat

SEQ ID NO: 175616 - DNA, 1974 bp, Artificial Sequence
  derived and/or modified sequence
atgggcgaggaggactactacctggagctgtgcgagagacccgtgcagttcgagaaggccaaccccgtgaactgcgtgttcttcgacgaggccaacaagcaggtgttcgccgtgagaagcggcggcgccaccggcgtggtggtgaagggccccgacgacagaaaccccatcagcttcagaatggacgacaagggcgaggtgaagtgcatcaagttcagcctggagaacaagatcctggccgtgcagagaaccagcaagaccgtggacttctgcaacttcatccccgacaacagccagctggagtacacccaggagtgcaagaccaagaacgccaacatcctgggcttctgctggaccagcagcaccgagatcgtgttcatcaccgaccagggcatcgagttctaccaggtgctgcccgagaagagaagcctgaagctgctgaagagccacaacctgaacgtgaactggtacatgtactgccccgagagcgccgtgatcctgctgagcaccaccgtgctggagaacgtgctgcagcccttccacttcagagccggcaccatgagcaagctgcccaagttcgagatcgagctgcccgccgcccccaagagcaccaagcccagcctgagcgagagagacatcgccatggccaccatctacggccagctgtacgtgctgttcctgagacaccacagcagaaccagcaacagcaccggcgccgaggtggtgctgtaccacctgcccagagagggcgcctgcaagaagatgcacatcctgaagctgaacagaaccggcaagttcgccctgaacgtggtggacaacctggtggtggtgcaccaccaggacaccgagaccagcgtgatcttcgacatcaagctgagaggcgagttcgacggcagcgtgaccttccaccaccccgtgctgcccgccagaagcatccagccctaccagatccccatcaccggccccgccgccgtgaccagccagagccccgtgccctgcaagctgtacagcagcagctggatcgtgttccagcccgacatcatcatcagcgccagccagggctacctgtggaacctgcaggtgaagctggagcccatcgtgaacctgctgcccgacaagggcagactgatggacttcctgctgcagagaaaggagtgcaagatggtgatcctgagcgtgtgcagccagatgctgagcgagagcgacagagccagcctgcccgtgatcgccaccgtgttcgacaagctgaaccacgagtacaagaagtacctggacgccgagcagagctacgccatggccgtggaggccggccagagcagaagcagccccctgctgaagagacccgtgagaacccaggccgtgctggaccagagcgacgtgtacacccacgtgctgagcgccttcgtggagaagaaggagatgccccacaagttcgtgatcgccgtgctgatggagtacatcagaagcctgaaccagttccagatcgccgtgcagcactacctgcacgagctggtgatcaagaccctggtgcagcacaacctgttctacatgctgcaccagttcctgcagtaccacgtgctgagcgacagcaagcccctggcctgcctgctgctgagcctggagagcttctacccccccgcccaccagctgagcctggacatgctgaagagactgagcaccgccaacgacgagatcgtggaggtgctgctgagcaagcaccaggtgctggccgccctgagattcatcagaggcatcggcggccacgacaacatcagcgccagaaagttcctggacgccgccaagcagaccgaggacaacatgctgttctacaccatcttcagattcttcgagcagagaaaccagagactgagaggcagccccaacttcacccccggcgagcactgcgaggagcacgtggccttcttcaagcagatcttcggcgaccaggccctgatgagacccaccaccttctag

SEQ ID NO: 175617 - DNA, 1503 bp, Artificial Sequence
  derived and/or modified sequence
atgtactgccccgagagcgccgtgatcctgctgagcaccaccgtgctggagaacgtgctgcagcccttccacttcagagccggcaccatgagcaagctgcccaagttcgagatcgagctgcccgccgcccccaagagcaccaagcccagcctgagcgagagagacatcgccatggccaccatctacggccagctgtacgtgctgttcctgagacaccacagcagaaccagcaacagcaccggcgccgaggtggtgctgtaccacctgcccagagagggcgcctgcaagaagatgcacatcctgaagctgaacagaaccggcaagttcgccctgaacgtggtggacaacctggtggtggtgcaccaccaggacaccgagaccagcgtgatcttcgacatcaagctgagaggcgagttcgacggcagcgtgaccttccaccaccccgtgctgcccgccagaagcatccagccctaccagatccccatcaccggccccgccgccgtgaccagccagagccccgtgccctgcaagctgtacagcagcagctggatcgtgttccagcccgacatcatcatcagcgccagccagggctacctgtggaacctgcaggtgaagctggagcccatcgtgaacctgctgcccgacaagggcagactgatggacttcctgctgcagagaaaggagtgcaagatggtgatcctgagcgtgtgcagccagatgctgagcgagagcgacagagccagcctgcccgtgatcgccaccgtgttcgacaagctgaaccacgagtacaagaagtacctggacgccgagcagagctacgccatggccgtggaggccggccagagcagaagcagccccctgctgaagagacccgtgagaacccaggccgtgctggaccagagcgacgtgtacacccacgtgctgagcgccttcgtggagaagaaggagatgccccacaagttcgtgatcgccgtgctgatggagtacatcagaagcctgaaccagttccagatcgccgtgcagcactacctgcacgagctggtgatcaagaccctggtgcagcacaacctgttctacatgctgcaccagttcctgcagtaccacgtgctgagcgacagcaagcccctggcctgcctgctgctgagcctggagagcttctacccccccgcccaccagctgagcctggacatgctgaagagactgagcaccgccaacgacgagatcgtggaggtgctgctgagcaagcaccaggtgctggccgccctgagattcatcagaggcatcggcggccacgacaacatcagcgccagaaagttcctggacgccgccaagcagaccgaggacaacatgctgttctacaccatcttcagattcttcgagcagagaaaccagagactgagaggcagccccaacttcacccccggcgagcactgcgaggagcacgtggccttcttcaagcagatcttcggcgaccaggccctgatgagacccaccaccttctag

SEQ ID NO: 175618 - DNA, 1974 bp, Artificial Sequence
  derived and/or modified sequence
atgggcgaagaggactattacctggagttatgtgagcggcctgtgcagtttgagaaggccaatcctgtaaattgtgtattttttgacgaggccaacaagcaggtgtttgctgtgagatccggaggcgccactggagtggtcgtcaagggaccggacgacagaaacccaatcagcttccgcatggatgacaagggagaggtcaaatgcatcaaatttagtcttgaaaataagatactcgccgtacagcggacaagtaaaacggtggatttttgtaacttcattcctgataatagtcagcttgagtacacacaggagtgtaagacgaaaaacgccaatattctcggattctgctggacttcctcaacggaaatagtgttcatcaccgatcagggtatcgagttctaccaggtcctgccagagaaaagatcccttaagcttcttaaatctcacaatctcaacgtaaactggtacatgtactgccccgaaagcgctgtgatcctcctgagcactacagtgctcgagaatgtactgcagccattccattttagggcaggcacaatgtcaaaattgcctaagtttgagattgaactccccgccgctcccaagagtacaaaaccatctctaagcgaaagggacattgccatggcaacaatatacgggcaactgtatgtgctattccttcgccatcactccaggacgagcaactcaactggggctgaagtggtactgtaccacctgccaagagagggggcctgcaagaagatgcatattctcaagcttaataggactggcaaattcgcactgaacgttgtcgataatcttgtcgtggtgcatcaccaggacaccgaaacatccgtcatattcgacattaaactccggggagagttcgatggcagtgttacattccaccatccagtgctgccagcgcggagcatacagccatatcaaatccccattactggccccgcagcagtgacttcccaatctccagtcccctgtaagctgtacagttctagctggattgtctttcagcccgatataattatcagtgcatctcaagggtacctgtggaacctgcaagtgaagctggaacctatcgttaacctgttgccagataaaggccgactgatggatttcctcctgcaaagaaaggagtgtaagatggtgatcctttccgtgtgcagtcagatgctgtcagagtctgaccgtgcaagcttacccgtgatcgccacagtatttgataagctcaatcacgaatacaaaaagtacctcgacgcagaacagtcttacgctatggcggtggaggctgggcagagccgatccagccccctcctcaaaagacctgtgaggacgcaggcagtgctcgaccaatcggatgtctacacgcatgtgctgtccgcatttgtggaaaagaaggagatgcctcataagtttgtcattgctgtgctgatggagtatatccggtctctgaaccaatttcagatagctgtacagcattatctgcacgagcttgtaataaagactctcgtacagcataacctgttttacatgctacaccagttcctccagtatcacgtgctgtcggactccaagcccttagcctgcctgctcctgtccctggaatcattttacccgcctgcacatcagttatccctcgacatgttgaagaggttaagtactgccaacgacgagattgtcgaggttctgctgtctaagcaccaagtactggccgctctacgattcatccgtgggattggtggacatgataatattagtgctcgaaaattcctggacgctgctaagcaaactgaagacaacatgctcttctatactatattcaggtttttcgaacaacggaaccagcggttgagaggttcgcccaatttcacacccggcgaacactgcgaggaacatgtcgcattcttcaaacagatttttggggatcaggccctgatgcgtcctactactttttag

SEQ ID NO: 175619 - DNA, 1503 bp, Artificial Sequence
  derived and/or modified sequence
atgtattgcccggagtctgccgtaattctgctctccactaccgtattggagaacgtcttgcagccttttcatttcagagccggcaccatgagtaagcttcctaaattcgaaattgaactgcccgccgcgcctaagtcaacaaagcccagcctgagcgaacgggatatcgcaatggccacaatctatggacagttatatgtacttttccttaggcaccacagccgaacaagtaatagcaccggagcggaagttgttctgtaccacctcccaagagagggcgcctgcaagaagatgcatatactgaagcttaaccgaacaggtaagttcgcgctcaatgtggtggataacctggttgtggtacaccaccaggacaccgaaacttcagtaatcttcgacattaagttgcgtggggaattcgacgggtccgtgaccttccatcaccccgtgttgccggcaaggagcatccagccttatcaaatccctattaccgggccagctgctgtgacaagccaaagcccagtgccttgcaagctttatagcagttcttggatcgtattccaaccagatatcattattagtgcctcccagggatatctgtggaacctgcaagtgaagctggagccgatcgtaaacctccttccggacaaaggaagactcatggattttctcctgcagaggaaggagtgcaaaatggtcatactgtccgtctgctcacagatgctgagtgagagcgatcgggcctccctgcccgtcatagcaaccgtgttcgacaagcttaatcacgagtacaagaagtacctggatgccgaacagtcctacgcaatggcggtggaggctggccagtctaggagttcacctctgttgaaacggcccgtgagaactcaagctgtcctggatcagagtgacgtgtacacccatgtgttgagcgccttcgtcgaaaagaaggagatgcctcataagtttgtgatcgcagtgctaatggagtacatcagaagcctaaaccaattccaaatcgccgtgcaacactacctgcatgagctcgtaattaagactctagtccagcataatctgttctacatgctgcatcagtttctgcagtaccatgtcctctccgattccaaaccactggcatgcctattactgtctctcgaaagcttctaccctcctgcccaccaactctcgctggatatgctcaaacgcctaagcaccgccaacgacgaaatagtggaggttcttttgagcaagcatcaagtcctcgcagcacttagatttatccgaggtattggtgggcacgataatattagcgcacgtaagtttctggatgcggcgaaacaaaccgaggacaacatgctgttctatacgatattccgttttttcgagcaacggaatcagagacttcgtgggtctccgaactttactccaggcgaacactgtgaggaacatgtggcatttttcaagcagatttttggagaccaggcactgatgcgtccgaccactttctag

SEQ ID NO: 175620 - DNA, 1974 bp, Artificial Sequence
  derived and/or modified sequence
atgggagaggaggactactacctggagctgtgtgagaggcctgtgcagtttgagaaggccaaccctgtgaactgtgtgttctttgatgaggccaacaagcaggtgtttgctgtgcgcagcggcggggccaccggggtggtggtgaagggcccagatgacaggaaccccatctccttcaggatggatgacaagggggaggtgaagtgcatcaagttcagcctggagaacaagatcctggccgtgcagaggaccagcaagacagtggacttctgcaacttcatcccagacaacagccagctggagtacacccaggagtgcaagaccaagaatgccaacatcctgggcttctgctggaccagcagcacagagatcgtgttcatcacagaccagggcatcgagttctaccaggtgctgcctgagaagaggagcctgaagctgctgaagagccacaacctgaatgtgaactggtacatgtactgcccagagagcgctgtgatcctgctgagcaccaccgtgctggagaatgtgctgcagcccttccacttccgggccggcaccatgagcaagctgcccaagtttgaaattgagctgcctgctgcccccaagagcaccaagcccagcctgtctgagcgggacatcgccatggccaccatctacggccagctgtatgtgctcttcctgcggcaccacagcaggaccagcaacagcactggagctgaggtggtgctgtaccacctgccccgggagggcgcctgcaagaagatgcacatcctgaagctgaacagaacaggcaagtttgccctgaatgtggtggacaacctggtggtggtgcaccaccaggacacagagaccagcgtcatctttgacatcaagctgcggggggagtttgatggctctgtgaccttccaccaccctgtgctgcctgcccggagcatccagccctaccagatccccatcaccggccctgctgctgtgaccagccagagccctgtgccctgcaagctgtacagcagctcctggatcgtgttccagcctgacatcatcatcagcgccagccagggctacctgtggaacctgcaggtgaagctggagcccatcgtgaacctgctgcctgacaagggccgcctgatggacttcctgctgcagaggaaagaatgcaagatggtgatcctgtctgtgtgcagccagatgctgtctgagagtgaccgggccagcctgcctgtgattgccaccgtgtttgacaagctgaaccacgagtacaagaagtacctggatgctgagcagagctatgccatggctgtggaggccggccagagccgcagcagccccctgctgaagaggcctgtgaggacccaggccgtgctggaccagagtgatgtgtacacccacgtgctgagcgcctttgtggagaagaaggagatgccccacaagtttgtgattgctgtgctgatggagtacatccgcagcctgaaccagttccagattgctgtgcagcactacctgcacgagctggtgatcaagaccctggtgcagcacaacctcttctacatgctgcaccagttcctgcagtaccacgtgctgagtgacagcaagcccctggcctgcctgctgctgagcctggagagcttctaccccccagcccaccagctgagcctggacatgctgaagaggctgagcacagccaatgatgaaattgtggaggtgctgctgagcaagcaccaggtgctggccgccctgcgcttcatccggggcattggaggccatgacaacatcagcgccaggaagttcctggatgctgccaagcagacagaggacaacatgctgttctacaccatcttccgcttctttgagcagaggaaccagaggctgcggggcagccccaacttcaccccaggagagcactgtgaggagcacgtggccttcttcaagcagatctttggagaccaggccctgatgaggcccaccaccttctag

SEQ ID NO: 175621 - DNA, 1503 bp, Artificial Sequence
  derived and/or modified sequence
atgtactgcccagagagcgctgtgatcctgctgagcaccaccgtgctggagaatgtgctgcagcccttccacttccgggccggcaccatgagcaagctgcccaagtttgaaattgagctgcctgctgcccccaagagcaccaagcccagcctgtctgagcgggacatcgccatggccaccatctacggccagctgtatgtgctcttcctgcggcaccacagcaggaccagcaacagcactggagctgaggtggtgctgtaccacctgccccgggagggcgcctgcaagaagatgcacatcctgaagctgaacagaacaggcaagtttgccctgaatgtggtggacaacctggtggtggtgcaccaccaggacacagagaccagcgtcatctttgacatcaagctgcggggggagtttgatggctctgtgaccttccaccaccctgtgctgcctgcccggagcatccagccctaccagatccccatcactggacctgctgctgtgaccagccagagccctgtgccctgcaagctgtacagcagctcctggatcgtgttccagcctgacatcatcatcagcgccagccagggctacctgtggaacctgcaggtgaagctggagcccatcgtgaacctgctgcctgacaagggccgcctgatggacttcctgctgcagaggaaggagtgcaagatggtgatcctgtctgtgtgcagccagatgctgtctgagagtgaccgggccagcctgcccgtcatcgccaccgtgtttgacaagctgaaccacgagtacaagaagtacctggatgctgagcagagctatgccatggctgtggaggccggccagagccgcagcagccccctgctgaagaggcctgtgaggacccaggccgtgctggaccagagtgatgtgtacacccacgtgctgagcgcctttgtggagaagaaggagatgccccacaagtttgtgattgctgtgctgatggagtacatccgcagcctgaaccagttccagattgctgtgcagcactacctgcacgagctggtgatcaagaccctggtgcagcacaacctcttctacatgctgcaccagttcctgcagtaccacgtgctgagtgacagcaagcccctggcctgcctgctgctgagcctggagagcttctaccccccagcccaccagctgagcctggacatgctgaagaggctgagcacagccaatgatgagatcgtggaggtgctgctgagcaagcaccaggtgctggccgccctgcgcttcatccggggcatcggcggccatgacaacatcagcgccaggaagttcctggatgctgccaagcagacagaggacaacatgctgttctacaccatcttccgcttctttgagcagaggaaccagaggctgcggggcagccccaacttcaccccaggagagcactgtgaggagcacgtggccttcttcaagcagatctttggagaccaggccctgatgaggcccaccaccttctag

SEQ ID NO: 175622 - DNA, 1974 bp, Artificial Sequence
  derived and/or modified sequence
atgggcgaggaggactactacctggagctgtgcgagcggcccgtgcagttcgagaaggcaaaccccgtcaattgcgtcttctttgatgaggctaacaagcaagtattcgcagtacggagcggcggcgcaacaggtgtagtcgtgaaggggccagatgaccggaatcccataagcttcaggatggacgacaagggtgaggtgaagtgcataaaattttcactggaaaacaagatccttgctgtccagaggacatccaagacagtggacttctgcaatttcatacccgataatagccaattggagtatacccaagaatgtaaaacaaaaaatgctaatatcttaggattctgctggactagctctactgagattgtttttattactgaccagggtattgagttctaccaggtgctgccagaaaaacgatctttaaaactcctgaagtcacataaccttaatgtgaattggtacatgtactgtccagaatccgcagtgatcctcctgtcaacaactgtgttggaaaacgttctgcagccattccatttcagggcaggcactatgtccaagcttccaaagttcgagatcgagctacctgctgctccaaagagtacaaaacctagcctctccgaaagagacattgctatggccacgatctacgggcagctgtatgttctcttcttgagacatcatagtcggacctcgaatagcactggggcagaggttgtgctgtaccacctgcccagggaaggcgcctgcaagaaaatgcacatcttaaagctcaaccggacgggcaaattcgcccttaacgtagtcgacaatctagttgtggtgcatcaccaggacacggagacatcagtcatttttgatattaagctccgtggcgaattcgatggctctgtgacatttcaccatcctgtgctgcccgctcgctcaatccagccctaccagatacccattacaggccctgccgccgtaactagtcagtctccagtcccttgcaaactgtattcaagctcatggatagtgtttcagcctgatataatcatttccgcaagccaggggtatctatggaaccttcaagttaaactcgaacccatcgtgaatctccttcccgataaggggcgcctgatggactttcttttgcagagaaaggaatgcaagatggtgatattgtcggtttgctctcaaatgttgagcgaatcagaccgggccagcctccccgtcatcgctactgtgtttgacaaactcaatcacgagtacaaaaagtacctggacgccgaacaatcgtatgccatggccgtggaggccggccagagcaggagcagtccgttattgaagcgacccgtgcgaacgcaggccgtcctggaccaatccgacgtgtacacacacgtgctaagcgcgttcgtggagaagaaggagatgccccacaaatttgtgattgcggtgctgatggagtatattagaagcctaaatcaatttcagatcgcggtgcagcactatttgcacgagctggttatcaaaacgctcgtacagcataacttgttctatatgctccatcagttcctgcaataccacgttctcagtgatagcaagcccctggcttgcctcctgctctcactagagtcattttacccccccgctcaccaattatcattggacatgctcaaacgcctgtccactgctaacgacgagatagtagaggttcttctgtccaagcatcaggtcttggctgctctgaggtttatccgcggtattggcggacacgataacatctcagcaaggaaattccttgatgctgccaaacagacggaggataacatgctgttctatacaatatttcgattctttgagcagaggaatcaacgcctccgaggcagtccaaattttacaccaggggaacattgtgaagagcacgtggcatttttcaagcagattttcggcgaccaggcactgatgcgcccgaccacattttag

SEQ ID NO: 175623 - DNA, 1503 bp, Artificial Sequence
  derived and/or modified sequence
atgtactgccccgagagcgccgtgatcctgctgagcaccaccgtgttggagaatgtgctacagccttttcatttccgagccggtaccatgtcgaaattgccaaaattcgaaattgaactcccggccgctcccaagtcaacgaaaccctcactgagcgagagagacatagcaatggcgacaatatacggccaactgtacgtgctgtttcttagacatcacagtcgtactagcaacagtacaggggcagaagtggtcctataccacctccccagagagggcgcatgcaagaagatgcacatcctcaaattgaatcgcaccggcaaatttgcactcaacgtggtagacaatcttgtggttgtgcaccatcaggatacagagacgtccgtgattttcgacatcaagttaaggggtgagtttgacggctcagtaacattccatcacccagtcctgccagcccgcagtattcagccttaccaaattcccatcacaggcccggctgccgtcacctctcagtcgccagtgccttgtaagctgtattctagctcatggattgtgttccagcccgacatcattatatccgcttctcaaggctatctgtggaatcttcaggtgaaactggagcccatcgttaacctcctcccagacaaagggaggctaatggactttttgttgcagaggaaggagtgcaagatggttattctgtcagtgtgctcacaaatgctttcagagagcgacagagcttctttgcctgttatagctactgtgtttgacaagctaaaccacgaatataagaaatacttagacgctgaacaatcctatgccatggccgttgaagcaggacagtccaggtcctcgcccctactcaaaaggccagtgcggactcaagcggtcctcgatcaatctgatgtctacactcacgttctctctgcctttgtagagaagaaagagatgcctcacaaatttgtgattgctgtcttgatggaatatatccgatcactcaaccagtttcagatcgctgtgcagcattatctgcatgaactcgttataaaaacacttgttcagcacaacttgttctacatgctgcaccagtttctccagtatcacgtgctgagtgactctaagcctctcgcatgtctactgctatctctagaatctttctacccacccgcccaccaactgtctctcgatatgctgaaaaggctaagtaccgccaacgatgagatagtggaggtcttgttgtctaaacatcaggtcttggcagcccttcggtttatccgggggattggaggtcacgacaatataagcgcccgcaagttccttgatgcagccaagcaaaccgaagacaatatgctcttctacaccattttcaggttcttcgagcagaggaaccagcgcttgcggggctcccctaattttacacctggagagcactgtgaggaacacgtcgccttctttaagcagatctttggcgaccaagcactgatgagaccaacaacattttag

SEQ ID NO: 175624 - DNA, 1974 bp, Artificial Sequence
  derived and/or modified sequence
atgggggaagaagactattacctggagctgtgtgaacggccagttcagttcgagaaggcgaaccctgttaactgcgtgttctttgacgaggctaataagcaagtgttcgctgtcagaagtggtggggctacaggcgtggtggtcaagggacctgacgataggaatccaatttctttccgaatggacgacaaaggggaagtcaaatgtattaaattttccctcgagaataagattctggcggtgcagcgcacctccaagaccgtggatttctgcaactttattcccgacaacagccagctggagtacacacaggaatgtaaaaccaagaacgcaaacatccttgggttttgctggacctcatctactgaaatcgtctttatcacagatcagggcattgaattttatcaggtgctgccagagaaaagatccctgaaactgctcaaatcacacaatctgaacgtcaactggtacatgtattgtcctgagagtgcagtgatcctcttgtcaaccaccgtactcgagaacgtgctccagccatttcatttccgggcagggaccatgtccaagctgcccaaatttgaaatcgagttacccgctgcccctaagagcactaagccctccctgtccgagagagatattgcaatggcaaccatctatggccagttgtacgtccttttcctccgccaccacagtcggaccagtaacagtaccggagctgaggtggtactgtatcacctcccaagggagggcgcttgtaaaaaaatgcacatactcaagctcaacagaaccggtaagtttgccctaaacgtggtggataatctagtggtcgtgcatcatcaggatacggagacttccgttatctttgacatcaagttgaggggagaatttgatggtagcgtgaccttccaccaccccgtacttccagctcgctctatccagccataccagatccctattaccgggcctgcagcagtcacctcccagagccctgtgccttgcaaactttattctagtagctggatcgtattccagcctgacattataatcagtgcctcccagggctatctctggaacctgcaggtcaaattggaaccaattgttaacctgcttccagacaagggacggctgatggatttccttctgcaaaggaaggaatgcaagatggtaatcctctctgtctgttcccagatgttgtccgagagcgatcgagcctctttaccagtaattgccaccgtgttcgataaattaaatcacgaatataagaaataccttgacgccgaacagtcatatgctatggctgtggaggctggtcagtcacggagctctccgctgctcaaacgtcccgttcggactcaggctgttctggaccagtctgatgtctatacgcacgtcctgtcagctttcgtggagaaaaaggagatgccccacaagtttgttattgcggtgcttatggagtacatccgctccctcaaccaattccagatcgccgtgcaacattacttacatgagctcgtgatcaaaacattggttcagcacaacctcttttacatgctccatcagttcctacagtatcacgtgctctccgactcaaagcctctcgcctgtctcttactctccctcgagtccttttaccctccggcacatcagctgagcttggacatgctgaagagactgtccactgcgaatgacgagatcgtagaggtattactctccaagcaccaggtgctggctgccctgcggtttatccggggaatcggtggccacgacaatattagcgcaagaaaattcctcgatgccgctaagcaaaccgaggacaacatgctgttttacaccatatttaggttcttcgaacaacgaaaccagagattaaggggctcgccgaacttcaccccgggagaacattgtgaagagcacgtggccttcttcaaacagattttcggagaccaagcgcttatgaggcctacaacattttag

SEQ ID NO: 175625 - DNA, 1503 bp, Artificial Sequence
  derived and/or modified sequence
atgtactgtcccgaatccgcagtaatattactgtccaccacagtgttggagaatgtcctgcagccttttcacttccgcgcaggaaccatgagcaaacttcccaaatttgagattgaactcccagccgctcctaagtctaccaaacccagcctctccgaacgcgacatcgcaatggccaccatctacggacaactttacgtcctgttcctgcgccaccattcaagaacgagtaactcaaccggggctgaagtagttctgtatcatctgcccagagaaggggcttgtaagaagatgcacatcctgaaactgaatcgtacaggtaagtttgccctgaacgtcgtggataatttggtggtggttcatcatcaggataccgagaccagcgtgatttttgatatcaaacttcggggagaatttgatgggagcgttacgtttcaccacccagtactgcctgccagatctattcagccctaccagatcccgattacaggacccgctgcagtgacatcacaaagtcccgtaccctgcaaactttactcaagctcctggattgtctttcagcctgacattatcattagtgccagccaggggtacctgtggaacctgcaggtgaagctggagccgatagtgaatctgctgcctgacaaggggagacttatggatttcttattacagcgcaaggagtgcaaaatggttattttatctgtctgcagtcagatgttgtccgagagcgacagggcatccctgcccgtgatagccactgtcttcgacaagctgaaccacgaatacaaaaagtacctggatgccgagcagagctacgcaatggctgtagaagccggacagtcacgctcttctcccctgttaaagcgcccagtgcggacgcaagccgtacttgaccagagcgacgtctatacccatgtgctatccgcattcgtcgagaagaaggagatgccacacaagttcgtcattgccgtgcttatggagtacatccgatccttgaaccaatttcagatcgccgtacagcactacttgcatgagctggtcatcaagaccctggtccaacataaccttttttatatgctccaccagtttctgcagtatcatgtactgtcagacagcaaaccattggcttgtttgctcctgtcactcgaatccttttatccgcctgcacaccaactgagcctggacatgctgaaaagactaagcacagctaacgatgagattgtggaagttcttctctccaagcatcaggttttggctgccctacgatttattagaggtattggtggccacgacaacatttccgctcgaaagttcctggacgccgctaagcaaactgaagacaacatgctgttttataccatttttcgattcttcgaacagcgcaaccagagactgagggggtcacccaactttaccccaggggaacactgcgaagagcacgtcgcgtttttcaagcagatcttcggggatcaggccctcatgaggccgaccaccttttag

SEQ ID NO: 175626 - protein, 364 aa, Artificial Sequence
  derived and/or modified sequence
MSSAPRSPTPRPRRMKKDESFLGKLGGTLARKRRAREVSDLQEEGKNAINSPMSPALVDVHPEDTQLEENEERTMIDPTSKEDPKFKELVKVLLDWINDVLVEERIIVKQLEEDLYDGQVLQKLLEKLAGCKLNVAEVTQSEIGQKQKLQTVLEAVHDLLRPRGWALRWSVDSIHGKNLVAILHLLVSLAMHFRAPIRLPEHVTVQVVVVRKREGLLHSSHISEELTTTTEMMMGRFERDAFDTLFDHAPDKLSVVKKSLITFVNKHLNKLNLEVTELETQFADGVYLVLLMGLLEDYFVPLHHFYLTPESFDQKVHNVSFAFELMLDGGLKKPKARPEDVVNLDLKSTLRVLYNLFTKYKNVE

SEQ ID NO: 175627 - DNA, 1095 bp, Artificial Sequence
  derived and/or modified sequence
atgagttctgcgcccagatcacccactccacggcccaggaggatgaagaaggacgaaagctttctcggcaagctaggcggcaccttggctcgcaaacggagagcccgagaagtctccgatctgcaggaagaggggaaaaatgctatcaatagccccatgtctccggcccttgtcgatgtgcaccccgaggacactcagctggaggagaatgaagagaggacaatgattgacccaacttcaaaggaagaccccaagttcaaggaactggtgaaggtgttgcttgactggatcaatgatgtcctggttgaggaacggattattgtcaagcaactagaggaagatctttatgacgggcaagtactgcagaaactcttggaaaagcttgccgggtgtaagcttaacgttgctgaggttacccagtcagaaataggacagaagcaaaagctgcaaacagttttggaagctgtccacgatttgctgcgccccagaggatgggctttacggtggtctgttgatagcattcacggcaagaatctcgtggcaatactgcacctcctcgtgagcctggcgatgcacttccgggcaccaatcagactcccggaacatgtcaccgtgcaggtcgtggtggtccgaaagcgagagggtttgctgcacagcagccatattagcgaagaacttacaaccaccacggagatgatgatggggcgatttgaaagagacgcatttgacacattatttgatcatgccccggataaactgtccgtggtcaagaagagtctcattacattcgtgaacaagcatctgaataaattgaatctggaagtaactgaactggagacccagttcgctgatggcgtgtacctggtgctgctcatgggccttttggaggactactttgtgcccctgcatcatttctacctcacaccagaatcttttgaccagaaagttcacaacgtttcgttcgccttcgagcttatgcttgatggtggcctgaagaaacccaaggctcggccggaggacgtggtgaatcttgacctgaagtccacactcagggtcctgtataatctgttcacgaagtacaagaatgtagagtag

SEQ ID NO: 175628 - DNA, 1095 bp, Artificial Sequence
  derived and/or modified sequence
atgagcagcgcccccaggagccccaccccccggcccaggaggatgaagaaggatgagagcttcctgggcaagctgggcggcaccctggccaggaagagaagagcccgggaggtgtctgacctgcaggaggagggcaagaatgccatcaacagccccatgagccctgccctggtggatgtgcaccctgaggacacccagctggaggagaatgaggagaggaccatgattgaccccaccagcaaggaggaccccaagttcaaggagctggtgaaggtgctgctggactggatcaatgatgtgctggtggaggagcgcatcatcgtgaagcagctggaggaggacctgtatgatggccaggtgctgcagaagctgctggagaagctggccggctgcaagctgaatgtggccgaggtgacccagagcgagatcggccagaagcagaagctgcagacagtgctggaggccgtgcatgacctgctgcggccccggggctgggccctgcgctggagcgtggacagcatccacggcaagaacctggtggccatcctgcacctgctggtgtccctggccatgcacttccgggcccccatccggctgcctgagcacgtgacagtgcaggtggtggtggtgaggaagcgggagggcctgctgcacagcagccacatcagcgaggagctgaccaccaccacagagatgatgatgggccgctttgaaagagatgcctttgacaccctgtttgaccacgccccagacaagctgtctgtggtgaagaagagcctcatcacctttgtgaacaagcacctgaacaagctgaacctggaggtgacagagctggagacccagtttgctgatggagtgtacctggtgctgctgatgggcctgctggaggactactttgtgcccctgcaccacttctacctgaccccagagagctttgaccagaaggtgcacaacgtgtcctttgcctttgagctgatgctggatggcggcctgaagaagcccaaggcccggccagaagatgtggtgaacctggacctgaagagcaccctgcgggtgctgtacaacctcttcaccaagtacaagaatgtggagtag

SEQ ID NO: 175629 - DNA, 1095 bp, Artificial Sequence
  derived and/or modified sequence
atgagcagcgccccccggagccccaccccccggccccggcggatgaagaaggatgaaagctttctgggcaaactgggtggcactttggcacggaaacgccgagcaagagaggtctccgacttacaggaagagggcaagaatgccattaatagccctatgagccctgctctggtggacgttcacccggaagatacccagcttgaagagaacgaagagcgcacaatgattgacccaacctcaaaggaggaccccaagttcaaagagttggtgaaagtgctgctggactggatcaacgacgttctggtggaagagaggatcatagtgaagcagttggaggaggacctgtacgatgggcaggttctgcaaaaattattggagaagctggcaggctgcaagctgaacgtggcagaagtgacccagtcagagatagggcagaagcagaaactgcagaccgtgctcgaagccgtccacgaccttctccgtcctaggggctgggctttacgctggtcagtcgacagcatccatggaaaaaacctagtggccatacttcacctcctggtgtcactggccatgcatttcagagcacctattcggctgcctgagcacgtgaccgtgcaggtcgtcgtcgtacgaaagcgggagggcctgctgcactccagccatataagtgaggagctaacaacgacaaccgagatgatgatgggacgtttcgagcgagatgcttttgacactctgttcgatcacgctcccgacaaactctccgtggttaagaagagcttgattaccttcgtgaacaagcatttgaacaaactaaaccttgaggttacagagctggaaactcaattcgcagatggagtctatctggtgttacttatggggctgcttgaagattattttgtaccactgcatcacttttacctaacaccggagtccttcgatcaaaaggtgcacaatgtgtctttcgcttttgaactgatgttagatggcggccttaagaagcctaaggccagaccggaggacgtagtgaacctcgacctgaagtcaacactccgggttctttataacctatttacgaagtacaaaaacgtcgagtag

SEQ ID NO: 175630 - DNA, 1706 bp, Artificial Sequence
  derived and/or modified sequence
ctccccggggcgaccgggcggctccacacgcgctgcgcccgccgccggccccacgcgcggcccatgtcctccgcgccgcgctcgcccaccccgcggccccgcaggatgaagaaggacgagtcgttcctgggcaagctgggcggcaccctggccaggaagcggagggcgcgcgaggtgagtgacctgcaggaagaaggcaagaatgccatcaactcaccgatgtcccccgccctggtggatgttcaccctgaagacacccagcttgaggagaacgaggagcgcacgatgattgaccccacttccaaggaagaccccaagttcaaggaactggtcaaggtcctcctcgactggattaatgacgtgctggtggaggagaggatcattgtgaagcagctggaggaagacctgtatgacggccaggtgctgcagaagctcttggaaaaactggcagggtgcaagctgaatgtggctgaggtgacacagtccgaaatagggcagaaacagaagctgcagacggtgctggaagcagtacatgacctgctgcggccccgaggctgggcgctccggtggagcgtggactcaattcacgggaagaacctggtggccatcctccacctgctggtctctctggccatgcacttcagggcccccatccgccttcctgagcatgtaacggtgcaggtggtggtcgtgcggaaacgggaaggcctgctgcattccagccacatctcggaggagctgaccacaactacagagatgatgatgggccggttcgagcgggatgccttcgacacgctgttcgaccacgccccggataagctcagcgtggtgaagaagtctctcatcacttttgtgaacaagcacctgaacaagctgaatttggaggtgacggaactggagacccagtttgcagatggcgtgtacctggttctgctcatgggccttctggaagactactttgttcctctccaccacttctacctgactccggaaagcttcgatcagaaggtccacaatgtgtccttcgcctttgagctgatgctggacggaggcctcaagaaacccaaggctcgtcctgaagacgtggttaacttggacctcaaatccaccctgagggttctttacaacctgttcaccaagtacaagaacgtggagtgacgggggagctgtggatggtggcaggagtgtcccagcaagaaaggcggcatccgtctgtgccctgtgcctttccagggagccaggcgccatgggcttctggtccaagctgtgttgactgtcatccccaccccacccctacctcacgcctgccccaccccctgcctcttttggttgttgttcttaatctcctctccatgtagttcccagtgggcaagagcctttgaaaatgcaggattctaaacactcgtgcttgcgtttgaagcctcgcgtcactcagtcgcgtgggatgatgagtccgttgttgtctgccttggccgaaagatgaaaaaaagcctgaaccccaacccccagctggttgagagcaccctgcattctgcctcatggtgcagttagcgatcacaggccttcagaagtacaacatcagctcagcaggaacgccggctccccgaggacccaggcttgacgattcaccggggatctcctgggctgggctctccttggaagtgaggccttttattaaaaataaaagggttttgcagtttgaaaaa

SEQ ID NO: 175631 - DNA, 1095 bp, Artificial Sequence
  derived and/or modified sequence
atgagttctgcgccacggtctcccacacccagaccacggcgaatgaaaaaagatgagtcctttcttgggaaactcggcggaactcttgctcgcaaacgacgggcaagagaggtatctgacctccaggaagaggggaagaatgcaattaattcccccatgagcccagctctggtggacgtgcaccccgaagatacccagttggaggagaatgaagagaggaccatgatcgatccgacttctaaggaggatccgaaattcaaagagctagtgaaagtcctgctcgattggattaacgatgtgcttgtagaggaaagaatcattgtgaaacagctagaggaggatctatatgatggccaagtgctccagaagctactggagaaactagcgggttgtaagcttaacgtagccgaagtaacccagagtgagatcgggcaaaaacagaaattgcaaactgtcttggaggcagttcacgatctactcaggcccaggggatgggcccttagatggtctgtagatagtatacatggcaaaaacttggtggccattctgcatcttttggtgtccctcgccatgcacttcagggcccctatccgtctgcctgagcacgtgactgtgcaggtggtcgttgttagaaaacgggaaggcctactgcactcctcccatatcagtgaagagctgactactacgactgaaatgatgatgggccgatttgaacgagacgccttcgacaccctgtttgaccacgctcccgataagctatccgtcgtcaagaagagtctgattaccttcgtgaataagcacctcaacaaactcaacttggaggttaccgagttagagactcaattcgcagacggagtatacctcgtcctcctcatgggactactagaggactatttcgtgcctctgcaccacttttacctgactccggagagtttcgatcagaaggtgcacaatgtttcgttcgcattcgagctgatgcttgatggtggactaaagaaacctaaggcacggccagaagatgttgtgaatctcgatttgaagagcactttgcgggtactatataacctattcaccaagtacaaaaacgtggaatag

SEQ ID NO: 175632 - DNA, 1095 bp, Artificial Sequence
  derived and/or modified sequence
atgagcagcgcccccagaagccccacccccagacccagaagaatgaagaaggacgagagcttcctgggcaagctgggcggcaccctggccagaaagagaagagccagagaggtgagcgacctgcaggaggagggcaagaacgccatcaacagccccatgagccccgccctggtggacgtgcaccccgaggacacccagctggaggagaacgaggagagaaccatgatcgaccccaccagcaaggaggaccccaagttcaaggagctggtgaaggtgctgctggactggatcaacgacgtgctggtggaggagagaatcatcgtgaagcagctggaggaggacctgtacgacggccaggtgctgcagaagctgctggagaagctggccggctgcaagctgaacgtggccgaggtgacccagagcgagatcggccagaagcagaagctgcagaccgtgctggaggccgtgcacgacctgctgagacccagaggctgggccctgagatggagcgtggacagcatccacggcaagaacctggtggccatcctgcacctgctggtgagcctggccatgcacttcagagcccccatcagactgcccgagcacgtgaccgtgcaggtggtggtggtgagaaagagagagggcctgctgcacagcagccacatcagcgaggagctgaccaccaccaccgagatgatgatgggcagattcgagagagacgccttcgacaccctgttcgaccacgcccccgacaagctgagcgtggtgaagaagagcctgatcaccttcgtgaacaagcacctgaacaagctgaacctggaggtgaccgagctggagacccagttcgccgacggcgtgtacctggtgctgctgatgggcctgctggaggactacttcgtgcccctgcaccacttctacctgacccccgagagcttcgaccagaaggtgcacaacgtgagcttcgccttcgagctgatgctggacggcggcctgaagaagcccaaggccagacccgaggacgtggtgaacctggacctgaagagcaccctgagagtgctgtacaacctgttcaccaagtacaagaacgtggagtag

SEQ ID NO: 175633 - protein, 376 aa, Artificial Sequence
  derived and/or modified sequence
MNHSERFVFIAEWYDPNASLLRRYELLFYPGDGSVEMHDVKNHRTFLKRTKYDNLHLEDLFIGNKVNVFSRQLVLIDYGDQYTARQLGSRKEKTLALIKPDAISKAGEIIEIINKAGFTITKLKMMMLSRKEALDFHVDHQSRPFFNELIQFITTGPIIAMEILRDDAICEWKRLLGPANSGVARTDASESIRALFGTDGIRNAAHGPDSFASAAREMELFFPSSGGCGPANTAKFTNCTCCIVKPHAVSEGLLGKILMAIRDAGFEISAMQMFNMDRVNVEEFYEVYKGVVTEYHDMVTEMYSGPCVAMEIQQNNATKTFREFCGPADPEIARHLRPGTLRAIFGKTKIQNAVHCTDLPEDGLLEVQYFFKILDN

SEQ ID NO: 175634 - protein, 340 aa, Artificial Sequence
  derived and/or modified sequence
MHDVKNHRTFLKRTKYDNLHLEDLFIGNKVNVFSRQLVLIDYGDQYTARQLGSRKEKTLALIKPDAISKAGEIIEIINKAGFTITKLKMMMLSRKEALDFHVDHQSRPFFNELIQFITTGPIIAMEILRDDAICEWKRLLGPANSGVARTDASESIRALFGTDGIRNAAHGPDSFASAAREMELFFPSSGGCGPANTAKFTNCTCCIVKPHAVSEGLLGKILMAIRDAGFEISAMQMFNMDRVNVEEFYEVYKGVVTEYHDMVTEMYSGPCVAMEIQQNNATKTFREFCGPADPEIARHLRPGTLRAIFGKTKIQNAVHCTDLPEDGLLEVQYFFKILDN

SEQ ID NO: 175635 - DNA, 1131 bp, Artificial Sequence
  derived and/or modified sequence
atgaatcactccgagcgcttcgtgtttatagctgagtggtatgacccgaatgcaagtctgctgcgtagatacgaattactgttttaccccggagacggatcagtggagatgcatgacgtcaagaaccatcggactttcctgaagaggaccaagtatgacaatctccacttggaagatctgtttattggcaataaggtgaatgtgttttcacgacagcttgtactgatcgattatggcgaccagtacactgcgcgccaactgggctccagaaaagaaaaaaccctcgcacttattaaacctgatgcgatcagtaaagcaggagagatcatcgaaattatcaacaaggccggtttcacaattacaaagctcaaaatgatgatgttgtccagaaaagaggcactggatttccacgtagatcatcaatctcgcccctttttcaatgaactgatacagttcatcaccacaggtcctatcattgcaatggaaatcctgcgtgatgatgccatttgcgagtggaagcgtctgctgggacctgcgaatagtggtgtagcgcggactgacgcctccgagtctattcgtgcactgtttgggactgatggtatccgcaatgcggcccacggacccgatagcttcgcgtcagccgcccgagaaatggagctctttttcccaagctctggcggatgcggccctgccaataccgccaagtttacaaattgtacctgctgtattgtaaagccccacgccgtttcagagggcctgctcgggaagattcttatggccattagagacgcaggttttgaaatttccgctatgcagatgttcaatatggaccgggtgaatgtcgaggagttttatgaagtatacaaaggggtggtgacagagtaccatgatatggtgactgagatgtactcaggaccctgcgtcgcaatggagatccaacagaataatgctactaagactttccgcgaattctgcggccccgctgatcccgagatcgccagacatctgcgccccgggaccctgcgcgccatcttcggtaagactaagatacagaacgctgtccactgtaccgacctgcccgaggatggactgctcgaggtacagtatttctttaagatcctcgacaattag

SEQ ID NO: 175636 - DNA, 1131 bp, Artificial Sequence
  derived and/or modified sequence
atgaaccacagcgagagatttgtgttcatcgccgagtggtatgaccccaatgccagcctgctgcggcgctatgagctgctcttctacccaggagatggctctgtggagatgcatgatgtgaagaaccacaggaccttcctgaagaggaccaagtatgacaacctgcacctggaggacctcttcatcggcaacaaggtgaatgtgttcagccggcagctggtgctgattgattatggagaccagtacacagcccggcagctgggcagcaggaaggagaagaccctggccctgatcaagccagatgccatcagcaaggccggggagatcatcgagatcatcaacaaggccggcttcaccatcaccaagctgaagatgatgatgctgagcaggaaggaggccctggacttccacgtggaccaccagagccggcccttcttcaatgaactcatccagttcatcaccaccggccccatcatcgccatggagatcctgagagatgatgccatctgtgagtggaagaggctgctgggccctgccaacagcggcgtggccaggacagatgccagcgagagcatccgggccctgtttggaacagatggcatcagaaatgctgcccacggccctgacagctttgccagcgctgcccgggagatggagctgttcttccccagcagcggcggctgcggccctgccaacacagccaagttcaccaactgcacctgctgcatcgtgaagccccatgctgtgtctgagggcctgctgggcaagatcctgatggccatcagagatgctggctttgagatcagcgccatgcagatgttcaacatggacagagtgaatgtggaggagttctatgaggtgtacaagggcgtggtgacagagtaccatgacatggtgacagagatgtacagcggcccctgtgtggccatggagatccagcagaacaatgccaccaagaccttccgggagttctgtggccctgctgaccctgagatcgcccggcacctgcggcccggcaccctgcgggccatctttgggaagaccaagatccagaatgctgtgcactgcacagacctgcctgaagatggcctgctggaggtgcagtacttcttcaagatcctggacaactag

SEQ ID NO: 175637 - DNA, 1131 bp, Artificial Sequence
  derived and/or modified sequence
atgaaccacagcgagcggttcgtgttcatcgccgagtggtacgaccctaacgctagcctgctaaggcggtacgagctcttgttctacccaggggatggttctgtggagatgcacgacgtcaagaatcatcggacctttcttaaaagaacaaaatacgacaacttgcacctggaggatctcttcattggcaataaggtgaacgtgttttcccggcagctggtgcttatagattatggcgaccaatataccgcccgccagctgggcagcaggaaagaaaaaaccctggccctcattaagccggatgctatatctaaggctggagaaataatagaaattatcaacaaggcaggcttcactattaccaaacttaagatgatgatgctgtcacgcaaggaggccctggatttccatgtggaccatcagtctcgacccttcttcaatgaattaatacagttcatcaccacaggacccataatcgccatggaaatccttagagacgacgcgatttgcgaatggaaaaggctgttgggaccagcaaatagcggcgtggctcggaccgatgccagcgagtctatacgggctctgtttggaaccgatggcataagaaatgcggcccacggccctgactcattcgcatctgccgcccgcgaaatggaactgtttttcccttcttccggaggctgcggacccgctaacacagccaagttcaccaactgcacatgctgcatcgttaagccccatgctgtcagcgaaggattacttggcaagattttgatggctattcgggacgcaggctttgagatttccgccatgcaaatgtttaacatggacagagttaacgtggaggaattctacgaggtttacaagggggtggtgaccgagtatcacgacatggtcactgagatgtacagcggcccatgtgtggcaatggagatccagcagaacaatgcaacaaaaacgtttagggagttttgcggacccgctgacccagagattgctcgacacttgcgacccggtaccctgagggctattttcggaaagaccaaaatccaaaacgccgtccactgtaccgacctgccggaggacggacttctcgaggtccagtacttcttcaagattttggacaactag

SEQ ID NO: 175638 - DNA, 1642 bp, Artificial Sequence
  derived and/or modified sequence
ggaagtaaaactgccggaaacagaataatggcgtctcgtagccccaggcgacagcgtggaggggcgggtctgtcgattggatgaacgcagctgagattactcccagccactaaggacgaagaggtggggcggtggcgtcccacgcctcgtgcgacagtgggcggggctttgttgcctgagtaaccgtatgatggtggtggtggtggtgtcttcctgtctcaacgatacctattttctagtgctgagatcctgagacaatgaatcatagtgaaagattcgttttcattgcagagtggtatgatccaaatgcttcacttcttcgacgttatgagcttttattttacccaggggatggatctgttgaaatgcatgatgtaaagaatcatcgcacctttttaaagcggaccaaatatgataacctgcacttggaagatttatttataggcaacaaagtgaatgtcttttctcgacaactggtattaattgactatggggatcaatatacagctcgccagctgggcagtaggaaagaaaaaacgctagccctaattaaaccagatgcaatatcaaaggctggagaaataattgaaataataaacaaagctggatttactataaccaaactcaaaatgatgatgctttcaaggaaagaagcattggattttcatgtagatcaccagtcaagaccctttttcaatgagctgatccagtttattacaactggtcctattattgccatggagattttaagagatgatgctatatgtgaatggaaaagactgctgggacctgcaaactctggagtggcacgcacagatgcttctgaaagcattagagccctctttggaacagatggcataagaaatgcagcgcatggccctgattcttttgcttctgcggccagagaaatggagttgttttttccttcaagtggaggttgtgggccggcaaacactgctaaatttactaattgtacctgttgcattgttaaaccccatgctgtcagtgaaggactgttgggaaagatcctgatggctatccgagatgcaggttttgaaatctcagctatgcagatgttcaatatggatcgggttaatgttgaggaattctatgaagtttataaaggagtagtgaccgaatatcatgacatggtgacagaaatgtattctggcccttgtgtagcaatggagattcaacagaataatgctacaaagacatttcgagaattttgtggacctgctgatcctgaaattgcccggcatttacgccctggaactctcagagcaatctttggtaaaactaagatccagaatgctgttcactgtactgatctgccagaggatggcctattagaggttcaatacttcttcaagatcttggataattagtggtgtggaaagtaaagaagtcacaggttgggacatttagacaagagtgaatcacacacgaggaatgtgttcattcttttattgtccgttgttttaacctgactgaatacaagatcaacaagagcactgtactcctggcaattattacatatgttagaacatggattttgcactgtagacaacatttaacaccagtctatggggtactgcattgctttttataaagttcaaaataaagatttattttcaaacaa

SEQ ID NO: 175639 - DNA, 1590 bp, Artificial Sequence
  derived and/or modified sequence
agaataatggcgtctcgtagccccaggcgacagcgtggaggggcgggtctgtcgattggatgaacgcagctgagattactcccagccactaaggacgaagaggtggggcggtggcgtcccacgcctcgtgcgacagtgggcggggctttgttgcctgagtaaccgtatgatggtggtggtggtggtgtcttcctgtctcaacgatacctattttctagtgctgagatcctgagacaatgagtggtatgatccaaatgcttcacttcttcgacgttatgagcttttattttacccaggggatggatctgttgaaatgcatgatgtaaagaatcatcgcacctttttaaagcggaccaaatatgataacctgcacttggaagatttatttataggcaacaaagtgaatgtcttttctcgacaactggtattaattgactatggggatcaatatacagctcgccagctgggcagtaggaaagaaaaaacgctagccctaattaaaccagatgcaatatcaaaggctggagaaataattgaaataataaacaaagctggatttactataaccaaactcaaaatgatgatgctttcaaggaaagaagcattggattttcatgtagatcaccagtcaagaccctttttcaatgagctgatccagtttattacaactggtcctattattgccatggagattttaagagatgatgctatatgtgaatggaaaagactgctgggacctgcaaactctggagtggcacgcacagatgcttctgaaagcattagagccctctttggaacagatggcataagaaatgcagcgcatggccctgattcttttgcttctgcggccagagaaatggagttgttttttccttcaagtggaggttgtgggccggcaaacactgctaaatttactaattgtacctgttgcattgttaaaccccatgctgtcagtgaaggactgttgggaaagatcctgatggctatccgagatgcaggttttgaaatctcagctatgcagatgttcaatatggatcgggttaatgttgaggaattctatgaagtttataaaggagtagtgaccgaatatcatgacatggtgacagaaatgtattctggcccttgtgtagcaatggagattcaacagaataatgctacaaagacatttcgagaattttgtggacctgctgatcctgaaattgcccggcatttacgccctggaactctcagagcaatctttggtaaaactaagatccagaatgctgttcactgtactgatctgccagaggatggcctattagaggttcaatacttcttcaagatcttggataattagtggtgtggaaagtaaagaagtcacaggttgggacatttagacaagagtgaatcacacacgaggaatgtgttcattcttttattgtccgttgttttaacctgactgaatacaagatcaacaagagcactgtactcctggcaattattacatatgttagaacatggattttgcactgtagacaacatttaacaccagtctatggggtactgcattgctttttataaagttcaaaataaagatttattttcaaacaa

SEQ ID NO: 175640 - DNA, 1131 bp, Artificial Sequence
  derived and/or modified sequence
atgaaccacagcgagaggttcgtgtttatcgccgaatggtatgacccaaacgcaagccttcttagaagatacgagctgctgttttatccaggggatggatccgttgagatgcacgacgtcaaaaaccacaggacttttctaaagcggacgaagtacgacaacctgcacttggaggatctgtttattgggaataaagtgaacgtgttctcccgtcaacttgtgctgatcgactacggtgatcagtatacagctagacagttagggtctagaaaggaaaaaacgctggccctaatcaaacccgacgctatcagcaaggcgggtgagatcatcgagataataaataaggccggatttacaatcaccaaattgaagatgatgatgctaagccgtaaagaagcacttgattttcacgtggatcatcagagtagacccttttttaacgagctcattcagtttataacaactggcccaataatcgcaatggagattctccgtgacgatgccatatgcgagtggaagaggttgttaggacctgcgaactctggagtagcacgcaccgacgcctccgagtctatccgcgctcttttcgggactgacgggatcagaaatgccgcacacggaccagactctttcgcaagcgctgctagggagatggaactgttttttccctcatccgggggttgtggacctgccaacaccgcgaagttcaccaattgtacttgctgtattgtgaaacctcatgcagtatccgaaggattgctcggaaagattcttatggcaatacgagatgccggtttcgaaatctccgctatgcagatgttcaacatggacagagttaatgttgaggagttctacgaggtgtacaagggcgttgtgacagaatatcatgatatggtcaccgagatgtacagcggcccttgcgtggcaatggagattcagcagaataatgccaccaaaacttttcgcgaattttgcggtcctgcggatccggaaattgccagacatctcaggccgggaactctgcgtgcaattttcggcaaaacaaaaatccagaatgccgtccactgtacagatttgccagaggatggcctgctggaagtgcaatacttttttaaaattcttgacaactag

SEQ ID NO: 175641 - DNA, 1131 bp, Artificial Sequence
  derived and/or modified sequence
atgaaccacagcgagagattcgtgttcatcgccgagtggtacgaccccaacgccagcctgctgagaagatacgagctgctgttctaccccggcgacggcagcgtggagatgcacgacgtgaagaaccacagaaccttcctgaagagaaccaagtacgacaacctgcacctggaggacctgttcatcggcaacaaggtgaacgtgttcagcagacagctggtgctgatcgactacggcgaccagtacaccgccagacagctgggcagcagaaaggagaagaccctggccctgatcaagcccgacgccatcagcaaggccggcgagatcatcgagatcatcaacaaggccggcttcaccatcaccaagctgaagatgatgatgctgagcagaaaggaggccctggacttccacgtggaccaccagagcagacccttcttcaacgagctgatccagttcatcaccaccggccccatcatcgccatggagatcctgagagacgacgccatctgcgagtggaagagactgctgggccccgccaacagcggcgtggccagaaccgacgccagcgagagcatcagagccctgttcggcaccgacggcatcagaaacgccgcccacggccccgacagcttcgccagcgccgccagagagatggagctgttcttccccagcagcggcggctgcggccccgccaacaccgccaagttcaccaactgcacctgctgcatcgtgaagccccacgccgtgagcgagggcctgctgggcaagatcctgatggccatcagagacgccggcttcgagatcagcgccatgcagatgttcaacatggacagagtgaacgtggaggagttctacgaggtgtacaagggcgtggtgaccgagtaccacgacatggtgaccgagatgtacagcggcccctgcgtggccatggagatccagcagaacaacgccaccaagaccttcagagagttctgcggccccgccgaccccgagatcgccagacacctgagacccggcaccctgagagccatcttcggcaagaccaagatccagaacgccgtgcactgcaccgacctgcccgaggacggcctgctggaggtgcagtacttcttcaagatcctggacaactag

SEQ ID NO: 175642 - protein, 550 aa, Artificial Sequence
  derived and/or modified sequence
MSTSSLRRQMKNIVHNYSEAEIKVREATSNDPWGPSSSLMSEIADLTYNVVAFSEIMSMIWKRLNDHGKNWRHVYKAMTLMEYLIKTGSERVSQQCKENMYAVQTLKDFQYVDRDGKDQGVNVREKAKQLVALLRDEDRLREERAHALKTKEKLAQTATASSAAVGSGPPPEAEQAWPQSSGEEELQLQLALAMSKEEADQEERIRRGDDLRLQMAIEESKRETGGKEESSLMDLADVFTAPAPAPTTDPWGGPAPMAAAVPTAAPTSDPWGGPPVPPAADPWGGPAPTPASGDPWRPAAPAGPSVDPWGGTPAPAAGEGPTPDPWGSSDGGVPVSGPSASDPWTPAPAFSDPWGGSPAKPSTNGTTAGGFDTEPDEFSDFDRLRTALPTSGSSAGELELLAGEVPARSPGAFDMSGVRGSLAEAVGSPPPAATPTPTPPTRKTPESFLGPNAALVDLDSLVSRPGPTPPGAKASNPFLPGGGPATGPSVTNPFQPAPPATLTLNQLRLSPVPPVPGAPPTYISPLGGGPGLPPMMPPGPPAPNTNPFLL

SEQ ID NO: 175643 - DNA, 1653 bp, Artificial Sequence
  derived and/or modified sequence
atgagcacttcctctctcagacgccagatgaagaacattgttcataactacagtgaggctgagataaaggttagggaagccacatctaacgatccttggggaccaagctctagtttgatgtcggagatcgctgatttgacttataacgtggtagcattctctgaaatcatgtcaatgatttggaaacgattgaacgaccatggaaagaactggagacacgtttataaagccatgacactcatggagtatctcatcaaaaccggcagtgagcgcgtgtctcagcaatgcaaggagaatatgtacgccgtgcaaacactcaaagacttccagtatgtagaccgggacggcaaggaccagggcgttaacgtccgggaaaaggcaaagcagcttgtcgccctcctgcgggacgaggatcgactccgagaggagagggcccatgcactgaaaaccaaggagaaactggcccagaccgcaaccgctagcagcgccgccgtaggttcagggccaccccccgaagctgagcaagcctggccgcagtcctccggggaggaagaactgcagcttcagcttgccctggcgatgagcaaggaagaggctgaccaggaggagaggatcagacggggagatgacctaagactccagatggccatcgaggagtctaaacgggaaaccgggggaaaggaggagtcatctctgatggatctggccgatgtcttcaccgctccggccccagcgcctacgacagacccatggggcggtcctgctccaatggctgcggccgtgcccactgcagcgcccacctccgatccctggggcggccctccggtccctccagcagcagatccttggggcggtcctgcccctacgcccgcgtccggtgacccatggcgcccggctgccccagcagggccctcagtcgacccctggggtggtacacccgccccagctgcaggggaagggcccacccctgatccatggggatcatcagacggtggggtccctgtgagcgggccctcggcctctgatccatggaccccagcacccgcctttagcgatccatggggaggtagccccgcaaagccctcaacaaatggaactactgcaggcggattcgacaccgagccagacgaattctccgattttgatcgactcagaacagcccttcctactagcggttcaagcgccggggagctcgagttgctcgcaggagaggtgcctgcacgatccccaggtgccttcgacatgtcaggagtgcgggggagcctggccgaagccgtgggaagtccaccgccggcggcgactcccacgccaactccgccaacccggaagactccagagagcttcttaggaccgaacgctgctctagtggacttagactcgctcgtcagccgccccggcccgactccacccggcgctaaggcctccaatccttttcttcctggagggggcccggccacaggaccatccgtaactaatccattccagccggccccacctgccactctcacccttaatcagctccggctgtctccagttccaccagtcccaggagccccccctacctacatttccccattgggaggaggccccggccttccaccaatgatgccccccggtcctccggcacctaacacaaatcccttcctgttatag

SEQ ID NO: 175644 - DNA, 1653 bp, Artificial Sequence
  derived and/or modified sequence
atgagcaccagcagcctgcggcggcagatgaagaacatcgtgcacaactacagcgaggccgagatcaaggtgcgggaggccaccagcaatgacccctggggccccagcagcagcctgatgtctgaaattgctgacctgacctacaacgtggtggccttcagcgagatcatgtccatgatctggaagaggctgaatgaccacggcaagaactggaggcatgtgtacaaggccatgaccctgatggagtacctgatcaagacaggcagcgagcgggtgtcccagcagtgcaaggagaacatgtatgctgtgcagaccctgaaggacttccagtatgtggacagagatggcaaggaccagggcgtgaatgtgcgggagaaggccaagcagctggtggccctgctgagagatgaagatcggctgcgggaggagcgggcccacgccctgaagaccaaggagaagctggcccagacagccacagccagcagcgctgctgtgggcagcggccccccacctgaggccgagcaggcctggccccagagcagtggagaggaggagctgcagctgcagctggccctggccatgagcaaggaggaggccgaccaggaggagcgcatcagaagaggagatgacctgcggctgcagatggccatcgaggagagcaagcgggagaccggcggcaaggaggagagcagcctgatggacctggctgatgtgttcaccgccccagccccagcccccaccacagacccctggggcggccctgcccccatggctgctgctgtgcccacagctgcccccaccagtgacccctggggcggcccccctgtgcccccagctgctgacccctggggcggccctgcccccaccccagccagcggggacccctggaggcctgctgccccagctggccccagcgtggacccctggggcggcaccccagccccagctgctggggagggccccaccccagacccctggggcagcagtgatggcggcgtgcctgtgtctggccccagcgccagtgacccctggaccccagccccagccttcagtgacccctggggcggcagccctgccaagcccagcaccaacggcaccacagctgggggctttgacacagagccagatgagttcagtgactttgaccggctgaggacagccctgcccaccagcggcagcagcgctggggagctggagctgctggccggggaggtgcctgcccggagccctggggcctttgacatgtctggagtgcggggcagcctggccgaggccgtgggcagccccccacctgctgccacccccacccccaccccacccaccaggaagaccccagagagcttcctgggccccaatgctgccctggtggacctggacagcctggtgtccaggcctggccccaccccacctggggccaaggccagcaaccccttcctgcccggcggcggccctgccaccggccccagcgtgaccaaccccttccagcctgcccccccagccaccctgaccctgaaccagctgcggctgagccctgtgccccctgtgcctggggccccacccacctacatcagccccctgggcggcggccctggcctgccccccatgatgcctcctggccccccagcccccaacaccaaccccttcctgctgtag

SEQ ID NO: 175645 - DNA, 1653 bp, Artificial Sequence
  derived and/or modified sequence
atgagcaccagcagcctgcggcggcagatgaagaacatcgtgcacaattatagtgaagctgagatcaaagtccgggaagctacatctaatgacccttggggtccttcgtcttctctgatgagtgagatcgccgacctgacctacaacgttgtagctttctccgaaatcatgtctatgatatggaaaagactgaacgaccatggtaagaattggcggcatgtctataaagcaatgactctaatggaatacctgattaagacaggcagcgaacgagtgtcacaacagtgtaaagaaaatatgtacgcggtgcagacactgaaagacttccagtacgtcgatagggatgggaaggatcaaggagtcaacgtgagggagaaggcaaagcagctggtcgctctcctacgcgatgaggatcgcctccgtgaggagcgtgcccatgccctgaaaacgaaagagaagcttgcccaaacagccaccgcctcgtctgcagctgtggggtccggccccccaccagaggccgagcaagcctggccccagagttccggtgaagaggagctccagttgcagctggcactggccatgagtaaggaggaagcggatcaggaagagagaatcaggcgcggggatgatctgaggctccagatggcgattgaggagagcaagcgggaaactgggggaaaggaagagtcttctctgatggacttagcagatgtgtttactgcgcccgctcccgcccctactacagatccatggggggggcctgccccaatggccgcggcggtgcctacggcggccccaacatccgatccatggggtgggccgcctgtgccaccagccgccgatccttggggaggacccgcaccgaccccagccagtggagacccttggaggcccgctgcaccagccgggccatccgtagacccttggggcgggacgcccgctccagcagcaggggagggaccgacccccgatccctggggttcctctgatggcggagtgcccgttagcggccccagtgcctcggacccctggactcctgcacccgctttctcagatccctgggggggttcgcccgctaagccctcaacgaatggtaccacggccggtggcttcgatactgagcccgatgaattttccgattttgataggctgaggacagcgttacccacctctggctcatctgcaggcgagctggaactgttagccggggaggtaccagccagatccccgggagcgtttgatatgagtggcgtccgcggctcgctcgcagaagcggtgggttcacccccacccgcagctacccctacgcccacaccacccactagaaagactcctgagagtttcctaggacccaacgctgcactcgtggatttggacagccttgtaagccgccccgggcctacccctcctggcgcaaaggcctctaacccttttctgcctgggggaggtcctgccaccgggccaagcgttacgaatccctttcagcccgctcctcccgccaccttgactttgaaccagctccggctgagccctgtcccgcctgtacccggtgcccccccgacctatatcagccccctcggggggggtcctgggctgccaccaatgatgccaccaggccctccagcccccaatactaatccattcctcttgtag

SEQ ID NO: 175646 - DNA, 1653 bp, Artificial Sequence
  derived and/or modified sequence
atgtcaaccagcagtttgcgtcgtcagatgaaaaacattgtgcacaactacagcgaggcagagattaaagtgcgggaggctactagcaacgacccctgggggccttctagttcgttgatgagtgagatcgccgacctgacatacaatgtagtggccttttccgagatcatgagtatgatatggaaacgcttaaatgatcatggaaagaactggcgacacgtttataaagccatgactctgatggagtatttgataaagaccgggtccgagcgcgtgtctcagcagtgcaaggaaaatatgtacgcggttcagaccctgaaagacttccagtatgtggaccgtgacgggaaagaccaaggcgtgaacgtgcgagagaaagccaaacagctggtggcactactgagggatgaggaccggctccgcgaggagagagcccacgccctcaaaacaaaagaaaagctggcacagaccgctaccgcttcctcagcagccgtggggagcggccctccccctgaagcagaacaggcttggccacagtcttccggcgaagaggaattacaactgcagttggcacttgccatgtctaaagaggaggccgatcaggaagaacgtatccggaggggtgatgacctcaggcttcagatggctatcgaggaaagcaagcgagagactggcggaaaagaggagagctcgctgatggatctggccgatgtgtttactgctcctgcaccagcgcctacaacagacccatggggcggacccgctcctatggctgctgctgtgcccacagctgctcccacttcggatccctggggagggcctcctgtccccccagcggcagatccctggggcggacctgccccaaccccagccagcggcgatccctggcgccctgcagccccagcaggtccatctgtggatccctgggggggtacacccgctcctgccgctggtgaaggccctactcccgatccatggggctctagtgacgggggtgtgcctgtcagtggacccagtgcgtcagacccctggacccccgcaccagctttctccgacccctggggaggaagccctgcaaagccatccaccaatggaacaaccgcagggggattcgacacggaaccagacgagttctcagacttcgatcgacttcggaccgcccttccgacatctggatcttcagctggggaactggaactgcttgccggagaggtcccggcacgttctccaggggcattcgacatgagtggcgtccgcggatcattggctgaggcagtagggtccccaccccctgcagctacccctaccccaacacccccaaccagaaagacacctgagtcatttctgggcccaaatgccgctcttgtcgatctggatagcctggtcagcagaccaggacctacacccccaggagccaaggcgagtaaccctttcctaccaggtggcggtccagcaaccgggccttcagtcaccaatccttttcagcctgcaccacccgctaccctgacgctgaatcaactccgtctctcccccgtccctccagttcctggcgctcctccaacttacatctcccctctcggcggaggtcccggattgcccccaatgatgccacccggtccacctgcccctaatacaaatcccttcctgctgtag

SEQ ID NO: 175647 - DNA, 1653 bp, Artificial Sequence
  derived and/or modified sequence
atgagcacaagctctttgaggaggcagatgaagaacattgtccataactactccgaagctgaaatcaaagtgcgcgaggcaacttccaatgatccgtggggtccatccagctctctaatgagtgagattgccgacctgacatacaatgtggtggccttttctgaaattatgagtatgatctggaaacggctaaatgatcacggcaaaaactggcggcacgtctacaaggccatgaccttaatggagtacttaattaagacaggctctgagagagtcagtcagcagtgtaaggaaaacatgtacgcggtgcagaccctaaaggactttcaatacgttgatcgtgatgggaaagatcagggcgtcaacgtccgagaaaaagccaaacagctagtcgcactcttgcgcgatgaagaccgtcttcgcgaggagcgggcacacgcactgaaaacgaaggagaagctggctcagacggcaaccgcgtcttccgccgccgtagggtctgggcctccacctgaagctgagcaggcatggcctcagagttccggcgaggaagagttgcagctgcagctcgctctggctatgagtaaagaagaagccgatcaagaggagagaatccgccggggggacgacttgcgactacagatggcaatcgaagaatcgaagagagagaccggaggtaaggaggagagttcactgatggaccttgccgacgtgtttaccgccccggccccggcacccactactgatccctggggcgggcctgcaccaatggccgccgccgtaccgacagccgcacctacatcggacccttggggaggacccccggtgccacccgctgcagacccctggggtggacccgcacccacacccgcatccggtgacccttggcgcccagccgcacctgccggaccctctgtagatccttgggggggcactcccgctccagcagctggcgaggggcctacccccgacccttggggctccagcgacggaggtgtccctgttagcggcccctctgcctccgatccttggaccccagctcctgctttctctgatccttggggaggttccccagccaaaccctccactaacggaaccacggcaggtggattcgataccgaaccagacgaattttctgacttcgaccgcctgaggactgccctacccacttcgggttcatcggctggggagctggagttgctggcgggcgaagtacccgcgcggtcccctggcgcctttgatatgagtggcgtgagaggatccctcgcagaagctgtgggctcccctcctccggccgccacccctacgccgacccccccaactaggaaaaccccagaaagttttctgggcccaaatgccgccctggtggaccttgattcactggtgtcgcggccaggcccaaccccacccggcgccaaagcttcaaacccatttcttcccggcggcggacccgccacaggcccaagcgtaacaaatccctttcaacctgcgccccccgccactcttacactaaaccaactgcggctgtcccctgttcccccagttcctggcgccccgccaacatacatctctcccctcgggggagggcctggcttaccgccaatgatgcccccaggaccccctgcacccaacactaacccctttctgctgtag

SEQ ID NO: 175648 - DNA, 1653 bp, Artificial Sequence
  derived and/or modified sequence
atgtccacatcatccctacggagacaaatgaagaatatcgtgcacaattactctgaagctgaaattaaagtgcgtgaagctacttccaatgacccttggggcccctccagcagcctgatgagtgagatcgccgacctgacttacaatgtcgtagcctttagcgagatcatgtccatgatctggaaacgacttaatgaccacgggaaaaactggcgccacgtgtataaggccatgaccctgatggaataccttatcaagactgggtccgaacgtgtgtcccagcagtgcaaagagaatatgtatgctgtgcagacactcaaagacttccagtatgtggaccgggatggaaaggatcagggagttaatgttagagaaaaggccaagcaactcgtagcacttcttagggatgaagatagactacgggaagaacgcgcgcatgccctcaaaaccaaggaaaaactagcccagactgctaccgcgtcctcagctgcagtagggtcaggaccaccacctgaggccgaacaggcctggccccagtcaagcggagaggaggagcttcagttgcaacttgcactggccatgtcaaaagaggaggcagaccaggaagaacgaattcggcgaggcgacgatttaagactacaaatggctatagaggaatccaagcgcgaaaccggcggcaaggaggagagcagtctaatggacctagcggacgtatttactgcgccagcaccggccccaactaccgacccatggggtgggccagccccaatggccgcagccgtgccaactgccgcccctactagtgacccctggggaggccctccagttccccccgccgcagacccctggggtgggcctgcccccaccccggccagtggcgacccctggcgacccgctgctcccgccgggccatcagtcgacccatggggaggaacgcccgccccagctgcaggtgaaggacctactcctgatccatggggaagttcggacggtggggtcccagtgagtggcccatctgctagtgacccttggactcccgctcccgcattcagtgacccttggggagggtcccctgcgaagccatccactaatggcaccactgcaggcggattcgacaccgagccggatgaatttagtgattttgaccgtctgagaactgccttgcctacttcaggatcttctgccggtgaattggagctcctggcaggcgaggttcccgcccgatcccctggcgcttttgacatgtccggcgtgcgtggcagtctggccgaagccgtcggaagccctccgcccgcagcaacccccacacccaccccacctacacgtaaaaccccggaatcttttctcggcccaaacgccgctctagtggacctggactcactcgtctccagaccaggcccaaccccgccaggggccaaggcatccaatccctttctccccggaggcggtcctgcaacaggccccagcgttaccaatcccttccagcccgcgcctccagccacactgaccctgaaccagctgcgactgagccctgtgcctccagttcccggagccccccctacatatattagccccctgggcggaggacccggccttccacctatgatgccccctggcccccctgcacccaataccaatccttttttgctttag

SEQ ID NO: 175649 - DNA, 1653 bp, Artificial Sequence
  derived and/or modified sequence
atgagcaccagcagcctgagaagacagatgaagaacatcgtgcacaactacagcgaggccgagatcaaggtgagagaggccaccagcaacgacccctggggccccagcagcagcctgatgagcgagatcgccgacctgacctacaacgtggtggccttcagcgagatcatgagcatgatctggaagagactgaacgaccacggcaagaactggagacacgtgtacaaggccatgaccctgatggagtacctgatcaagaccggcagcgagagagtgagccagcagtgcaaggagaacatgtacgccgtgcagaccctgaaggacttccagtacgtggacagagacggcaaggaccagggcgtgaacgtgagagagaaggccaagcagctggtggccctgctgagagacgaggacagactgagagaggagagagcccacgccctgaagaccaaggagaagctggcccagaccgccaccgccagcagcgccgccgtgggcagcggccccccccccgaggccgagcaggcctggccccagagcagcggcgaggaggagctgcagctgcagctggccctggccatgagcaaggaggaggccgaccaggaggagagaatcagaagaggcgacgacctgagactgcagatggccatcgaggagagcaagagagagaccggcggcaaggaggagagcagcctgatggacctggccgacgtgttcaccgcccccgcccccgcccccaccaccgacccctggggcggccccgcccccatggccgccgccgtgcccaccgccgcccccaccagcgacccctggggcggcccccccgtgccccccgccgccgacccctggggcggccccgcccccacccccgccagcggcgacccctggagacccgccgcccccgccggccccagcgtggacccctggggcggcacccccgcccccgccgccggcgagggccccacccccgacccctggggcagcagcgacggcggcgtgcccgtgagcggccccagcgccagcgacccctggacccccgcccccgccttcagcgacccctggggcggcagccccgccaagcccagcaccaacggcaccaccgccggcggcttcgacaccgagcccgacgagttcagcgacttcgacagactgagaaccgccctgcccaccagcggcagcagcgccggcgagctggagctgctggccggcgaggtgcccgccagaagccccggcgccttcgacatgagcggcgtgagaggcagcctggccgaggccgtgggcagccccccccccgccgccacccccacccccaccccccccaccagaaagacccccgagagcttcctgggccccaacgccgccctggtggacctggacagcctggtgagcagacccggccccaccccccccggcgccaaggccagcaaccccttcctgcccggcggcggccccgccaccggccccagcgtgaccaaccccttccagcccgccccccccgccaccctgaccctgaaccagctgagactgagccccgtgccccccgtgcccggcgccccccccacctacatcagccccctgggcggcggccccggcctgccccccatgatgccccccggcccccccgcccccaacaccaaccccttcctgctgtag

SEQ ID NO: 175650 - protein, 387 aa, Artificial Sequence
  derived and/or modified sequence
MKALILVGGYGTRLRPLTLSTPKPLVDFCNKPILLHQVEALAAAGVDHVILAVSYMSQVLEKEMKAQEQRLGIRISMSHEEEPLGTAGPLALARDLLSETADPFFVLNSDVICDFPFQAMVQFHRHHGQEGSILVTKVEEPSKYGVVVCEADTGRIHRFVEKPQVFVSNKINAGMYILSPAVLQRIQLQPTSIEKEVFPIMAKEGQLYAMELQGFWMDIGQPKDFLTGMCLFLQSLRQKQPERLCSGPGIVGNVLVDPSARIGQNCSIGPNVSLGPGVVVEDGVCIRRCTVLRDARIRSHSWLESCIVGWRCRVGQWVSLWAGLGGERGGECACLPDKAYPLLEVRMENVTVLGEDVIVNDELYLNGASVLPHKSIGESVPEPRIIM

SEQ ID NO: 175651 - DNA, 1164 bp, Artificial Sequence
  derived and/or modified sequence
atgaaggccctgatcctggtgggcggctacggcaccagactgagacccctgaccctgagcacccccaagcccctggtggacttctgcaacaagcccatcctgctgcaccaggtggaggccctggccgccgccggcgtggaccacgtgatcctggccgtgagctacatgagccaggtgctggagaaggagatgaaggcccaggagcagagactgggcatcagaatcagcatgagccacgaggaggagcccctgggcaccgccggccccctggccctggccagagacctgctgagcgagaccgccgaccccttcttcgtgctgaacagcgacgtgatctgcgacttccccttccaggccatggtgcagttccacagacaccacggccaggagggcagcatcctggtgaccaaggtggaggagcccagcaagtacggcgtggtggtgtgcgaggccgacaccggcagaatccacagattcgtggagaagccccaggtgttcgtgagcaacaagatcaacgccggcatgtacatcctgagccccgccgtgctgcagagaatccagctgcagcccaccagcatcgagaaggaggtgttccccatcatggccaaggagggccagctgtacgccatggagctgcagggcttctggatggacatcggccagcccaaggacttcctgaccggcatgtgcctgttcctgcagagcctgagacagaagcagcccgagagactgtgcagcggccccggcatcgtgggcaacgtgctggtggaccccagcgccagaatcggccagaactgcagcatcggccccaacgtgagcctgggccccggcgtggtggtggaggacggcgtgtgcatcagaagatgcaccgtgctgagagacgccagaatcagaagccacagctggctggagagctgcatcgtgggctggagatgcagagtgggccagtgggtgagcctgtgggccggcctgggcggcgagagaggcggcgagtgcgcctgcctgcccgacaaggcctaccccctgctggaggtgagaatggagaacgtgaccgtgctgggcgaggacgtgatcgtgaacgacgagctgtacctgaacggcgccagcgtgctgccccacaagagcatcggcgagagcgtgcccgagcccagaatcatcatgtag

SEQ ID NO: 175652 - DNA, 1164 bp, Artificial Sequence
  derived and/or modified sequence
atgaaggccctcatcctcgtcggcggctatggaactcgcttacggcccctcactttatcaactcccaagcctctggtggacttctgtaacaagcccatactgctacaccaagtcgaagcactggctgccgccggtgtcgatcatgtaattttagccgtatcatatatgtcgcaggtgttagagaaagagatgaaagcccaggaacagcgcctgggcattcgcatttctatgtctcatgaagaggaaccactcggaacagccggccctctggctctggccagagacttgctgagcgagacggctgatccattctttgtactaaattccgatgtgatttgtgacttcccatttcaggctatggtacagttccaccgacatcacggccaggagggcagcattctcgtgaccaaggttgaggagcctagtaaatacggagtggtggtgtgcgaggccgacactgggagaatccaccgctttgttgaaaagcctcaggtttttgtcagcaataagatcaacgccggcatgtacatcctgtctcctgccgtcctgcaacgcatccagctccaacctactagcattgagaaagaagtgtttcctatcatggcaaaagaaggccagctctatgcaatggagctgcagggcttttggatggatattggccagccaaaggactttctgaccgggatgtgtttgttcctccagagccttcgccagaaacagccggagaggctctgttcagggcctggcatcgtgggcaatgttttggtggacccaagcgctaggatcggccagaactgctcaatcggacctaacgtgagcttggggcccggtgttgttgtcgaagacggcgtctgtattagaaggtgcactgtgctgagggatgcacgaataaggagccactcctggctggaaagttgtatcgtggggtggaggtgtagggtaggacagtgggtgagtttatgggcggggcttggcggtgagaggggcggggagtgtgcttgtctgcccgataaagcttatcccttgctggaagtacgcatggagaatgtgaccgtcctgggagaggacgtgatagtgaacgatgagttatatctgaatggggcatccgtgctcccccacaagtccatcggcgagagtgtgcccgaacctcgcattattatgtag

SEQ ID NO: 175653 - DNA, 1164 bp, Artificial Sequence
  derived and/or modified sequence
atgaaggccctgatcctggtgggcggctacggcacccggctgcggcccctgaccctgagcacccccaagcccctggtggacttctgcaacaagcccatcctgctgcaccaggtggaggccctggccgccgccggcgtggaccacgtgatcctggccgtgtcctacatgagccaggtgctggagaaggagatgaaggcccaggagcagaggctgggcatccgcatctccatgagccatgaggaggagcccctgggcacagctggccccctggccctggcccgggacctgctgtctgaaacagctgaccccttctttgtgctgaacagtgatgtgatctgtgacttccccttccaggccatggtgcagttccaccgccaccacggccaggagggcagcatcctggtgaccaaggtggaggagcccagcaaatatggagtggtggtgtgtgaggccgacaccggccgcatccacagatttgtggagaagccccaggtgtttgtgagcaacaagatcaatgccggcatgtacatcctgagccctgctgtgctgcagaggatccagctgcagcccaccagcattgagaaggaggtgttccccatcatggccaaggagggccagctgtatgccatggagctgcagggcttctggatggacatcggccagcccaaggacttcctgaccggcatgtgcctcttcctgcagagcctgcggcagaagcagcctgagcggctgtgcagcggccctggcatcgtgggcaatgtgctggtggaccccagcgcccgcatcggccagaactgcagcatcggccccaacgtgtccctgggccctggggtggtggtggaggatggagtgtgcatccgccgctgcaccgtgctgagagatgcccgcatccgcagccacagctggctggagagctgcatcgtgggctggcgctgccgggtgggccagtgggtgtccctgtgggccggcctgggcggggagagaggaggagaatgtgcctgcctgcctgacaaggcctaccccctgctggaggtgaggatggagaatgtgacagtgctgggagaagatgtgattgtgaatgatgagctgtacctgaatggagcctctgtgctgccccacaagagcatcggggagagcgtgcctgagccccgcatcatcatgtag

SEQ ID NO: 175654 - DNA, 3217 bp, Artificial Sequence
  derived and/or modified sequence
gagttcggggccagcagccgtctacccggtgtcgcgttctgtgttgtggcggccctggatccggcgtcagggcgaccgggcggacgaggtggagccagagtctgtcaggcgggttggtgaagggcgcggggccgggcacggcgttgggagtgcgcggcagggaccggccaggcgggctgcaggcacctcagagcccgggacaccccctcaacgtccgcaggcgcgatgaaggcactgatcttagtggggggctatgggacgcggctacggccgctgacgctgagcaccccgaagccactggtggacttctgcaataagcccatcttgctgcaccaagtggaggcgctagccgcggcaggcgtggaccacgtgatcctggccgtgagctacatgtcgcaggtgctggagaaggaaatgaaggcacaggagcagaggctgggaatccgaatctccatgtcccatgaagaggagcctttggggacagctgggcccctggcgctggcccgtgacctactctctgagactgcagaccctttcttcgtcctcaacagtgacgtgatctgcgatttccccttccaagccatggtgcagttccaccggcaccatggccaggagggctccatcctggtgaccaaggtggaggaaccctccaagtacggtgtggtggtgtgtgaggctgacacaggccgcattcaccggttcgtggagaagccacaggtgtttgtgtccaataagatcaacgcaggcatgtacatcctgagccctgcagtgctgcagcgcatccagctgcagcctacgtccattgagaaggaggtcttccccattatggccaaggaggggcagctatatgccatggagttacagggcttctggatggacattgggcagcccaaggacttcctcactggcatgtgcctcttcctgcagtcactgaggcagaagcagcctgagcggctgtgctcaggccctggcattgtgggcaacgtgctggtggacccaagtgcccgcatcggccagaactgcagcattggccccaatgtgagcctgggacctggcgtggtggtcgaagatggtgtgtgtatccggcggtgcacggtgctgcgggatgcccggatccgttcccattcctggcttgagtcctgcattgtgggctggcgctgccgcgtgggtcagtgggtaagcctgtgggctgggctgggtggggagaggggcggggagtgtgcctgcctccctgacaaggcctatcctctcctggaggtacgcatggagaacgtgacagtgctgggtgaggacgtcatagttaatgatgagctctacctcaacggagccagcgtgctgccccacaagtctattggcgagtcagtgccagagcctcgtatcatcatgtgaggggatgcagtggggctggccgagccccggttttcccatcagcaaggggagtgctggcctgacacatcagaagaccctggacttgtcattatttgtctggggggcactgggtgaagctgaagctgttggacacctgccttctcatgtggacatcatctggcaggatccctgctgggcacaccccacaaaccccactccctcaagaagggccagggccagggctgtatggaataataatttaatgctcactgtggccctgactgaaagtcaagctcaggcacaattagggccatggctgggctcccaccaatgaggatacaggcaggcaaggaggttggatgtggtggtgtgggatacaggagaagggcaaagggagctcataaatagggcccagcctggctctgggttcaaaggtggaggttccaggatggcacaggctgtgagggctaggcagctgaggaggtagtactcgtattggctcccttctcccagtcctctacagacacgatggtggttttgcagaagaagcagtccttgttgttcatcaggtgctggttgatacaggctctacaacaggggaggggatgaggactgccctgcatgtacctactgctctccccaccaccaagctgtggggcccacttacttgcaggacttgtggccacagggctggaacacagcagagatggggtgggcatagcagatggggcagaggtcctcctcactggtgggctgcagggaggagagtgaagggtgggctggagttggatgcctggctatgtggatgtccgttgtgcctgtgtaggagtgcacacatattcaagtggcatggacctgtgcaccgtgttcccactcaccagggaggcagctgctgcctgggcagatgcagaggtcaggtgcgccagcatctgttccacttgggccagctcatcggcactgatataatccgcatctggggagtggtaggtagtgtcaagtcagaggtagctgaggatgtgatgcctcttgaatattcccagcctaggactttgctgttcttaaggctcctgacccgacccagccccagatttccctgacctgccccaccagcccactcacagctctgcagggagaagcgcttccggtcaggggctggcagagcagtgccaggtgctgggggctctggctgtcccaggagatagcatattgagcgtagctggaagcagggatctgccaggagcactgatgtggcttgctctctcctaggtaggggagggtgcaagggcagtcagaaggcttggggcctggctaaaagtctctcttgggattgccaatgaggagtgccatggctcgtacatgatcaccccccctgcatcctttccgtctccctgcttcccaaaccccaagtcctgtattctagtaaggtgccacacagcctgttttttttttttttttcttgagacgagtctcgctctgttgcccaggctggagtgcgatggcacgatctcggctcactgcaacctccacctcccgggttcaagtgattctcctgctttagcctcccgagtagctggaattgcagacgcccaccaccacgcccggctaattgttgtatttttagtagagacagggtttcaccaggttggccaggctggtctcgaattcctgacctcaggtgatccacctgccttggcttcccaaagtgctgggattacaggcgtgagccaccgcgcccggcctggggtaccactttaagaaggctcaggcgaaccaccttaagatagtgagagtctgcctgccccataatattatcagtccttcaaagtcacttcaaataaacactaacagc

SEQ ID NO: 175655 - DNA, 1164 bp, Artificial Sequence
  derived and/or modified sequence
atgaaggccctgatcctggtgggcggctacggcacccggctgcggcctctgaccttgagtaccccaaagcccttagtcgatttctgtaacaagccaattctcctccaccaagtggaggcattggcagccgccggagtggaccatgtcatcctcgcagtctcctatatgtcccaggtattagagaaggaaatgaaagcacaggaacagcgcctcgggatcagaatcagcatgagccatgaggaggaaccacttggtactgcaggacccctggccctcgccagggacctgctgtccgaaaccgcagaccccttttttgtcctgaactcagatgtgatctgtgactttccttttcaggccatggtgcaattccatagacaccatggccaggaggggagcattcttgtcactaaagtggaggaaccatccaaatacggcgtggtcgtttgtgaggccgacactggcaggatccacagattcgtggagaaaccccaggtctttgtgtcaaataaaatcaacgccgggatgtacatattatcccccgccgtgctgcagcgaatccagctccagcctaccagcatcgaaaaagaggtcttcccgattatggcaaaagaaggacaactctacgcaatggagctacagggcttctggatggatatagggcaaccgaaagacttccttaccggcatgtgcctctttctgcaatccctacgccagaaacagcccgaacgtctctgcagcggtcctggcatcgtcggtaacgtgctcgtcgatccaagtgcacggatcgggcaaaactgctccattgggccaaacgtctccttggggcccggcgtggtggtggaggacggagtctgcatacggagatgcacagtcttgcgcgacgctcgtatcagaagtcactcctggctggaatcctgtatcgtaggctggagatgccgcgttgggcaatgggtgtcactgtgggccggcctcggcggcgagcgtggcggagagtgcgcttgtctccccgataaagcctaccctctgcttgaagtcaggatggaaaatgtaaccgtgctcggcgaggatgtcattgtgaatgacgagttgtatctcaatggcgcgtccgtgctgccgcataaaagtatcggtgagtccgtccccgagcctagaattatcatgtag

SEQ ID NO: 175656 - DNA, 1164 bp, Artificial Sequence
  derived and/or modified sequence
atgaaggcactcattctcgtgggcggttatgggactagactgagacccctcaccctcagcacaccgaaacccctcgtggatttttgtaataagcccattttgctccatcaggtcgaagccctggcagccgctggtgttgatcacgtaatactggctgtaagttacatgagccaggtcttggagaaggaaatgaaggcccaggaacaaaggctgggaattcgcatctcaatgtcacatgaggaggagcctctggggacagcgggacctctggcccttgcgcgagatttgctgagtgagaccgccgatcccttcttcgtgctcaactccgacgtcatttgcgattttccgtttcaagctatggttcagttccatcgccatcacggacaggagggcagcattctggttactaaagttgaggagccctcaaagtatggcgtcgttgtgtgtgaggccgacacgggccgtattcacaggttcgtggagaagccccaagtgttcgtcagtaataagattaacgccggtatgtacattctctcccccgcagtgctccagaggattcagctgcagcctacaagcatagaaaaagaagtgtttcctattatggccaaggaggggcaactgtacgccatggagctgcaagggttttggatggacatagggcagccgaaagacttcctgactggcatgtgtctgttcttacagagcctgagacagaagcagccggagcgactgtgctccggacccggtatcgtgggcaacgtgctggtggatccctccgctcgaataggccagaactgctccattggccctaacgtgtccttgggacccggagtcgttgttgaagatggagtgtgtatccggagatgcacagtactgcgggacgcaagaatacgctctcatagctggttagaatcatgtatcgttggatggcggtgtcgtgtggggcagtgggttagcctttgggcgggactgggaggagaacgagggggtgaatgcgcgtgtctgcccgataaagcgtaccccctgttggaagtgcggatggagaacgtgacagtccttggggaagatgtgatcgtaaacgatgagctctacctgaacggcgcatctgtactgccgcacaagtcgattggcgaatccgtcccagaacctcgcatcattatgtag

SEQ ID NO: 175657 - protein, 476 aa, Artificial Sequence
  derived and/or modified sequence
MAIKFLEVIKPFCVILPEIQKPERKIQFKEKVLWTAITLFIFLVCCQIPLFGIMSSDSADPFYWMRVILASNRGTLMELGISPIVTSGLIMQLLAGAKIIEVGDTPKDRALFNGAQKLFGMIITIGQSIVYVMTGMYGDPSEMGAGICLLITIQLFVAGLIVLLLDELLQKGYGLGSGISLFIATNICETIVWKAFSPTTVNTGRGMEFEGAIIALFHLLATRTDKVRALREAFYRQNLPNLMNLIATIFVFAVVIYFQGFRVDLPIKSARYRGQYNTYPIKLFYTSNIPIILQSALVSNLYVISQMLSARFSGNLLVSLLGTWSDTSSGGPARAYPVGGLCYYLSPPESFGSVLEDPVHAVVYIVFMLGSCAFFSKTWIEVSGSSAKDVAKQLKEQQMVMRGHRETSMVHELNRYIPTAAAFGGLCIGALSVLADFLGAIGSGTGILLAVTIIYQYFEIFVKEQSEVGSMGALLF

SEQ ID NO: 175658 - protein, 356 aa, Artificial Sequence
  derived and/or modified sequence
MIITIGQSIVYVMTGMYGDPSEMGAGICLLITIQLFVAGLIVLLLDELLQKGYGLGSGISLFIATNICETIVWKAFSPTTVNTGRGMEFEGAIIALFHLLATRTDKVRALREAFYRQNLPNLMNLIATIFVFAVVIYFQGFRVDLPIKSARYRGQYNTYPIKLFYTSNIPIILQSALVSNLYVISQMLSARFSGNLLVSLLGTWSDTSSGGPARAYPVGGLCYYLSPPESFGSVLEDPVHAVVYIVFMLGSCAFFSKTWIEVSGSSAKDVAKQLKEQQMVMRGHRETSMVHELNRYIPTAAAFGGLCIGALSVLADFLGAIGSGTGILLAVTIIYQYFEIFVKEQSEVGSMGALLF

SEQ ID NO: 175659 - protein, 482 aa, Artificial Sequence
  derived and/or modified sequence
MTQTARVLVKFLEVIKPFCVILPEIQKPERKIQFKEKVLWTAITLFIFLVCCQIPLFGIMSSDSADPFYWMRVILASNRGTLMELGISPIVTSGLIMQLLAGAKIIEVGDTPKDRALFNGAQKLFGMIITIGQSIVYVMTGMYGDPSEMGAGICLLITIQLFVAGLIVLLLDELLQKGYGLGSGISLFIATNICETIVWKAFSPTTVNTGRGMEFEGAIIALFHLLATRTDKVRALREAFYRQNLPNLMNLIATIFVFAVVIYFQGFRVDLPIKSARYRGQYNTYPIKLFYTSNIPIILQSALVSNLYVISQMLSARFSGNLLVSLLGTWSDTSSGGPARAYPVGGLCYYLSPPESFGSVLEDPVHAVVYIVFMLGSCAFFSKTWIEVSGSSAKDVAKQLKEQQMVMRGHRETSMVHELNRYIPTAAAFGGLCIGALSVLADFLGAIGSGTGILLAVTIIYQYFEIFVKEQSEVGSMGALLF

SEQ ID NO: 175660 - DNA, 1431 bp, Artificial Sequence
  derived and/or modified sequence
atggccatcaagttcctggaggtgatcaagcccttctgcgtgatcctgcccgagatccagaagcccgagagaaagatccagttcaaggagaaggtgctgtggaccgccatcaccctgttcatcttcctggtgtgctgccagatccccctgttcggcatcatgagcagcgacagcgccgaccccttctactggatgagagtgatcctggccagcaacagaggcaccctgatggagctgggcatcagccccatcgtgaccagcggcctgatcatgcagctgctggccggcgccaagatcatcgaggtgggcgacacccccaaggacagagccctgttcaacggcgcccagaagctgttcggcatgatcatcaccatcggccagagcatcgtgtacgtgatgaccggcatgtacggcgaccccagcgagatgggcgccggcatctgcctgctgatcaccatccagctgttcgtggccggcctgatcgtgctgctgctggacgagctgctgcagaagggctacggcctgggcagcggcatcagcctgttcatcgccaccaacatctgcgagaccatcgtgtggaaggccttcagccccaccaccgtgaacaccggcagaggcatggagttcgagggcgccatcatcgccctgttccacctgctggccaccagaaccgacaaggtgagagccctgagagaggccttctacagacagaacctgcccaacctgatgaacctgatcgccaccatcttcgtgttcgccgtggtgatctacttccagggcttcagagtggacctgcccatcaagagcgccagatacagaggccagtacaacacctaccccatcaagctgttctacaccagcaacatccccatcatcctgcagagcgccctggtgagcaacctgtacgtgatcagccagatgctgagcgccagattcagcggcaacctgctggtgagcctgctgggcacctggagcgacaccagcagcggcggccccgccagagcctaccccgtgggcggcctgtgctactacctgagcccccccgagagcttcggcagcgtgctggaggaccccgtgcacgccgtggtgtacatcgtgttcatgctgggcagctgcgccttcttcagcaagacctggatcgaggtgagcggcagcagcgccaaggacgtggccaagcagctgaaggagcagcagatggtgatgagaggccacagagagaccagcatggtgcacgagctgaacagatacatccccaccgccgccgccttcggcggcctgtgcatcggcgccctgagcgtgctggccgacttcctgggcgccatcggcagcggcaccggcatcctgctggccgtgaccatcatctaccagtacttcgagatcttcgtgaaggagcagagcgaggtgggcagcatgggcgccctgctgttctag

SEQ ID NO: 175661 - DNA, 1071 bp, Artificial Sequence
  derived and/or modified sequence
atgatcatcaccatcggccagagcatcgtgtacgtgatgaccggcatgtacggcgaccccagcgagatgggcgccggcatctgcctgctgatcaccatccagctgttcgtggccggcctgatcgtgctgctgctggacgagctgctgcagaagggctacggcctgggcagcggcatcagcctgttcatcgccaccaacatctgcgagaccatcgtgtggaaggccttcagccccaccaccgtgaacaccggcagaggcatggagttcgagggcgccatcatcgccctgttccacctgctggccaccagaaccgacaaggtgagagccctgagagaggccttctacagacagaacctgcccaacctgatgaacctgatcgccaccatcttcgtgttcgccgtggtgatctacttccagggcttcagagtggacctgcccatcaagagcgccagatacagaggccagtacaacacctaccccatcaagctgttctacaccagcaacatccccatcatcctgcagagcgccctggtgagcaacctgtacgtgatcagccagatgctgagcgccagattcagcggcaacctgctggtgagcctgctgggcacctggagcgacaccagcagcggcggccccgccagagcctaccccgtgggcggcctgtgctactacctgagcccccccgagagcttcggcagcgtgctggaggaccccgtgcacgccgtggtgtacatcgtgttcatgctgggcagctgcgccttcttcagcaagacctggatcgaggtgagcggcagcagcgccaaggacgtggccaagcagctgaaggagcagcagatggtgatgagaggccacagagagaccagcatggtgcacgagctgaacagatacatccccaccgccgccgccttcggcggcctgtgcatcggcgccctgagcgtgctggccgacttcctgggcgccatcggcagcggcaccggcatcctgctggccgtgaccatcatctaccagtacttcgagatcttcgtgaaggagcagagcgaggtgggcagcatgggcgccctgctgttctag

SEQ ID NO: 175662 - DNA, 1449 bp, Artificial Sequence
  derived and/or modified sequence
atgacccagaccgccagagtgctggtgaagttcctggaggtgatcaagcccttctgcgtgatcctgcccgagatccagaagcccgagagaaagatccagttcaaggagaaggtgctgtggaccgccatcaccctgttcatcttcctggtgtgctgccagatccccctgttcggcatcatgagcagcgacagcgccgaccccttctactggatgagagtgatcctggccagcaacagaggcaccctgatggagctgggcatcagccccatcgtgaccagcggcctgatcatgcagctgctggccggcgccaagatcatcgaggtgggcgacacccccaaggacagagccctgttcaacggcgcccagaagctgttcggcatgatcatcaccatcggccagagcatcgtgtacgtgatgaccggcatgtacggcgaccccagcgagatgggcgccggcatctgcctgctgatcaccatccagctgttcgtggccggcctgatcgtgctgctgctggacgagctgctgcagaagggctacggcctgggcagcggcatcagcctgttcatcgccaccaacatctgcgagaccatcgtgtggaaggccttcagccccaccaccgtgaacaccggcagaggcatggagttcgagggcgccatcatcgccctgttccacctgctggccaccagaaccgacaaggtgagagccctgagagaggccttctacagacagaacctgcccaacctgatgaacctgatcgccaccatcttcgtgttcgccgtggtgatctacttccagggcttcagagtggacctgcccatcaagagcgccagatacagaggccagtacaacacctaccccatcaagctgttctacaccagcaacatccccatcatcctgcagagcgccctggtgagcaacctgtacgtgatcagccagatgctgagcgccagattcagcggcaacctgctggtgagcctgctgggcacctggagcgacaccagcagcggcggccccgccagagcctaccccgtgggcggcctgtgctactacctgagcccccccgagagcttcggcagcgtgctggaggaccccgtgcacgccgtggtgtacatcgtgttcatgctgggcagctgcgccttcttcagcaagacctggatcgaggtgagcggcagcagcgccaaggacgtggccaagcagctgaaggagcagcagatggtgatgagaggccacagagagaccagcatggtgcacgagctgaacagatacatccccaccgccgccgccttcggcggcctgtgcatcggcgccctgagcgtgctggccgacttcctgggcgccatcggcagcggcaccggcatcctgctggccgtgaccatcatctaccagtacttcgagatcttcgtgaaggagcagagcgaggtgggcagcatgggcgccctgctgttctag

SEQ ID NO: 175663 - DNA, 1431 bp, Artificial Sequence
  derived and/or modified sequence
atggccatcaaatttctggaagtgatcaagcccttctgcgtgattctgccagagattcagaaaccggaacgcaaaattcagttcaaagaaaaggttctttggactgctattacattattcatttttttagtctgttgccaaatacctctctttgggataatgtctagtgactccgccgatcccttttactggatgcgcgtaattctcgccagcaacagaggcaccctcatggaactgggaatcagtccaatagttacttccgggcttatcatgcaactgctggccggtgctaaaatcatcgaggtaggcgataccccgaaggaccgcgccctgtttaatggagctcagaagctcttcggaatgatcatcaccatcggccaaagcatcgtttacgtgatgactgggatgtatggagatccctccgagatgggagctggcatatgtctgcttatcacgattcaattgtttgtggctgggctgatagtccttctgctagacgagcttctgcagaaaggctatggactgggcagcggcatatccctgtttattgcaaccaatatctgcgagactatagtgtggaaggcattctcacccaccactgtcaacactggtcgcggaatggagtttgaaggggcgattatcgctctctttcatctcctggctacccgcactgacaaagtgcgcgctcttagagaggcattctaccgtcaaaatctacctaatctgatgaacctcatcgccactatattcgtttttgccgtagtcatatacttccaaggctttcgggtcgatcttcccatcaaatcagctcgctaccggggccagtacaatacataccccatcaagctcttttacacatccaacatacccatcatcttgcagtccgccttagtaagtaacctgtatgtaatttctcaaatgctgagcgctcggttctcaggcaatctgcttgtctcattactgggaacgtggagtgataccagtagtggtggccctgcccgagcctacccggtcggaggactgtgctactatctgtctccccccgagagtttcggctccgttctcgaggacccagtccacgccgtcgtttacattgtctttatgttgggcagctgcgcctttttctccaaaacctggatcgaagttagcggtagctctgccaaagacgtcgccaagcaactgaaggagcaacagatggtaatgcgtggacacagggaaacatccatggtccatgaactaaaccgctacatccctaccgccgcggcttttggaggactatgtataggcgccctgagtgtgctcgccgatttcttgggcgcaataggaagcggcactggaatcctgctggccgtgacaataatttaccagtatttcgaaattttcgtgaaggaacaaagcgaggttggcagcatgggtgccctcttgttttag

SEQ ID NO: 175664 - DNA, 1071 bp, Artificial Sequence
  derived and/or modified sequence
atgatcatcactattggacagagtatagtatacgtcatgacaggcatgtatggggacccatccgaaatgggcgccggcatctgtctgctcatcacaatccagctgtttgttgctggactgatcgtcctgcttctggacgagctgctgcagaagggttatggtctggggtcagggatctcgctgtttatagccaccaacatctgcgagacaattgtttggaaggcgttttctccaaccacagtcaacacaggccgaggcatggaattcgaaggcgccattattgcgctctttcatctgttagcaacaaggaccgacaaggtgcgggcactccgggaagcattttaccgccaaaaccttccaaacctaatgaatctaatcgcaaccatatttgttttcgccgtggtgatttatttccagggattcagggtagatctgcccatcaaaagcgccaggtaccgcgggcagtataacacctatcctattaagttattttatacctcaaacatcccgatcatcctccaatcagcgctggttagcaacctttacgtgatttcccagatgctctcggcacgcttctccgggaacttactagttagtttactcggcacatggagcgacaccagttctggcggcccagctcgggcttatcccgtgggagggctgtgctactacctatctcctccagaaagtttcgggtctgttctggaagaccccgtacatgccgtagtgtacatcgttttcatgttgggttcatgtgctttcttctctaaaacctggattgaagtttcaggatcatccgccaaggacgtggccaagcaacttaaagaacaacagatggtcatgagaggacaccgcgagacctctatggttcatgaattgaaccgctatattcccactgccgcggcttttggggggctttgtattggggcactgagtgtgctggccgacttccttggcgccatcggttcgggtacggggatcttactagcagtgactataatctaccaatattttgagatcttcgtaaaggagcagtccgaggttgggagcatgggagcactgctgttttag

SEQ ID NO: 175665 - DNA, 1449 bp, Artificial Sequence
  derived and/or modified sequence
atgacccagacagctagagtgttagtgaagtttctggaagtaataaagcccttttgcgtgattctgccggagatacagaaaccggagcgtaagattcagttcaaagaaaaagtactttggacggcaatcaccctgttcatattcctggtgtgctgccagatacctttgttcgggatcatgagcagtgactccgccgacccattctactggatgcgggtcatccttgctagcaacaggggtaccctcatggagctaggcatttcgcccatcgtcaccagtgggctgatcatgcaacttctggccggcgccaaaatcatagaggtgggcgacacacctaaagatcgtgctcttttcaatggtgctcagaaactttttgggatgatcattacaattggacagagtatcgtgtacgtgatgacgggcatgtacggcgatccctccgagatgggcgcagggatctgtctgctcatcactatccagcttttcgtggctggcttgatcgtcctcctgctcgacgaactcctgcaaaaaggatacggattggggtctggtatttccctttttatcgctaccaatatctgcgagaccatcgtatggaaggccttctcccccacaaccgtgaatacaggcaggggaatggagttcgaaggcgctattatcgcccttttccacttgctggctacccgcacggataaagttcgagccctgcgagaagcattttaccgtcagaatctgcctaatctaatgaatctaattgctactattttcgtgtttgcagttgtgatttactttcaaggttttagggtggacctgccgatcaagagcgccagatacagaggccaatataacacttacccaatcaagttattttacacctcaaacatccccataatcctgcagagcgcactcgtgtccaacctgtacgtgatctcacagatgctcagtgcccgattcagcggaaacttactggtcagcctcctgggaacatggagcgacactagcagtggtggccctgctcgagcctatcccgtgggaggcttgtgctactatcttagccctccagagtcatttggatctgtattagaagacccagtgcacgcagtcgtgtacattgtttttatgctgggctcatgcgcatttttcagcaagacctggattgaggtcagtggatcttccgccaaagacgttgccaaacagctgaaagaacagcagatggtgatgaggggacacagagagacctctatggtccacgagcttaaccgctacattccaaccgctgcggcttttggtggcctatgcataggggccctctcggttctggccgattttttgggcgctattgggagcgggactggcattctgctggcagtcacaatcatctaccagtatttcgagatttttgtgaaggagcaatcagaagtaggaagcatgggggcactgctgttttag

SEQ ID NO: 175666 - DNA, 1431 bp, Artificial Sequence
  derived and/or modified sequence
atggccatcaagttcctggaggtgatcaagcccttctgtgtgatcctgcctgagatccagaagccagagaggaagatccagttcaaggagaaggtgctgtggacagccatcaccctcttcatcttcctggtgtgctgccagatccccctgtttggcatcatgagcagtgacagcgctgaccccttctactggatgagggtcatcctggccagcaacagaggcaccctgatggagctgggcatcagccccatcgtgaccagcggcctcatcatgcagctgctggccggggccaagatcatcgaggtgggggacacccccaaggaccgggccctcttcaatggagcccagaagctgtttggcatgatcatcaccatcggccagagcatcgtgtatgtgatgacaggcatgtatggagaccccagcgagatgggcgccggcatctgcctgctgatcaccatccagctgtttgtggccggcctgattgtgctgctgctggatgagctgctgcagaagggctacggcctgggcagcggcatcagcctcttcatcgccaccaacatctgtgagaccatcgtgtggaaggccttcagccccaccaccgtgaacacaggccggggcatggagtttgaaggagccatcatcgccctcttccacctgctggccaccaggacagacaaggtgcgggccctgcgggaggccttctaccggcagaacctgcccaacctgatgaacctgattgccaccatctttgtgtttgctgtggtgatctacttccagggcttccgggtggacctgcccatcaagagcgcccgctaccggggccagtacaacacctaccccatcaagctgttctacaccagcaacatccccatcatcctgcagagcgccctggtgagcaacctgtatgtgatcagccagatgctgagcgcccgcttcagcggcaacctgctggtgtccctgctgggcacctggagcgacaccagcagcggcggccctgcccgggcctaccctgtgggcggcctgtgctactacctgagccccccagagagctttggatctgtgctggaggaccctgtgcatgctgtggtgtacatcgtgttcatgctgggcagctgtgccttcttcagcaagacctggattgaggtgtctggcagcagcgccaaggatgtggccaagcagctgaaggagcagcagatggtgatgaggggccaccgggagacctccatggtgcatgagctgaaccgctacatccccacagctgctgcctttggaggcctgtgcatcggggccctgtctgtgctggccgacttcctgggcgccatcggcagcggcaccggcatcctgctggccgtgaccatcatctaccagtactttgagatctttgtgaaggagcagagcgaggtgggctccatgggcgccctgctcttctag

SEQ ID NO: 175667 - DNA, 1071 bp, Artificial Sequence
  derived and/or modified sequence
atgatcatcaccatcggccagagcatcgtgtatgtgatgacaggcatgtatggagaccccagcgagatgggcgccggcatctgcctgctgatcaccatccagctgtttgtggccggcctgattgtgctgctgctggatgagctgctgcagaagggctacggcctgggcagcggcatcagcctcttcatcgccaccaacatctgtgagaccatcgtgtggaaggccttcagccccaccaccgtgaacacaggccggggcatggagtttgaaggagccatcatcgccctcttccacctgctggccaccaggacagacaaggtgcgggccctgcgggaggccttctaccggcagaacctgcccaacctgatgaacctgattgccaccatctttgtgtttgctgtggtgatctacttccagggcttccgggtggacctgcccatcaagagcgcccgctaccggggccagtacaacacctaccccatcaagctgttctacaccagcaacatccccatcatcctgcagagcgccctggtgagcaacctgtatgtgatcagccagatgctgagcgcccgcttcagcggcaacctgctggtgtccctgctgggcacctggagcgacaccagcagcggcggccctgcccgggcctaccctgtgggcggcctgtgctactacctgagccccccagagagctttggatctgtgctggaggaccctgtgcatgctgtggtgtacatcgtgttcatgctgggcagctgtgccttcttcagcaagacctggattgaggtgtctggcagcagcgccaaggatgtggccaagcagctgaaggagcagcagatggtgatgaggggccaccgggagacctccatggtgcatgagctgaaccgctacatccccacagctgctgcctttggaggcctgtgcatcggggccctgtctgtgctggccgacttcctgggcgccatcggcagcggcaccggcatcctgctggccgtgaccatcatctaccagtactttgagatctttgtgaaggagcagagcgaggtgggctccatgggcgccctgctcttctag

SEQ ID NO: 175668 - DNA, 1449 bp, Artificial Sequence
  derived and/or modified sequence
atgacccagacagcccgggtgctggtgaagttcctggaggtgatcaagcccttctgtgtgatcctgcctgagatccagaagccagagaggaagatccagttcaaggagaaggtgctgtggacagccatcaccctcttcatcttcctggtgtgctgccagatccccctgtttggcatcatgagcagtgacagcgctgaccccttctactggatgagggtcatcctggccagcaacagaggcaccctgatggagctgggcatcagccccatcgtgaccagcggcctcatcatgcagctgctggccggggccaagatcatcgaggtgggggacacccccaaggaccgggccctcttcaatggagcccagaagctgtttggcatgatcatcaccatcggccagagcatcgtgtatgtgatgacaggcatgtatggagaccccagcgagatgggcgccggcatctgcctgctgatcaccatccagctgtttgtggccggcctgattgtgctgctgctggatgagctgctgcagaagggctacggcctgggcagcggcatcagcctcttcatcgccaccaacatctgtgagaccatcgtgtggaaggccttcagccccaccaccgtgaacacaggccggggcatggagtttgaaggagccatcatcgccctcttccacctgctggccaccaggacagacaaggtgcgggccctgcgggaggccttctaccggcagaacctgcccaacctgatgaacctgattgccaccatctttgtgtttgctgtggtgatctacttccagggcttccgggtggacctgcccatcaagagcgcccgctaccggggccagtacaacacctaccccatcaagctgttctacaccagcaacatccccatcatcctgcagagcgccctggtgagcaacctgtatgtgatcagccagatgctgagcgcccgcttcagcggcaacctgctggtgtccctgctgggcacctggagcgacaccagcagcggcggccctgcccgggcctaccctgtgggcggcctgtgctactacctgagccccccagagagctttggatctgtgctggaggaccctgtgcatgctgtggtgtacatcgtgttcatgctgggcagctgtgccttcttcagcaagacctggattgaggtgtctggcagcagcgccaaggatgtggccaagcagctgaaggagcagcagatggtgatgaggggccaccgggagacctccatggtgcatgagctgaaccgctacatccccacagctgctgcctttggaggcctgtgcatcggggccctgtctgtgctggccgacttcctgggcgccatcggcagcggcaccggcatcctgctggccgtgaccatcatctaccagtactttgagatctttgtgaaggagcagagcgaggtgggctccatgggcgccctgctcttctag

SEQ ID NO: 175669 - DNA, 1431 bp, Artificial Sequence
  derived and/or modified sequence
atggccatcaagttcctggaggtgatcaagcccttctgcgtgatcctgccagaaattcagaaacccgaacgaaaaatccagtttaaagagaaagttctgtggaccgctatcacattgttcatctttctggtgtgttgtcagatacccctgtttggaattatgtcatcagatagtgccgatcccttctactggatgcgagttatcctggccagtaaccggggcaccctcatggaattaggtatctctcccatcgtgacaagcgggctgatcatgcaacttctggctggcgcgaagattatcgaggttggcgacacccctaaagatcgggccttatttaacggcgctcagaagttattcggcatgatcataacgatagggcagtcaatcgtatatgtgatgacagggatgtacggtgatccttccgaaatgggtgccggaatctgtctccttatcactatacagctgttcgtggccggcctaatcgtgctgctccttgatgaacttctgcagaaggggtacgggctgggaagtgggattagcctatttattgcaaccaacatttgcgagaccatagtgtggaaagcctttagcccgacaactgtcaacacgggcaggggcatggaattcgagggtgcaattatcgcactgttccaccttttggcgactcgtaccgacaaagtaagggctctccgtgaggcattttatcgtcagaacctgcctaacctgatgaacctcatcgccactatcttcgtatttgccgtggtgatatattttcaggggttcagagtggacctgccaattaagtctgcacgatatcggggccaatacaatacctaccctattaaattattctacacaagcaacatccccattatccttcagtccgccctggtcagcaacctctacgtcatatctcagatgcttagcgcacggttttctggaaacctgttagtatctctcctgggtacttggagcgacacgagttccggtggcccggcaagagcctaccccgtgggcgggctgtgctattacctatccccaccagaatccttcggttccgtcctggaagaccccgtgcatgcagtcgtgtatatcgtgtttatgctgggaagttgcgcattttttagtaagacatggatcgaggtctccggctcatccgccaaagatgtcgcaaagcagctgaaagaacagcagatggttatgcgaggccatcgtgagaccagcatggtacacgaactcaaccggtacatccccacagcagctgctttcggggggctgtgtatcggagcactgagcgtgctggctgactttctgggggccatcgggagcgggaccggcatccttctggccgtgactatcatttatcaatatttcgaaatcttcgtcaaggagcagtcagaagtcggcagcatgggcgcactcttattctag

SEQ ID NO: 175670 - DNA, 1071 bp, Artificial Sequence
  derived and/or modified sequence
atgatcatcaccatcggccagagcatcgtgtacgtgatgaccggcatgtatggagatcccagcgaaatgggagccgggatttgccttcttatcacaatccagttattcgtagcggggcttattgtattgctgctcgatgaactgctccagaaaggctacgggctgggcagcggaatttctttgttcattgccacaaatatctgtgagaccatagtctggaaggccttctccccaacaaccgttaacacgggcaggggcatggaatttgaaggagctatcatcgcactgttccacctgctagctacgaggactgacaaagtgcgtgccctccgagaagcgttctaccgtcagaacttgccaaatttaatgaaccttatagctaccatcttcgtcttcgctgtggtcatatatttccaaggatttagagtagacctgcctatcaagagcgcccgatatcgggggcagtataatacctatcctatcaaattattttataccagcaacatccccatcattcttcagtctgcactcgtctctaatctttatgtgatttctcaaatgctgtccgctcggtttagtggcaacctcctggtgtccctcctggggacgtggtcagatacctctagcggcggacctgcacgggcttaccccgttggggggttgtgctactatctgagtcctcctgagagttttggttcagtcctggaggatccagtgcacgccgttgtttatattgtgtttatgctcgggagctgtgcatttttctctaagacttggatcgaggtgtccgggagctccgcgaaggatgtggcaaaacagctgaaagagcagcagatggttatgagaggacacagagaaacctcaatggtccatgagctaaatcgctacatacccacagccgcagcttttgggggcctgtgtattggggctctgagtgtgcttgctgacttcttgggggctattggctccggcactgggatcctcttggctgtcactattatttaccagtattttgaaattttcgtgaaggaacagtctgaagttgggtctatgggagctctgctgttctag

SEQ ID NO: 175671 - DNA, 1449 bp, Artificial Sequence
  derived and/or modified sequence
atgacccagaccgcccgggtgctggtgaagttcctggaggtgatcaagccattttgtgtgatccttcctgagatccaaaaaccagaaagaaagatacagtttaaggagaaagtgctttggaccgcaatcaccctgtttattttccttgtgtgttgtcagataccactgtttgggatcatgtcgtctgactctgctgaccccttctactggatgagggtgatcctcgcatcaaatcgggggacactcatggagctggggatctcacctattgtgaccagcggcctgatcatgcaactactggccggcgccaaaataattgaggtgggcgatacccccaaggacagggcactctttaatggggcgcagaagctgtttggcatgatcatcaccattggccagagcattgtctacgttatgacaggcatgtatggagaccccagcgagatgggagctggcatatgccttttaattaccattcaattattcgtggccggactcatcgttctgcttctagatgagctgctgcagaagggctatggactcggtagtggcatctccctgtttattgcaacaaacatatgcgaaaccatcgtgtggaaggcattctcgcctactactgtgaacactggaaggggcatggagtttgaaggagccataattgctctgttccacctgctcgccacgagaaccgataaggttagggccctaagagaggctttctaccggcagaacctgccaaacctgatgaatctcattgctacgatctttgtattcgccgttgtcatctattttcagggattccgagtggacctgccaattaaatccgcccgataccgagggcaatataacacctaccctataaaactcttctacacctcgaacattccgatcatcctgcagagtgccctcgtgagtaacctgtacgtaatcagccagatgctcagcgctagattcagcggcaacttgctggtcagccttcttggaacgtggtccgataccagctccggaggccctgcccgtgcttaccctgtgggaggcctgtgctattatctgtcaccccccgaaagcttcggctccgtgttggaggatccagttcatgccgtggtctacatcgtattcatgctcggtagctgtgccttttttagcaagacttggattgaggtgagtggaagcagcgcgaaggatgtggccaaacagctgaaggaacaacaaatggtgatgcggggccaccgtgagacctctatggtgcacgagcttaatcgatatattcccaccgctgccgcttttggcggcttgtgcattggcgcactgtctgtcctcgcggactttctgggcgctattgggagtgggacaggcattctcttagccgtgaccatcatttaccagtactttgagatttttgttaaggagcaatctgaagtagggtctatgggcgcactgttgttttag

SEQ ID NO: 175672 - DNA, 1431 bp, Artificial Sequence
  derived and/or modified sequence
atggcaataaagtttctggaagtgatcaagcccttttgcgtgatcctgccggagatacagaaaccagaacgaaagatacagtttaaagagaaggtgctgtggaccgctatcactttatttatttttcttgtatgctgtcagatccccctatttggaataatgagttccgactcagcagaccccttttactggatgcgagtgatcttggcctcaaaccggggaaccctaatggagctgggcatctctccgattgtcacgagtggcctgattatgcagttgctcgcgggtgctaagattatcgaggtcggcgacacaccgaaggacagggccttgttcaatggagcccaaaaactattcgggatgattatcaccatcggtcaaagcattgtctacgtgatgacaggcatgtatggggacccttccgagatgggcgctgggatttgtttgctaattactatccagctgtttgtggccggacttattgtgctccttctggacgaactgctgcagaagggctatggcttgggaagtggaatcagtctctttatcgcaactaatatatgtgaaaccatcgtctggaaggctttttcaccaacaactgtaaacaccggtcgcggaatggagtttgaaggagcaatcatcgcactgtttcatctactggctacccggaccgacaaggtgagggccctcagagaagcattttatagacaaaacttgcccaacctgatgaatctcatcgccaccatctttgtctttgccgttgtgatctactttcaaggatttagagtggacttgcccattaaaagcgcacgctaccgaggccaatacaatacgtatccgattaagcttttctacactagcaatatacctattatcttacagagcgcgctggtgtctaacttgtatgttatcagccagatgctgagcgctcgattctcaggaaacctcttggtgagccttctcggcacttggtctgacaccagttctggcggtcccgctcgtgcctatccggtgggcggactgtgttattacctttcaccacccgagtcatttgggtccgtcctggaggatcctgtgcacgctgtggtgtatatcgtgttcatgttaggaagctgcgcattcttctcgaaaacctggatagaagtgagcggtagcagcgctaaagacgtggcgaagcagttgaaggaacagcaaatggtgatgagaggacatcgcgagaccagcatggtacatgagctgaatcgatacattcctactgccgcagcttttggcggtctatgcataggtgccctctctgtgcttgcggacttcctcggcgctattggaagtggcaccggcatccttcttgccgtgacaatcatttatcagtatttcgaaatatttgtgaaggaacagagtgaggtgggctccatgggtgctctgctgttttag

SEQ ID NO: 175673 - DNA, 1071 bp, Artificial Sequence
  derived and/or modified sequence
atgattattaccattggacagagtatcgtgtatgtcatgacaggtatgtacggcgatccgtcagagatgggcgctggaatttgtctgttgattactatccagctgttcgtcgctggtttgattgtgcttctgttagacgaactgctccagaagggctatggacttggcagcggcattagcttgtttatcgcgactaacatctgtgagaccatcgtgtggaaagccttctcccctaccacagtaaacaccggccgaggcatggaattcgaaggtgccattatcgcattatttcatctgctggcgacacgcactgataaagtccgcgctctgagggaggccttctaccgacagaatcttcccaacttgatgaatctcatcgcgacaattttcgtgttcgctgtggtgatctatttccagggtttcagggtggacctgcccattaaatcggccaggtaccggggtcaatacaatacataccccatcaagctattttacacttccaacatccctattatcctccagagtgcattagtgagtaatctgtacgtaatctcccagatgctgtccgccaggttttccggcaatctgctagtgagcctgcttggcacttggtccgataccagtagcgggggacccgcaagggcttatcctgtcggagggttgtgttattacttatccccccctgagtcctttggaagcgtgctcgaggaccccgtccacgcagttgtgtacattgtattcatgctgggatcatgcgcatttttctccaagacatggatcgaagtctctggatcttccgcaaaggacgtggccaagcagctcaaagaacagcaaatggtgatgcgagggcatcgggagacgagtatggttcacgagctgaatagatacatcccaaccgccgcagcctttggaggcctgtgcatcggcgctctgtctgtgctggctgacttcctgggcgctatcgggtctggaacaggcatccttttagctgtcaccataatctatcagtactttgaaatcttcgtaaaagaacaatctgaagtcgggagcatgggagccctactattttag

SEQ ID NO: 175674 - DNA, 1449 bp, Artificial Sequence
  derived and/or modified sequence
atgacccagaccgccagggtgctcgtgaagttcctcgaggtaatcaaacccttctgtgtcatactgccagagatccaaaagcccgagcgcaaaatccagttcaaagaaaaggtactgtggacagcaatcactttgttcattttccttgtgtgttgccagattcctctgttcggcatcatgtctagtgactctgccgatcccttttattggatgagggtgatcctggcgtctaataggggtaccttaatggagctgggcatatcaccaatagtcacgtcgggcttaataatgcaactgctcgctggcgctaagattattgaggtgggggacactccgaaagatcgggcactttttaacggggcacagaagctgtttggcatgatcatcactatcggacaatcaattgtatatgtgatgacaggaatgtacggcgatccttccgaaatgggagctggaatctgcctgctgattaccatacagctatttgtagccggactcatcgtcctcctgctcgatgaacttctgcagaaagggtatggattgggatctggaatttcactctttatcgccaccaatatttgcgaaactattgtttggaaagccttcagtcccacaacagtaaatactggacggggaatggagtttgaaggcgctatcatcgcattgttccacctgctggcaacccgcaccgacaaagtccgcgcactgcgggaggcattctaccgacagaatctccctaacttgatgaacctgattgccacaattttcgtgtttgcagttgtcatatattttcaggggttcagagtggacctcccgatcaaaagtgccagataccgcggacaatataatacttacccaataaaactattctacactagtaatataccgattatcctgcagagcgcattggtatccaacctgtatgtcattagccaaatgctctctgccaggttttctgggaaccttctcgtgtcgcttctgggaacatggagcgacactagttctggaggccctgcgagggcttatccagtcggcggactgtgttactacctgtcaccaccggagtccttcgggagcgtgctcgaagatccagtgcacgccgtagtctatatcgtcttcatgttgggctcatgtgcctttttctccaaaacttggatcgaggtgtccggtagtagtgcaaaggacgtcgccaagcagttgaaagagcagcagatggtgatgagaggccatcgagaaacaagtatggtccatgagctgaaccgctatatcccaacggccgctgctttcggcggattgtgtataggcgctctgtctgtcctggcagatttcctgggcgcaattggcagtgggactggtattctccttgccgtgaccatcatctaccagtacttcgaaatattcgtcaaggagcagtctgaggtcggatcaatgggtgctttactgttctag

SEQ ID NO: 175675 - DNA, 3635 bp, Artificial Sequence
  derived and/or modified sequence
agcgatccgaggcccggccccggccccgccccgcgccgcgccgcgccgcttgccgccgggctagcactgacgtgtctctcggcggagctgctgtgcagtggaacgcgctgggccgcgggcagcgtcgcctcacgcggagcagagctgagctgaagcgggacccggagcccgagcagccgccgccatggcaatcaaatttctggaagtcatcaagcccttctgtgtcatcctgccggaaattcagaagccagagaggaagattcagtttaaggagaaagtgctgtggaccgctatcaccctctttatcttcttagtgtgctgccagattcccctgtttgggatcatgtcttcagattcagctgaccctttctattggatgagagtgattctagcctctaacagaggcacattgatggagctagggatctctcctattgtcacgtctggccttataatgcaactcttggctggcgccaagataattgaagttggtgacaccccaaaagaccgagctctcttcaacggagcccaaaagttatttggcatgatcattactatcggccagtctatcgtgtatgtgatgaccgggatgtatggggacccttctgaaatgggtgctggaatttgcctgctaatcaccattcagctctttgttgctggcttaattgtcctacttttggatgaactcctgcaaaaaggatatggccttggctctggtatttctctcttcattgcaactaacatctgtgaaaccatcgtatggaaggcattcagccccactactgtcaacactggccgaggaatggaatttgaaggtgctatcatcgcacttttccatctgctggccacacgcacagacaaggtccgagcccttcgggaggcgttctaccgccagaatcttcccaacctcatgaatctcatcgccaccatctttgtctttgcagtggtcatctatttccagggcttccgagtggacctgccaatcaagtcggcccgctaccgtggccagtacaacacctatcccatcaagctcttctatacgtccaacatccccatcatcctgcagtctgccctggtgtccaacctttatgtcatctcccaaatgctctcagctcgcttcagtggcaacttgctggtcagcctgctgggcacctggtcggacacgtcttctgggggcccagcacgtgcttatccagttggtggcctttgctattacctgtcccctccagaatcttttggctccgtgttagaagacccggtccatgcagttgtatacatagtgttcatgctgggctcctgtgcattcttctccaaaacgtggattgaggtctcaggttcctctgccaaagatgttgcaaagcagctgaaggagcagcagatggtgatgagaggccaccgagagacctccatggtccatgaactcaaccggtacatccccacagccgcggcctttggtgggctgtgcatcggggccctctcggtcctggctgacttcctaggcgccattgggtctggaaccgggatcctgctcgcagtcacaatcatctaccagtactttgagatcttcgttaaggagcaaagcgaggttggcagcatgggggccctgctcttctgagcccgtctcccggacaggttgaggaagctgctccagaagcgcctcggaaggggagctctcatcatggcgcgtgctgctgcggcatatggacttttaataatgtttttgaatttcgtattctttcattccactgtgtaaagtgctagacattttccaatttaaaattttgctttttatcctggcactggcaaaaagaactgtgaaagtgaaattttattcagccgactgccagagaagtgggaatggtataggattgtccccaagtgtccatgtaacttttgttttaacctttgcaccttctcagtgctgtatgcggctgcagccgtctcacctgtttccccacaaagggaatttctcactctggttggaagcacaaacactgaaatgtctacgtttcattttggcagtagggtgtgaagctgggagcagatcatgtatttcccggagacgtgggaccttgctggcatgtctccttcacaatcaggcgtgggaatatctggcttaggactgtttctctctaagacaccattgttttcccttattttaaaagtgatttttttaaggacagaacttcttccaaaagagagggatggctttcccagaagacactcctggccatctgtggatttgtctgtgcacctattggctcttctagctgactcttctggttgggcttagagtctgcctgtttctgctagctccgtgtttagtccacttgggtcatcagctctgccaagctgagcctggccaagctaggtggacagacccttgcagtgatgtccgtttgtccagattctgccagtcatcactggacacgtctcctcgcagctgccctagcaaggggagacattgtggtagctatcagacatggacagaaactgacttagtgctcacaagcccctacaccttctgggctgaagatcacccagctgtgttcagaattttcttactgtgcttaggactgcacgcaagtgagcagacaccaccgacttcctttctgcgtcaccagtgtcgtcagcagagagaggacagcacaggctcaaggttggtagtgaagtcaggttcggggtgcatgggctgtggtggtgttgatcagttgctccagtgtttgaaataagaagactcatgtttatgtctggaataagttctgtttgtgctgacaggtggcctaggtcctggagatgagcaccctctctctggcctttagggagtcccctcttaggacaggcactgcccagcagcaagggcagcagagttgggtgctaagatcctgaggagctcgaggtttcgagctggctttagacattggtgggaccaaggatgttttgcaggatgccctgatcctaagaagggggcctgggggtgcgtgcagcctgtcggggagaccccactctgacagtgggcacacggcagcctgcaaagcacagggccaccgccacagcccggcagaggggcacactctggagaccttgctggcagtgctagccaggaaacagagtgaccaagggacaagaagggacttgcctaaagccacccagcaactcagcagcagaaccaagatgggccccaggctcctccatatggcccagggcttaccaccctatcacacgtggccttgtctagacccagtcctgagcaggggagaggctcttgagacctgatgccctcctacccacatggttctcccactgccctgtctgctctgctgctacagaggggcagggcctcccccagcccacgcttaggaatgcttggcctctggcaggcaggcagctgtacccaagctggtgggcagggggctggaaggcaccaggcctcaggaggagccccatagtcccgcctgcagcctgtaaccatcggctgggccctgcaaggcccacactcacgccctgtgggtgatggtcacggtgggtgggtgggggctgaccccagcttccaggggactgtcactgtggacgccaaaatggcataactgagataaggtgaataagtgacaaataaagccagttttttacaaggt

SEQ ID NO: 175676 - DNA, 3238 bp, Artificial Sequence
  derived and/or modified sequence
agaaggcgtccctgggtagcgcggaaggttacttctctgtgtcccaactcttcctgttttgtttctcccatcaaagtcaaatttctggaagtcatcaagcccttctgtgtcatcctgccggaaattcagaagccagagaggaagtatttggcatgatcattactatcggccagtctatcgtgtatgtgatgaccgggatgtatggggacccttctgaaatgggtgctggaatttgcctgctaatcaccattcagctctttgttgctggcttaattgtcctacttttggatgaactcctgcaaaaaggatatggccttggctctggtatttctctcttcattgcaactaacatctgtgaaaccatcgtatggaaggcattcagccccactactgtcaacactggccgaggaatggaatttgaaggtgctatcatcgcacttttccatctgctggccacacgcacagacaaggtccgagcccttcgggaggcgttctaccgccagaatcttcccaacctcatgaatctcatcgccaccatctttgtctttgcagtggtcatctatttccagggcttccgagtggacctgccaatcaagtcggcccgctaccgtggccagtacaacacctatcccatcaagctcttctatacgtccaacatccccatcatcctgcagtctgccctggtgtccaacctttatgtcatctcccaaatgctctcagctcgcttcagtggcaacttgctggtcagcctgctgggcacctggtcggacacgtcttctgggggcccagcacgtgcttatccagttggtggcctttgctattacctgtcccctccagaatcttttggctccgtgttagaagacccggtccatgcagttgtatacatagtgttcatgctgggctcctgtgcattcttctccaaaacgtggattgaggtctcaggttcctctgccaaagatgttgcaaagcagctgaaggagcagcagatggtgatgagaggccaccgagagacctccatggtccatgaactcaaccggtacatccccacagccgcggcctttggtgggctgtgcatcggggccctctcggtcctggctgacttcctaggcgccattgggtctggaaccgggatcctgctcgcagtcacaatcatctaccagtactttgagatcttcgttaaggagcaaagcgaggttggcagcatgggggccctgctcttctgagcccgtctcccggacaggttgaggaagctgctccagaagcgcctcggaaggggagctctcatcatggcgcgtgctgctgcggcatatggacttttaataatgtttttgaatttcgtattctttcattccactgtgtaaagtgctagacattttccaatttaaaattttgctttttatcctggcactggcaaaaagaactgtgaaagtgaaattttattcagccgactgccagagaagtgggaatggtataggattgtccccaagtgtccatgtaacttttgttttaacctttgcaccttctcagtgctgtatgcggctgcagccgtctcacctgtttccccacaaagggaatttctcactctggttggaagcacaaacactgaaatgtctacgtttcattttggcagtagggtgtgaagctgggagcagatcatgtatttcccggagacgtgggaccttgctggcatgtctccttcacaatcaggcgtgggaatatctggcttaggactgtttctctctaagacaccattgttttcccttattttaaaagtgatttttttaaggacagaacttcttccaaaagagagggatggctttcccagaagacactcctggccatctgtggatttgtctgtgcacctattggctcttctagctgactcttctggttgggcttagagtctgcctgtttctgctagctccgtgtttagtccacttgggtcatcagctctgccaagctgagcctggccaagctaggtggacagacccttgcagtgatgtccgtttgtccagattctgccagtcatcactggacacgtctcctcgcagctgccctagcaaggggagacattgtggtagctatcagacatggacagaaactgacttagtgctcacaagcccctacaccttctgggctgaagatcacccagctgtgttcagaattttcttactgtgcttaggactgcacgcaagtgagcagacaccaccgacttcctttctgcgtcaccagtgtcgtcagcagagagaggacagcacaggctcaaggttggtagtgaagtcaggttcggggtgcatgggctgtggtggtgttgatcagttgctccagtgtttgaaataagaagactcatgtttatgtctggaataagttctgtttgtgctgacaggtggcctaggtcctggagatgagcaccctctctctggcctttagggagtcccctcttaggacaggcactgcccagcagcaagggcagcagagttgggtgctaagatcctgaggagctcgaggtttcgagctggctttagacattggtgggaccaaggatgttttgcaggatgccctgatcctaagaagggggcctgggggtgcgtgcagcctgtcggggagaccccactctgacagtgggcacacggcagcctgcaaagcacagggccaccgccacagcccggcagaggggcacactctggagaccttgctggcagtgctagccaggaaacagagtgaccaagggacaagaagggacttgcctaaagccacccagcaactcagcagcagaaccaagatgggccccaggctcctccatatggcccagggcttaccaccctatcacacgtggccttgtctagacccagtcctgagcaggggagaggctcttgagacctgatgccctcctacccacatggttctcccactgccctgtctgctctgctgctacagaggggcagggcctcccccagcccacgcttaggaatgcttggcctctggcaggcaggcagctgtacccaagctggtgggcagggggctggaaggcaccaggcctcaggaggagccccatagtcccgcctgcagcctgtaaccatcggctgggccctgcaaggcccacactcacgccctgtgggtgatggtcacggtgggtgggtgggggctgaccccagcttccaggggactgtcactgtggacgccaaaatggcataactgagataaggtgaataagtgacaaataaagccagttttttac

SEQ ID NO: 175677 - DNA, 1871 bp, Artificial Sequence
  derived and/or modified sequence
aatcacaccgccatgctttgcccacaacagtctcctcaacctgttccctcattccttctcgccagaatctatcaaggctcggcacaaaggtactctcccaggaggccttcctgaattcttctgtgaggcagactacttcccgagctgccccggcccttctccggccaagtctctccagaaactcatcccattcgttctcagatggaaggggacccacacccacgacaagcctccgggtttgcttaatgactcagacagcgagggtgctcgtcaaatttctggaagtcatcaagcccttctgtgtcatcctgccggaaattcagaagccagagaggaagattcagtttaaggagaaagtgctgtggaccgctatcaccctctttatcttcttagtgtgctgccagattcccctgtttgggatcatgtcttcagattcagctgaccctttctattggatgagagtgattctagcctctaacagaggcacattgatggagctagggatctctcctattgtcacgtctggccttataatgcaactcttggctggcgccaagataattgaagttggtgacaccccaaaagaccgagctctcttcaacggagcccaaaagttatttggcatgatcattactatcggccagtctatcgtgtatgtgatgaccgggatgtatggggacccttctgaaatgggtgctggaatttgcctgctaatcaccattcagctctttgttgctggcttaattgtcctacttttggatgaactcctgcaaaaaggatatggccttggctctggtatttctctcttcattgcaactaacatctgtgaaaccatcgtatggaaggcattcagccccactactgtcaacactggccgaggaatggaatttgaaggtgctatcatcgcacttttccatctgctggccacacgcacagacaaggtccgagcccttcgggaggcgttctaccgccagaatcttcccaacctcatgaatctcatcgccaccatctttgtctttgcagtggtcatctatttccagggcttccgagtggacctgccaatcaagtcggcccgctaccgtggccagtacaacacctatcccatcaagctcttctatacgtccaacatccccatcatcctgcagtctgccctggtgtccaacctttatgtcatctcccaaatgctctcagctcgcttcagtggcaacttgctggtcagcctgctgggcacctggtcggacacgtcttctgggggcccagcacgtgcttatccagttggtggcctttgctattacctgtcccctccagaatcttttggctccgtgttagaagacccggtccatgcagttgtatacatagtgttcatgctgggctcctgtgcattcttctccaaaacgtggattgaggtctcaggttcctctgccaaagatgttgcaaagcagctgaaggagcagcagatggtgatgagaggccaccgagagacctccatggtccatgaactcaaccggtacatccccacagccgcggcctttggtgggctgtgcatcggggccctctcggtcctggctgacttcctaggcgccattgggtctggaaccgggatcctgctcgcagtcacaatcatctaccagtactttgagatcttcgttaaggagcaaagcgaggttggcagcatgggggccctgctcttctgagcccgtctcccggacaggttgaggaagctgctccagaagcgcctcggaaggggagctctcatcatggcgcgtgctgctgcggcatatggacttttaataatgtttttgaatttcgtattctttcattccactgtgtaaagtgctagacattttccaatttaaaattttgctttttat

SEQ ID NO: 175678 - protein, 194 aa, Artificial Sequence
  derived and/or modified sequence
MAAAAPNAGGSAPETAGSAEAPLQYSLLLQYLVGDKRQPRLLEPGSLGGIPSPAKSEEQKMIEKAMESCAFKAALACVGGFVLGGAFGVFTAGIDTNVGFDPKDPYRTPTAKEVLKDMGQRGMSYAKNFAIVGAMFSCTECLIESYRGTSDWKNSVISGCITGGAIGFRAGLKAGAIGCGGFAAFSAAIDYYLR

SEQ ID NO: 175679 - DNA, 585 bp, Artificial Sequence
  derived and/or modified sequence
atggccgccgccgcccccaacgccggcggcagcgcccccgagaccgccggcagcgccgaggcccccctgcagtacagcctgctgctgcagtacctggtgggcgacaagagacagcccagactgctggagcccggcagcctgggcggcatccccagccccgccaagagcgaggagcagaagatgatcgagaaggccatggagagctgcgccttcaaggccgccctggcctgcgtgggcggcttcgtgctgggcggcgccttcggcgtgttcaccgccggcatcgacaccaacgtgggcttcgaccccaaggacccctacagaacccccaccgccaaggaggtgctgaaggacatgggccagagaggcatgagctacgccaagaacttcgccatcgtgggcgccatgttcagctgcaccgagtgcctgatcgagagctacagaggcaccagcgactggaagaacagcgtgatcagcggctgcatcaccggcggcgccatcggcttcagagccggcctgaaggccggcgccatcggctgcggcggcttcgccgccttcagcgccgccatcgactactacctgagatag

SEQ ID NO: 175680 - DNA, 585 bp, Artificial Sequence
  derived and/or modified sequence
atggccgccgcagctcctaacgctgggggaagtgcgccagaaaccgcaggatccgcagaggcaccgctgcagtactctttactcctgcagtatctcgtgggggacaaaagacagccacggctcctggagcccggctctctgggcggcattccttcccccgccaagtcagaggagcagaaaatgattgagaaggcaatggaaagctgcgccttcaaggccgccttggcctgcgtgggtggcttcgtgctgggaggggcatttggggtgtttacagctggtatcgacaccaatgtgggtttcgatcccaaagatccttataggaccccaacagccaaggaggtgctgaaggatatggggcagcgcggaatgagttatgctaaaaactttgctatcgtgggagccatgttttcttgcacagagtgcctgattgaatcctacagaggcacctctgattggaagaattccgtaattagtgggtgtatcacagggggcgccatcgggttcagagctggactgaaggccggggcgattgggtgcggggggttcgctgctttctcagcggcaatcgactattatcttcgctag

SEQ ID NO: 175681 - DNA, 585 bp, Artificial Sequence
  derived and/or modified sequence
atggctgctgctgccccaaatgctgggggcagcgcccctgagacagctggcagcgctgaggcccccctgcagtacagcctgctgctgcagtacctggtgggggacaagaggcagccccggctgctggagcccggcagcctgggcggcatccccagccctgccaagtctgaggagcagaagatgattgagaaggccatggagagctgtgccttcaaggccgccctggcctgtgtgggcggctttgtgctgggcggggcctttggagtcttcaccgctggcatcgacaccaacgtgggctttgaccccaaggacccctaccgcacccccacagccaaggaggtgctgaaggacatgggccagaggggcatgtcctatgccaagaactttgccatcgtgggcgccatgttcagctgcacagagtgcctgattgagagctaccggggcaccagtgactggaagaacagcgtcatcagcggctgcatcaccggcggggccatcggcttccgggccggcctgaaggccggggccatcggctgcggcggctttgctgccttctctgctgccatcgactactacctgaggtag

SEQ ID NO: 175682 - DNA, 585 bp, Artificial Sequence
  derived and/or modified sequence
atggccgccgccgcccccaacgccggcggcagcgcccccgagaccgcaggctcagccgaggctccactccagtatagtctgctgttgcaatacctcgtgggtgacaaacggcagccacgtctcttggaacctggatcactgggtggcatcccttccccagctaaaagcgaagagcagaaaatgatcgaaaaagctatggaaagctgcgcctttaaggcagcgctggcctgcgtgggaggtttcgtcctcggcggcgcttttggtgtgtttacggccggaatcgatacaaacgtgggcttcgatcctaaggacccgtaccgcacgccaaccgctaaagaggtactcaaggatatgggacagcggggtatgtcatacgcgaagaatttcgcaattgtgggggcaatgttttcctgcacagagtgcttaatcgaaagctacaggggcactagcgactggaaaaactctgttatatctggttgtattacagggggcgcgatcggattccgggcgggcttaaaagctggggctattgggtgcgggggctttgcagcgttctctgcagccatcgactactatcttaggtag

SEQ ID NO: 175683 - DNA, 585 bp, Artificial Sequence
  derived and/or modified sequence
atggcagcagccgctccaaacgctggtgggagcgccccagagactgcgggaagcgcagaggccccacttcaatatagtttattgctgcagtatttggtgggtgataaaaggcagcccaggttgctggagccgggttctttgggaggaatcccaagtccggcaaagtccgaggaacaaaaaatgatcgaaaaggctatggagtcatgcgcttttaaggcggcactcgcttgtgtaggcggtttcgtcctgggtggcgcattcggggtattcaccgccggaatcgacactaatgttggttttgatccaaaggatccctaccggaccccaaccgcgaaggaagtactcaaagatatggggcaacgaggcatgagctatgccaaaaattttgccatcgtcggtgcgatgttctcttgtaccgagtgtcttatcgaatcctacaggggaaccagtgactggaagaacagtgtgatttctggttgcattactggaggcgctatcggtttccgggctggactgaaagctggtgctattgggtgcgggggtttcgccgctttctcagccgctattgactattacctgagatag

SEQ ID NO: 175684 - DNA, 1671 bp, Artificial Sequence
  derived and/or modified sequence
cgagggttgcttgggcagcgactgtcatggcggcggccgcccccaatgccggaggctcggcccctgagacagcgggttccgccgaagctccgctgcagtacagcctgctcctgcagtacctggtgggtgacaagcgtcagccccggctcctggagcctgggagcctgggcgggatcccaagtccagccaagagtgaggagcagaagatgatcgagaaggcgatggaaagctgcgctttcaaggctgcgctggcctgcgtgggaggatttgtcttaggaggtgcatttggggtgtttaccgctggcatcgataccaacgtgggctttgaccctaaggatccttaccgtacaccgactgcaaaagaagtgctgaaagacatggggcagagaggaatgtcctatgccaaaaatttcgccattgtgggagccatgttttcttgtactgagtgtttgatagaatcttaccggggaacatcagactggaagaacagtgtcatcagtggctgcatcacgggaggagctattggtttcagagctggcttaaaggctggggccattggttgtggaggttttgctgctttctctgctgcgattgattattacctccggtgagagtaattgcctgcagggaaggatgatgccagccccggatccgggctgctctctggaggacagtttctgtaccacaccagggccttgcttcagggcctgaagacattcattttccctcatgtcgttggtattctgagggagctgcctggcttctctgcctccagcctttggggtagccacactttgctgctcctggactccagccagccttcacagaggacgtcccgtgccagattctctcacagcagatcgggagacaggatgttgacatataggaattcagctccacaaagcttcaggcctgaccacagctggccctctaggttgtttggtgttgtgggcacagaggtgacagtgtctctgcaggcactcaggaagctgttctaccttggaactccatgcaactatccgtctcgaataccagggcagggcaaggcggactgatgccgtccaaccaattatctcacttgttttgtgttctgtcatccttgttttttttttaaaaatacactcccctcccccaccgccacacaccttacagttcaaaaggttggtttatttgtattttattttcaaattccctattccaaaaatagtgccgggtggcccaaagataacatctgaagggaaagaatgagaaagctcccagggaagcgggggatggggcgctgaggcagggttgttagaggactgtgtcatcctcaccaagctcattacatctgccagggcctgcctcaagaagcccagcccagccttttcctgggatgcagtgaaatcccatccatgaactcgatgggcccctcctgtgccggccgagaggcacacactgccttcacgacgtgactgctggacctggccgagcttgaggccacatgtgaagggtcctgctgtggtcatcttggtgactcggtcacagcagctactggccaagatcagacgtcgctgaggggctgttcaccaccatcctcgttctccagggtcaaggaagtgttttaacatgtcgtgttttcgacttgaccttgtggtatttttcttggcctagttgtgtgccatggatatt

SEQ ID NO: 175685 - protein, 818 aa, Artificial Sequence
  derived and/or modified sequence
MAGTRRKSLQNRQVGSLLIFLCISVGDATTIRYSVAEEMESGSFVANVAKDLGLEVGKLAARGARLVSEGNKMHFRLHRKTGDLFVKEKLDRESLCGKADPCVLHFEVVLVEPLQSFRAEVRVFDINDNAPVFLNKEPLLKIPESTPLGSRFPLQSAQDLDVGLNGLQNYTLSANGYFHLHTRFCSHGPKYAELVLNKPLDREEQPEVNLTITAVDGGSPPKSGTAHIHVVVLDVNDHVPQFSRLVYRAQVSENSPNGSLVATVTAVDLDEGTNKAITYSLAQNPEAILKTFQIDPQNGEVRLRGPLDFEAIETYDIDIQATDGGGLSAHSKVLVEVVDVNDNPPEVMVSSVSSPLPEDSPPQTVVALFTIRDRDIRVGGKVTCFLREDLPFVIKPTFGNSYSLVTDRSLDREEVSGYNITIVAMDTGPPSLSAETMIEVLISDVNDNPPIFREDSYILTVRENNSPAVFIGKVHAEDLDLGENAQITYSLLPPKNGDLSVFAYISINSGNGKLYALRTMDYEAIQDFQFVVKATDGGFLSLSSQVTVRVVVLDDNDNRPMILYPLQNGTLPCNDLVPRSAEAGYLVTKVVAVDGDSGQNSWLSYHLLKATDLGLFSVQRQNGEIHTLRQISERDPMMQKLIILVQDHGQPALSTTVSLNILLVDGFSEPYLQFQDPTKHSRKVNPSTKYLVISLVILSFLFLLSVIVIFIIHVYQKIKYREKFTIQEHFYDDCNFSNNLVQGQGNGSLSRPCPYEMCSATGTGNSEFRFLKRFMPNFPFPHATGEIKMEAGSSLPPNSDRNKSQRLEGHDQVSDDYM

SEQ ID NO: 175686 - DNA, 2457 bp, Artificial Sequence
  derived and/or modified sequence
atggcaggtacacggcggaagtccctccagaatcgacaggtgggctctctgctcatctttctgtgcatctcagtgggagatgccaccaccatccgctactccgtcgcagaggaaatggagtcaggttcattcgttgcaaatgttgctaaagacctcgggctggaggttgggaaactggccgcacgcggcgcgagactcgtctccgaaggtaataaaatgcatttccgtctgcatcggaagaccggagacctattcgttaaggagaaattagaccgcgagagcctttgcggaaaggccgacccatgcgtcttgcacttcgaagtggtgctggtggagccactgcagtcgtttagagcagaggtgcgcgtgttcgatatcaacgacaacgcacccgtgttcctgaacaaggagcccctgctgaaaattcctgaaagtaccccactggggtcacggtttccactgcagtccgcccaagatcttgatgtgggcctgaatggcctgcagaattataccctgagtgccaacgggtattttcacctccatacgcgattctgctcacacgggccaaagtatgccgagctggtgttgaacaaaccactggatcgcgaggagcaaccagaggtcaatttgacgatcaccgccgtcgacggaggctctccacctaaaagtggaacggctcatattcacgtggtagtgctggatgtgaatgaccacgttcctcagtttagtaggctagtgtaccgggcgcaagtatctgagaactcacccaacggttctctggtggctactgttactgctgtagacctcgacgaaggcactaataaggctatcacctacagtctggcccagaacccagaagctattctgaagacctttcagattgaccctcagaatggggaggtgcggctcaggggtcctttggatttcgaagctatcgagacatacgatatcgacattcaagcgacagacggcggaggtcttagcgcacactctaaagttctggtagaggtcgtggatgtgaacgataacccacccgaagtcatggtatcctcagtgagcagtcccttacccgaggatagccccccacagacggttgtcgcattatttactattagagacagagacatccgggtcggtgggaaggtaacgtgcttcctgagggaggatttgccgttcgtcatcaaaccgacctttggtaattcctattccttagtaactgaccgcagcctggatcgcgaagaggttagcggttataacatcaccatcgtcgctatggacaccgggccaccttctttatcggccgaaaccatgatcgaggtgctgatttccgatgttaatgacaatcccccgattttccgtgaggactcctatattttgacagtccgggaaaacaactctccggccgtcttcataggaaaagtccatgcagaggacttggatctcggtgagaatgcccagattacctacagcctgctacctcctaagaacggcgacctcagtgtatttgcctacatctccataaacagcgggaacgggaagctgtacgcactccggaccatggattatgaggccatccaagattttcagttcgtggtcaaagcgaccgacggagggttcttatctctgagttcccaggtcacagtaagggtggtggttctcgatgacaatgacaacaggcctatgattctgtatcccctacagaacggcacacttccatgcaacgatctggtaccacgttctgcagaagcaggatacctcgtcactaaggtggtggctgtcgacggcgattccggtcagaattcctggctatcatatcatctacttaaggctacggacctgggtttgttttccgttcagcggcagaatggggaaatccacactctgcgccaaatcagtgagcgggatcctatgatgcaaaaactgatcattctcgtgcaggatcatgggcagccggctctctccacaactgtatcacttaatattcttctcgtggacggattttctgagccctacctgcagttccaggatcctacaaagcactcacgcaaggttaaccctagtaccaagtacctggtgattagcttggtgatcctatcttttttgtttctgctgagcgtgattgtcattttcatcatccacgtgtatcagaaaatcaaataccgcgagaagtttaccatccaggagcacttttacgatgactgcaacttttcaaataatctcgtgcaggggcaggggaacggctctctttccagaccttgtccttacgaaatgtgctccgctacgggaacagggaacagtgagtttaggtttctgaagagatttatgcctaatttcccgttcccccatgctacgggtgaaatcaaaatggaagcaggaagctcactcccgccaaactctgatagaaacaaatctcagcggttggaaggccacgaccaggtgtcagacgactacatgtag

SEQ ID NO: 175687 - DNA, 2457 bp, Artificial Sequence
  derived and/or modified sequence
atggccggcaccaggaggaagagcctgcagaaccggcaggtgggcagcctgctgatcttcctgtgcatctctgtgggagatgccaccaccatccgctacagcgtggccgaggagatggagagcggcagctttgtggccaacgtggccaaggacctgggcctggaggtgggcaagctggccgcccggggggcccggctggtgtctgagggcaacaagatgcacttccggctgcacaggaagacaggagacctgtttgtgaaggagaagctggaccgggagagcctgtgtgggaaggctgacccctgtgtgctgcactttgaggtggtgctggtggagcccctgcagagcttccgggcagaggtgcgggtgtttgacatcaatgacaatgcccctgtgttcctgaacaaggagcccctgctgaagatccctgagagcacccccctgggcagccgcttccccctgcagagcgcccaggacctggatgtgggcctgaatggcctgcagaactacaccctgagcgccaacggctacttccacctgcacacccgcttctgcagccacggccccaagtatgcagagctggtgctgaacaagcccctggaccgggaggagcagcctgaggtgaacctgaccatcacagctgtggatggcggcagcccccccaagtctggaacagcccacatccacgtggtggtgctggatgtgaatgaccacgtgccccagttcagccggctggtgtaccgggcccaggtgtctgagaacagccccaacggcagcctggtggccaccgtgacagctgtggacctggatgagggcaccaacaaggccatcacctacagcctggcccagaaccctgaggccatcctgaagaccttccagattgacccccagaatggagaggtgcggctgcggggccccctggactttgaggccatcgagacctatgacatcgacatccaggccacagatggcggcggcctgagcgcccacagcaaggtgctggtggaggtggtggatgtgaatgacaaccccccagaggtgatggtgtcctctgtgagcagccccctgcctgaggacagccccccccagacagtggtggccctcttcaccatccgggaccgggacatccgggtgggcggcaaggtgacctgcttcctgcgggaggacctgcccttcgtcatcaagcccaccttcggcaacagctacagcctggtgacagacaggagcctggaccgggaggaggtgtctggctacaacatcaccatcgtggccatggacaccggcccccccagcctgtctgctgagaccatgattgaggtgctgatcagtgatgtgaatgacaacccccccatcttccgggaggacagctacatcctgactgtgcgggagaacaacagccctgctgtgttcatcggcaaggtgcatgctgaggacctggacctgggagaaaatgcccagatcacctacagcctgctgccccccaagaatggagacctgtctgtgtttgcctacatcagcatcaacagcggaaatggcaagctgtatgccctgcggaccatggactatgaggccatccaggacttccagtttgtggtgaaggccacagatggcggcttcctgagcctgagcagccaggtgacagtgcgggtggtggtgctggatgacaatgacaaccggcccatgatcctgtaccccctgcagaatggcaccctgccctgcaatgacctggtgcccaggtctgctgaggccggctacctggtgaccaaggtggtggccgtggatggagacagcggccagaacagctggctgagctaccacctgctgaaggccacagacctgggcctcttctctgtgcagaggcagaatggagagatccacaccctgcggcagatcagcgagcgggaccccatgatgcagaagctgatcatcctggtgcaggaccacggccagcctgccctgagcaccaccgtgtccctgaacatcctgctggtggatggcttcagcgagccctacctgcagttccaggaccccaccaagcacagcaggaaggtgaaccccagcaccaagtacctggtgatcagcctggtgatcctgtccttcctgttcctgctgtctgtgattgtcatcttcatcatccacgtgtaccagaagatcaagtaccgggagaagttcaccatccaggagcacttctatgatgactgcaacttcagcaacaacctggtgcagggccagggcaatggcagcctgagccggccctgcccctatgagatgtgcagcgccactggaactggaaacagcgagttccgcttcctgaagcgcttcatgcccaacttccccttcccccacgccaccggggagatcaagatggaggccggcagcagcctgccccccaacagcgacaggaacaagagccagaggctggagggccatgaccaggtgtctgatgactacatgtag

SEQ ID NO: 175688 - DNA, 2457 bp, Artificial Sequence
  derived and/or modified sequence
atggccggcacccggcggaagagcctgcagaaccggcaggtgggctcccttctaatcttcctttgcattagtgttggcgacgctacaactatccggtattcggtcgccgaagagatggaaagtgggtcctttgtagccaacgtggcaaaggatctgggactggaggtggggaagctggcggcgcgcggggcacgcctcgtgagcgagggtaataaaatgcacttcagactgcacagaaagacaggcgacttgtttgtgaaagagaagttggatcgggaatccctgtgcggcaaagccgacccttgcgtgctgcactttgaggtggtcctagtggagcccctccagagttttagagccgaggttcgcgtgttcgatattaatgataatgcgcccgtgttcctgaacaaggagccactgctgaaaatcccagaaagcactccactgggcagtaggtttccgctgcagagtgcccaggacctggacgtagggctgaacgggctgcagaattacacacttagtgctaacggctatttccacctgcatacacggttctgcagtcatggccccaaatatgccgaactggtgctgaataagcctctcgatcgcgaggagcaaccagaagttaatctaacaataacagccgtcgacggagggagtccaccaaaatccgggactgcacatatccacgtggtcgtgctggacgttaacgaccacgtgccccaattcagccgcctggtgtatagagcccaagtctccgagaactcacctaacgggagtctggttgccactgtcacggcagttgacctggacgaagggacaaacaaagcaatcacctattcgctggcccagaacccggaggcgattctgaaaacgtttcagatcgacccccaaaatggggaagtgcgcctccgcggccccctcgacttcgaagcaattgagacctacgatatcgatatacaagccacagacggaggaggtctcagcgcgcactctaaggtgctggttgaagtcgtcgacgtcaatgataacccccctgaagtcatggtatcatctgttagctcccccctgcctgaagactccccacctcaaaccgttgtcgcactgttcaccatcagagaccgcgacatccgtgtcgggggcaaggtgacctgttttctcagggaggaccttccatttgtgatcaaacctactttcggtaatagttactctctggtgaccgacagaagtctggaccgcgaggaggtgtcaggctataacatcacaatcgtggccatggacactgggccaccctcgctgagtgcagagactatgattgaagtgctgatttctgacgttaatgataatccaccaatctttagagaggattcttatatcctgacggtgagggagaacaactcacctgccgtgtttatcggaaaggtgcatgcggaagatctggatttaggcgaaaacgctcagattacttacagtctgctgccacccaaaaatggcgacttatccgtgtttgcctacatcagcatcaattcgggtaacggcaaactgtacgcactcagaactatggactatgaggccatccaggatttccagttcgtggtcaaggcaactgatggaggctttctcagtctgtcttctcaagtgacagtgcgcgtagtggttctggatgacaacgataatcggcccatgattctgtaccctctgcagaacggcacactcccctgtaacgacctggtaccacggtcagccgaggctggctatctggtcaccaaggtggtggctgtggatggcgatagcggtcaaaatagttggctctcatatcacctgctgaaagctacggatctgggtctcttctcagtgcagagacagaacggggagattcatacccttcggcagatctctgaaagggacccgatgatgcagaagctgatcatcctcgtccaggatcatggccagcccgctctctccaccacagtgagcctcaacattctcctagtggacggcttttcagaaccctatctgcagttccaagatcccactaagcactcacgaaaagtgaacccctctaccaagtacttagtgatttcattagtgattctctcattccttttccttctttccgtgatcgtgatctttatcattcatgtgtaccagaaaattaagtatagggagaagtttacaattcaggagcatttctacgatgactgtaacttcagtaacaacctggtgcagggtcaaggcaatggctccctgtctagaccatgtccctacgaaatgtgcagcgccaccggaacaggaaacagcgaattcagatttctgaagcgctttatgcccaacttcccctttccccacgcaaccggcgagattaagatggaagcaggatcctcgctccctccaaactctgaccggaacaagtcccaaaggctcgaagggcacgaccaagtgtctgacgattacatgtag

SEQ ID NO: 175689 - DNA, 2457 bp, Artificial Sequence
  derived and/or modified sequence
atggcagggacccgacggaaatccctgcaaaaccgacaggtggggtccctcctcatcttcctctgcatatctgtaggagacgctacaaccatcagatacagcgtggcagaggaaatggagtccggcagctttgtcgcgaacgttgcaaaagacctagggctggaagtgggaaagctcgctgcccgtggcgctcgcttggtttctgaggggaacaagatgcactttcgactgcatcggaagacaggtgacctctttgtgaaggagaagctggaccgcgaatcactctgcggaaaagctgatccttgtgttctccacttcgaggttgtgctggtggagcctctgcagtcatttagggcggaagtgcgagttttcgatatcaatgataacgcaccggtgttcttgaataaggaacctcttttgaagataccggaaagtactccgctcggcagtcggttccctttacagtcagctcaggacttggacgtgggtcttaacggcttgcagaactacaccctcagtgctaatgggtattttcatctgcatacccggttctgcagtcacggcccaaagtatgctgagcttgtactgaacaaaccgctcgatcgcgaggagcagcccgaagttaatctcaccatcacagcggtagatggtgggtccccacccaaaagcgggaccgcccacattcacgtcgtcgtgcttgatgtgaacgaccacgtcccgcagttttcacgattggtctacagagcccaggtgtcggagaatagccccaatgggtcattggtagctactgtgacagctgttgacctggacgagggtaccaacaaagcaattacctactccctggcccagaacccagaagcaattttaaaaacattccagatcgatccccagaacggagaggtgaggctgagaggtccattagacttcgaggcaatcgagacatatgatatcgatatccaggctaccgacggcggaggactgtctgcacactccaaggtcttggtcgaagtcgtagatgtcaatgataaccccccagaggttatggtcagcagtgttagtagtccgttacctgaagactctccgcctcaaacagtagtggccctcttcactattcgggatcgagatattcgggttggaggcaaggtcacctgcttcctacgggaggatctccccttcgttattaagcctactttcggcaattcttattcattagtgacagaccgctcgctagacagagaagaggtgtccggctataatatcacaattgtggctatggatacaggccctcccagtctctcagccgagaccatgatagaggtgcttatatctgacgtgaatgataacccgcctattttccgggaagattcttacatactcacagtccgggagaataatagtcctgccgtttttattggaaaagtgcatgctgaggatctcgatctcggtgaaaacgcacagatcacatattcactgctccctccgaagaatggagaccttagcgtattcgcttacatatccattaacagtggcaacggcaaattatatgcactccggaccatggactatgaggccattcaggatttccagttcgtggtgaaggccacagatggaggcttcctgagcctcagctcccaggtgactgttcgcgtggtggtgctcgatgataatgataacaggcctatgatactatatcccctacaaaatggtactctgccttgcaacgacctggtgccacggagtgctgaggccggttacttagtgacgaaagtcgttgccgtggacggagactcgggtcaaaacagctggctctcctaccacttactcaaggcaaccgacttagggctcttcagcgtgcagaggcagaatggcgagattcatacgctccgccagattagcgagcgtgaccccatgatgcagaaactgattatcctggtgcaggaccacggccagcccgcactgtcaactacagtatccctgaacattctgttggtcgatggatttagcgaaccctatcttcaattccaggaccccactaaacattcccggaaagtgaatccctctacaaagtacctcgtaatatcattagtaatcctttccttcctgttcttgcttagtgttatcgtgatctttatcatacatgtgtatcagaagatcaagtatcgcgaaaagtttacaatccaggaacacttctacgatgactgcaacttttctaataacctcgttcagggacaaggtaacggttcactgagccgaccatgcccttatgaaatgtgctccgctaccgggaccggtaattcagaatttaggttccttaagcggtttatgcctaactttccttttccccacgctacaggagagattaaaatggaagcaggaagctccctgccaccgaactccgatagaaacaaatcacagcggctggaaggacatgatcaggtgtcagatgattatatgtag

SEQ ID NO: 175690 - DNA, 2534 bp, Artificial Sequence
  derived and/or modified sequence
agtaacctgttgcagaaaagtgaaagtatatccgcaacagttggctctgattgcagagagcgcgcttgtgagaactgatggcgggtacgcgcagaaaatctttgcaaaacaggcaagtgggatctcttctcatttttctgtgcatatctgtgggggatgcgacaactatccgctattcagtggcagaggaaatggagagcggctcgtttgtggccaacgtagctaaggacctaggactggaggtagggaagctggctgcgcgcggggcgcggctggtttccgagggcaacaaaatgcatttccggctccaccgcaagacgggagatttgtttgtgaaggagaaactggatcgggagtcactttgtggcaaagccgacccttgtgttctgcactttgaagtagtcctggtggagccgctgcagtccttccgggccgaggtcagggtatttgatatcaatgacaatgccccagttttcctaaacaaggagccgcttttaaagattccggagagcacccctttgggttcacgttttcctctgcagagcgcccaggatctggacgtgggccttaacggtctccagaactacaccctgagtgccaatgggtatttccacctgcacacccgcttctgcagccacgggcctaaatatgctgagctggtgctgaacaaacccctggaccgagaggagcagcctgaagtcaacttgacaattacggcggtggacggcgggtccccgcctaagtctggcacagctcacatccacgtggtggttctggatgtcaacgaccacgtgccccagttctcgcgactggtgtacagagcccaggtatcagagaacagccccaatggctctttggtggccacggtgactgccgtggacctagacgagggcaccaacaaagcgataacttactctttagctcaaaacccagaagcaattctcaagacgtttcagattgaccctcaaaatggagaagttcgactaagaggacccctcgattttgaagccattgaaacatacgacattgacattcaagctacagatggtggaggcctctctgcccacagcaaagtcctggtagaagtggtggatgtgaatgacaatcctcccgaagtgatggtctcctctgtgtccagcccactccctgaagactcaccaccacagacagtagtagcccttttcactatcagagaccgggacattcgagtgggaggaaaagtcacctgcttcctcagagaagaccttccctttgtaatcaaacctacatttgggaattcttactcactggtcactgacagaagcttggatcgggaggaggtctcaggctataatatcaccattgttgccatggatactggaccacctagcttgtctgccgagactatgatagaggtgctaatatccgacgttaatgacaatcctccaatatttcgggaagattcctatatcttgactgttcgagaaaacaacagtcctgcggtttttattggcaaagtccatgctgaggatcttgatttgggtgagaatgcccaaataacatattctctgttgcctccaaaaaacggagatctttcagtctttgcttacatatccataaattcaggcaatgggaagctctacgcgctgagaaccatggattatgaggccattcaagattttcaatttgtggtaaaggcaactgatgggggcttcctgtcactgagtagccaagttactgtcagagtggttgtcctagatgacaatgacaatcgtccaatgatcttatacccactgcagaacggcaccttgccctgcaatgacctggtgcccaggtctgcagaggcaggctacctagtgaccaaagtggtggctgtggatggtgactcaggtcagaattcttggctttcatatcatctacttaaggccactgaccttgggttattttctgttcaaagacaaaatggagaaatccatacattaaggcagatatctgagagagaccccatgatgcagaaattgatcattcttgttcaggatcacggccaaccagctctttccactactgtctcactcaacatcctgctggtagatggcttttcagagccctacctgcagttccaggatccaaccaagcattctagaaaggtaaatccatccactaaatatttggtcatttctctggtcatcctttcctttctctttctcctctctgtcatagtgatcttcattatacatgtctaccaaaagattaaatatagagaaaagttcacaattcaagagcatttctatgatgactgtaatttctctaacaacctggtacaaggacaaggcaatggatccttatctcggccttgtccatatgaaatgtgttcagccactggcactggtaatagtgagtttcgctttcttaagcgttttatgcccaacttccctttccctcatgccactggggagataaaaatggaggctggctccagtttgcccccaaattctgataggaataagtctcagagattagagggccatgaccaggtatctgatgactatatgtag

SEQ ID NO: 175691 - DNA, 2457 bp, Artificial Sequence
  derived and/or modified sequence
atggccggcaccagaagaaagagcctgcagaacagacaggtgggcagcctgctgatcttcctgtgcatcagcgtgggcgacgccaccaccatcagatacagcgtggccgaggagatggagagcggcagcttcgtggccaacgtggccaaggacctgggcctggaggtgggcaagctggccgccagaggcgccagactggtgagcgagggcaacaagatgcacttcagactgcacagaaagaccggcgacctgttcgtgaaggagaagctggacagagagagcctgtgcggcaaggccgacccctgcgtgctgcacttcgaggtggtgctggtggagcccctgcagagcttcagagccgaggtgagagtgttcgacatcaacgacaacgcccccgtgttcctgaacaaggagcccctgctgaagatccccgagagcacccccctgggcagcagattccccctgcagagcgcccaggacctggacgtgggcctgaacggcctgcagaactacaccctgagcgccaacggctacttccacctgcacaccagattctgcagccacggccccaagtacgccgagctggtgctgaacaagcccctggacagagaggagcagcccgaggtgaacctgaccatcaccgccgtggacggcggcagcccccccaagagcggcaccgcccacatccacgtggtggtgctggacgtgaacgaccacgtgccccagttcagcagactggtgtacagagcccaggtgagcgagaacagccccaacggcagcctggtggccaccgtgaccgccgtggacctggacgagggcaccaacaaggccatcacctacagcctggcccagaaccccgaggccatcctgaagaccttccagatcgacccccagaacggcgaggtgagactgagaggccccctggacttcgaggccatcgagacctacgacatcgacatccaggccaccgacggcggcggcctgagcgcccacagcaaggtgctggtggaggtggtggacgtgaacgacaacccccccgaggtgatggtgagcagcgtgagcagccccctgcccgaggacagccccccccagaccgtggtggccctgttcaccatcagagacagagacatcagagtgggcggcaaggtgacctgcttcctgagagaggacctgcccttcgtgatcaagcccaccttcggcaacagctacagcctggtgaccgacagaagcctggacagagaggaggtgagcggctacaacatcaccatcgtggccatggacaccggcccccccagcctgagcgccgagaccatgatcgaggtgctgatcagcgacgtgaacgacaacccccccatcttcagagaggacagctacatcctgaccgtgagagagaacaacagccccgccgtgttcatcggcaaggtgcacgccgaggacctggacctgggcgagaacgcccagatcacctacagcctgctgccccccaagaacggcgacctgagcgtgttcgcctacatcagcatcaacagcggcaacggcaagctgtacgccctgagaaccatggactacgaggccatccaggacttccagttcgtggtgaaggccaccgacggcggcttcctgagcctgagcagccaggtgaccgtgagagtggtggtgctggacgacaacgacaacagacccatgatcctgtaccccctgcagaacggcaccctgccctgcaacgacctggtgcccagaagcgccgaggccggctacctggtgaccaaggtggtggccgtggacggcgacagcggccagaacagctggctgagctaccacctgctgaaggccaccgacctgggcctgttcagcgtgcagagacagaacggcgagatccacaccctgagacagatcagcgagagagaccccatgatgcagaagctgatcatcctggtgcaggaccacggccagcccgccctgagcaccaccgtgagcctgaacatcctgctggtggacggcttcagcgagccctacctgcagttccaggaccccaccaagcacagcagaaaggtgaaccccagcaccaagtacctggtgatcagcctggtgatcctgagcttcctgttcctgctgagcgtgatcgtgatcttcatcatccacgtgtaccagaagatcaagtacagagagaagttcaccatccaggagcacttctacgacgactgcaacttcagcaacaacctggtgcagggccagggcaacggcagcctgagcagaccctgcccctacgagatgtgcagcgccaccggcaccggcaacagcgagttcagattcctgaagagattcatgcccaacttccccttcccccacgccaccggcgagatcaagatggaggccggcagcagcctgccccccaacagcgacagaaacaagagccagagactggagggccacgaccaggtgagcgacgactacatgtag

SEQ ID NO: 175692 - protein, 396 aa, Artificial Sequence
  derived and/or modified sequence
MPPKKGGDGIKPPPIIGRFGTSLKIGIVGLPNVGKSTFFNVLTNSQASAENFPFCTIDPNESRVPVPDERFDFLCQYHKPASKIPAFLNVVDIAGLVKGAHNGQGLGNAFLSHISACDGIFHLTRAFEDDDITHVEGSVDPIRDIEIIHEELQLKDEEMIGPIIDKLEKVAVRGGDKKLKPEYDIMCKVKSWVIDQKKPVRFYHDWNDKEIEVLNKHLFLTSKPMVYLVNLSEKDYIRKKNKWLIKIKEWVDKYDPGALVIPFSGALELKLQELSAEERQKYLEANMTQSALPKIIKAGFAALQLEYFFTAGPDEVRAWTIRKGTKAPQAAGKIHTDFEKGFIMAEVMKYEDFKEEGSENAVKAAGKYRQQGRNYIVEDGDIIFFKFNTPQQPKKK

SEQ ID NO: 175693 - protein, 238 aa, Artificial Sequence
  derived and/or modified sequence
MIGPIIDKLEKVAVRGGDKKLKPEYDIMCKVKSWVIDQKKPVRFYHDWNDKEIEVLNKHLFLTSKPMVYLVNLSEKDYIRKKNKWLIKIKEWVDKYDPGALVIPFSGALELKLQELSAEERQKYLEANMTQSALPKIIKAGFAALQLEYFFTAGPDEVRAWTIRKGTKAPQAAGKIHTDFEKGFIMAEVMKYEDFKEEGSENAVKAAGKYRQQGRNYIVEDGDIIFFKFNTPQQPKKK

SEQ ID NO: 175694 - protein, 416 aa, Artificial Sequence
  derived and/or modified sequence
MSRTFSAKGGRDLVEGPQYLMPPKKGGDGIKPPPIIGRFGTSLKIGIVGLPNVGKSTFFNVLTNSQASAENFPFCTIDPNESRVPVPDERFDFLCQYHKPASKIPAFLNVVDIAGLVKGAHNGQGLGNAFLSHISACDGIFHLTRAFEDDDITHVEGSVDPIRDIEIIHEELQLKDEEMIGPIIDKLEKVAVRGGDKKLKPEYDIMCKVKSWVIDQKKPVRFYHDWNDKEIEVLNKHLFLTSKPMVYLVNLSEKDYIRKKNKWLIKIKEWVDKYDPGALVIPFSGALELKLQELSAEERQKYLEANMTQSALPKIIKAGFAALQLEYFFTAGPDEVRAWTIRKGTKAPQAAGKIHTDFEKGFIMAEVMKYEDFKEEGSENAVKAAGKYRQQGRNYIVEDGDIIFFKFNTPQQPKKK

SEQ ID NO: 175695 - protein, 116 aa, Artificial Sequence
  derived and/or modified sequence
MPPKKGGDGIKPPPIIGRFGTSLKIGIVGLPNVGKSTFFNVLTNSQASAENFPFCTIDPNESRVPVPDERFDFLCQYHKPASKIPAFLNVVDIAGLVKGAHNGQGLGNAFLSHISA

SEQ ID NO: 175696 - protein, 278 aa, Artificial Sequence
  derived and/or modified sequence
MPPKKGGDGIKPPPIIGRFGTSLKIGIVGLPNVGKSTFFNVLTNSQASAENFPFCTIDPNESRVPVPDERFDFLCQYHKPASKIPAFLNVVDIAGLVKGAHNGQGLGNAFLSHISACDGIFHLTRAFEDDDITHVEGSVDPIRDIEIIHEELQLKDEEMIGPIIDKLEKVAVRGGDKKLKPEYDIMCKVKSWVIDQKKPVRFYHDWNDKEIEVLNKHLFLTSKPMVYLVNLSEKDYIRKKNKWLLESTDNKAEIILLKMEILSSSNLTHLNNRRRNKI

SEQ ID NO: 175697 - protein, 103 aa, Artificial Sequence
  derived and/or modified sequence
MIGPIIDKLEKVAVRGGDKKLKPEYDIMCKVKSWVIDQKKPVRFYHDWNDKEIEVLNKHLFLTSKPMVYLVNLSEKDYIRKKNKWLIKIKEWVDKYDPGALVI

SEQ ID NO: 175698 - DNA, 1191 bp, Artificial Sequence
  derived and/or modified sequence
atgccaccgaagaagggaggtgacggcatcaaaccacccccgattatcggccggtttgggactagtctgaagatcggaatcgtgggtctgccgaacgtcgggaaaagtacattcttcaatgtacttaccaacagccaggcttcggcagaaaatttccccttttgcacaattgatcctaacgaatccagagttcccgtaccagatgagaggtttgattttctctgtcagtatcataaacctgcgtcaaaaatccctgccttcttaaatgtggtcgatatcgctggactggtcaagggcgctcataacggacagggtctgggcaatgccttcttgtctcacattagtgcatgcgacggaatcttccatcttacccgggcttttgaagacgacgacattacgcatgtggagggttctgttgaccctatccgcgacattgagattattcatgaggaattgcagctgaaggacgaggaaatgattggcccaatcattgataagcttgaaaaggtggctgtgcgggggggcgataagaagctgaaacccgaatacgacattatgtgtaaggtcaaaagctgggtcatcgatcaaaaaaaacccgtcaggttctaccacgactggaacgacaaagaaattgaggtgctgaataagcacctgttcctcaccagtaagcctatggtgtacctcgtgaatctaagcgagaaggactacatacggaagaaaaataagtggctaattaaaatcaaggagtgggtagacaagtatgaccctggggccctggtcattcctttcagtggagcccttgaattgaaactgcaagaacttagcgctgaagagagacaaaaatatttagaggctaatatgacacagagtgcactacctaaaatcatcaaggccggttttgcggctttgcaactggagtatttttttacagcaggacccgatgaggtgagggcctggaccattcggaagggtacaaaggctccacaggcagctggcaaaattcacacagattttgaaaagggattcataatggcagaagtcatgaaatacgaagattttaaggaagagggtagcgaaaacgccgtcaaggcggccggcaaatataggcagcagggaagaaattatatcgttgaagacggagacattatttttttcaagtttaataccccgcagcaacccaagaagaaatag

SEQ ID NO: 175699 - DNA, 1251 bp, Artificial Sequence
  derived and/or modified sequence
atgtcaaggactttctctgccaaaggagggagggacctggtggaaggcccccagtatctcatgccaccgaagaagggcggcgacggaataaagcctccacccattattggtaggttcggcacaagcttgaagatcggcattgtggggttgcctaatgtcggtaagtccacgttcttcaacgtactgacaaacagtcaagctagcgcagagaatttccctttctgcacaatcgatcctaacgagtcacgagtccctgtgccagatgaacggttcgatttcctctgtcagtaccacaaacccgccagcaaaatcccagcatttcttaacgtggtggatatcgctggactcgtcaaaggggctcacaacggacaaggtctcggcaatgcattcttgtctcacattagcgcttgtgatggcatcttccaccttacccgggccttcgaggacgacgacattacgcacgtggaaggatccgtggacccaatacgggacatcgagataattcacgaggaactgcagttaaaagatgaggaaatgatcggaccaattatcgacaaactggagaaggtggccgtgcgcgggggcgacaagaaactgaagcccgagtacgatatcatgtgtaaagtgaagtcctgggtgatcgatcaaaaaaaacctgtgaggttctatcacgattggaatgataaggagattgaggtcctgaataagcatttgtttctgacttctaagcctatggtgtatttggtgaacctgtctgagaaagattacattagaaaaaagaacaaatggctgataaaaattaaggagtgggtggataagtatgacccaggggctctggttattcctttttctggcgcccttgaactgaaactgcaggagcttagtgccgaggagaggcaaaaatacctcgaggcaaatatgacacagtccgctctccctaagataattaaggctgggttcgccgctttgcagcttgagtacttttttacggctggacccgatgaagtgagggcctggaccattcgaaagggtacaaaggcgcctcaagcagccggtaagattcatacagattttgagaaaggcttcatcatggcagaggtaatgaaatacgaagacttcaaggaggagggctcagagaacgccgtgaaggctgcaggaaaataccgtcagcagggccggaactacattgtggaggacggagatatcattttttttaagtttaacaccccacagcaacccaagaagaagtag

SEQ ID NO: 175700 - DNA, 351 bp, Artificial Sequence
  derived and/or modified sequence
atgccaccaaagaaggggggggacgggatcaagcctcctccgattatcggtcggtttggtaccagccttaagattggcattgtgggcctccccaatgttggaaagagtacttttttcaatgtgctgaccaactcccaggcctcagcagagaatttccctttctgcacaatagaccccaacgagtccagagttcctgtgccagacgagcgctttgacttcctctgccaatatcataaacccgccagtaaaatcccagcattcctgaatgtggttgatatagcgggtcttgtgaaaggcgcccacaacggacaaggactgggcaacgccttcctcagccacatcagtgcatag

SEQ ID NO: 175701 - DNA, 837 bp, Artificial Sequence
  derived and/or modified sequence
atgccgcctaagaaggggggcgatggtataaagccacctcccataatagggcggtttggcaccagtctgaaaattggaattgtcgggctgcctaatgtcggaaaaagcacttttttcaacgtcctgacaaacagccaggcatctgccgagaactttcctttctgtacaattgatcccaatgagtctcgtgttcccgtccctgatgagcggttcgacttcctgtgccagtaccacaagccagcctcgaaaatacctgcatttcttaacgttgtggatattgcagggttagttaagggcgctcacaatggacaggggttaggaaatgcattcctgtcccatatcagcgcatgtgatggaatctttcatctgacccgcgcctttgaggacgacgatattactcatgtcgaagggtcagttgacccaataagagacatcgaaattattcatgaggagctgcagctcaaagatgaggaaatgatcggaccaatcatcgataaactcgaaaaggtcgctgttcgcggaggggacaaaaaactgaagccggagtacgacataatgtgcaaggttaagagttgggtgattgatcaaaagaaacccgtgcgcttttatcacgactggaatgacaaggagatcgaagtgctgaataagcatctctttctgacctcaaagccaatggtgtatttggtgaatttgtccgagaaggattacatccgcaagaagaataaatggttgttggaaagcaccgacaataaagcagagatcatcctcctaaaaatggagatattgagtagtagcaatctgacacatctgaataaccgacgcagaaacaaaatctag

SEQ ID NO: 175702 - DNA, 1191 bp, Artificial Sequence
  derived and/or modified sequence
atgccacccaagaagggaggagatggcatcaagcccccacccatcatcggccgcttcggcaccagcctgaagattggaattgtgggcctgcccaacgtgggcaagagcaccttcttcaacgtgctgaccaacagccaggccagcgctgagaacttccccttctgcaccatcgaccccaatgaaagccgggtgcctgtgcctgatgaaagatttgacttcctgtgccagtaccacaagccagccagcaagatcccagccttcctgaatgtggtggacattgctggcctggtgaagggggcccacaacggccagggcctgggcaatgccttcctgagccacatcagcgcctgtgatggcatcttccacctgacccgggcctttgaagatgatgacatcacccacgtggagggctctgtggaccccatccgggacatcgagatcatccacgaggagctgcagctgaaggatgaggagatgattggccccatcatcgacaagctggagaaggtggccgtgcggggcggggacaagaagctgaagccagaatatgacatcatgtgcaaggtgaagtcctgggtgattgaccagaagaagcctgtgcgcttctaccatgactggaatgacaaggagattgaggtgctgaacaagcacctgttcctgaccagcaagcccatggtgtacctggtgaacctgtctgagaaggactacatcaggaagaagaacaagtggctgatcaagatcaaggagtgggtggacaagtatgaccccggggccctggtgatccccttcagcggggccctggagctgaagctgcaggagctgtctgctgaggagcggcagaagtacctggaggccaacatgacccagagcgccctgcccaagatcatcaaggccggctttgctgccctgcagctggagtacttcttcaccgctggcccagatgaggtgcgggcctggaccatcaggaagggcaccaaggccccccaggccgccggcaagatccacacagactttgagaagggcttcatcatggccgaggtgatgaagtatgaggacttcaaggaggagggctctgaaaatgctgtgaaggctgctgggaagtaccggcagcagggcaggaactacatcgtggaggatggagacatcatcttcttcaagttcaacaccccccagcagcccaagaagaagtag

SEQ ID NO: 175703 - DNA, 1251 bp, Artificial Sequence
  derived and/or modified sequence
atgagcaggaccttcagcgccaagggcggccgggacctggtggagggcccccagtacctgatgccacccaagaagggaggagatggcatcaagcccccacccatcatcggccgcttcggcaccagcctgaagattggaattgtgggcctgcccaacgtgggcaagagcaccttcttcaacgtgctgaccaacagccaggccagcgctgagaacttccccttctgcaccatcgaccccaatgaaagccgggtgcctgtgcctgatgaaagatttgacttcctgtgccagtaccacaagccagccagcaagatcccagccttcctgaatgtggtggacattgctggcctggtgaagggggcccacaacggccagggcctgggcaatgccttcctgagccacatcagcgcctgtgatggcatcttccacctgacccgggcctttgaagatgatgacatcacccacgtggagggctctgtggaccccatccgggacatcgagatcatccacgaggagctgcagctgaaggatgaggagatgattggccccatcatcgacaagctggagaaggtggccgtgcggggcggggacaagaagctgaagccagaatatgacatcatgtgcaaggtgaagtcctgggtgattgaccagaagaagcctgtgcgcttctaccatgactggaatgacaaggagattgaggtgctgaacaagcacctgttcctgaccagcaagcccatggtgtacctggtgaacctgtctgagaaggactacatcaggaagaagaacaagtggctgatcaagatcaaggagtgggtggacaagtatgaccccggggccctggtgatccccttcagcggggccctggagctgaagctgcaggagctgtctgctgaggagcggcagaagtacctggaggccaacatgacccagagcgccctgcccaagatcatcaaggccggctttgctgccctgcagctggagtacttcttcaccgctggcccagatgaggtgcgggcctggaccatcaggaagggcaccaaggccccccaggccgccggcaagatccacacagactttgagaagggcttcatcatggccgaggtgatgaagtatgaggacttcaaggaggagggctctgaaaatgctgtgaaggctgctgggaagtaccggcagcagggcaggaactacatcgtggaggatggagacatcatcttcttcaagttcaacaccccccagcagcccaagaagaagtag

SEQ ID NO: 175704 - DNA, 351 bp, Artificial Sequence
  derived and/or modified sequence
atgccacccaagaagggaggagatggcatcaagcccccacccatcatcggccgcttcggcaccagcctgaagattggaattgtgggcctgcccaacgtgggcaagagcaccttcttcaacgtgctgaccaacagccaggccagcgctgagaacttccccttctgcaccatcgaccccaatgaaagccgggtgcctgtgcctgatgaaagatttgacttcctgtgccagtaccacaagccagccagcaagatcccagccttcctgaatgtggtggacattgctggcctggtgaagggggcccacaacggccagggcctgggcaatgccttcctgagccacatcagcgcctag

SEQ ID NO: 175705 - DNA, 837 bp, Artificial Sequence
  derived and/or modified sequence
atgccacccaagaagggaggagatggcatcaagcccccacccatcatcggccgcttcggcaccagcctgaagattggaattgtgggcctgcccaacgtgggcaagagcaccttcttcaacgtgctgaccaacagccaggccagcgctgagaacttccccttctgcaccatcgaccccaatgaaagccgggtgcctgtgcctgatgaaagatttgacttcctgtgccagtaccacaagccagccagcaagatcccagccttcctgaatgtggtggacattgctggcctggtgaagggggcccacaacggccagggcctgggcaatgccttcctgagccacatcagcgcctgtgatggcatcttccacctgacccgggcctttgaagatgatgacatcacccacgtggagggctctgtggaccccatccgggacatcgagatcatccacgaggagctgcagctgaaggatgaggagatgattggccccatcatcgacaagctggagaaggtggccgtgcggggcggggacaagaagctgaagccagaatatgacatcatgtgcaaggtgaagtcctgggtgattgaccagaagaagcctgtgcgcttctaccatgactggaatgacaaggagattgaggtgctgaacaagcacctgttcctgaccagcaagcccatggtgtacctggtgaacctgtctgagaaggactacatcaggaagaagaacaagtggctgctggagagcacagacaacaaggccgagatcatcctgctgaagatggagatcctgagcagcagcaacctgacccacctgaacaacagaagaagaaacaagatctag

SEQ ID NO: 175706 - DNA, 1191 bp, Artificial Sequence
  derived and/or modified sequence
atgccccccaagaagggcggcgacggcatcaagcccccccccatcattggacgctttggcacctcactgaagatcggaatcgtcgggctgcccaatgtagggaagtccaccttttttaatgtgttgactaacagtcaggcctctgcagaaaactttcctttttgcactatcgatcctaatgagtccagggtccccgtccccgatgagaggtttgatttcctgtgtcaatatcataagcctgcttccaaaatccctgccttcttgaacgtggtggatatcgccggattggtcaagggggcccacaacggacaaggccttgggaatgcctttctctcacatatctccgcctgcgacggcatctttcacctcacacgggcctttgaggacgatgatatcacacatgtagagggaagtgttgaccccatacgtgacatcgagataatccacgaggaactgcagttaaaggacgaagaaatgattgggccaattatcgataaactagagaaagtggcagttagaggtggggataaaaagctcaaaccggagtatgacattatgtgcaaggtgaaatcttgggtgattgaccagaaaaagccagttaggttttaccacgactggaatgataaggaaatcgaggtgctcaacaaacatctatttctgacttccaagcctatggtgtacctcgttaatttgtctgaaaaagattatatccgcaagaagaacaaatggctgatcaaaattaaggagtgggtggataagtacgaccctggagcacttgtgattccatttagtggcgccttggagctcaagctgcaggagctgtccgctgaggaacgccagaagtatctggaagccaacatgacacagtcagccttgccaaaaataataaaggccggctttgctgcacttcagctggagtatttctttaccgccggccccgatgaagtacgagcctggaccataagaaaaggcacgaaggctccacaagctgcgggtaaaatccacaccgattttgagaaaggctttattatggccgaagtgatgaaatatgaagacttcaaggaagaaggctctgaaaatgctgtaaaggcagccggcaagtatcggcaacaggggagaaattatattgtcgaagacggagacatcatcttctttaaattcaatactccgcagcaacccaaaaagaagtag

SEQ ID NO: 175707 - DNA, 1251 bp, Artificial Sequence
  derived and/or modified sequence
atgagccggaccttcagcgccaagggcggccgggacctggtggaggggccccaatacctaatgccccctaagaagggcggcgatgggatcaaaccaccgcctataatcgggcgctttggaactagtctcaagatcggaatcgttggccttcctaacgtggggaaaagtacattcttcaatgtgctaacgaattctcaggcatctgcggaaaacttccccttctgcaccatcgacccaaacgaaagtcgagtgccagtcccggacgagaggtttgacttcttgtgccagtaccataaaccggcttcaaaaatccccgcatttcttaacgttgtcgatatagcaggtttggtgaaaggtgcgcacaacggccagggactaggcaatgcgttcctcagtcacatctccgcgtgtgacggtatttttcacctgactcgtgctttcgaggatgacgatattactcatgttgagggcagtgtcgatcccatcagagacatcgagattatacacgaagagttgcaactgaaagacgaggagatgatcggcccgattatcgacaaacttgagaaagtggcagtccggggaggggacaagaaacttaagcccgagtacgacattatgtgcaaagtgaagtcctgggtcattgatcagaagaagcctgtaaggttttatcacgattggaatgacaaggagattgaagtgctaaataaacaccttttccttactagcaagccgatggtgtacctggtgaatctgtcagagaaggactacattcgcaagaagaacaagtggctgatcaaaattaaggaatgggttgacaaatacgatcctggagccctagtgattcctttctctggggcgctcgaactgaaactgcaagagctgtccgcggaggaacgccaaaaatatctggaagcaaatatgacacagtccgcactgcccaagataataaaagctggattcgcagctctgcaattggagtacttttttaccgcaggccccgatgaggtgagagcctggacaattagaaagggcacaaaagccccccaggctgcgggaaaaattcacactgactttgaaaagggttttataatggctgaggtgatgaagtatgaggatttcaaggaagagggcagtgaaaacgcggtgaaagctgctggcaagtacaggcagcaagggcggaattatatagttgaagacggcgatattatatttttcaagtttaatactccccagcagccgaaaaaaaaatag

SEQ ID NO: 175708 - DNA, 351 bp, Artificial Sequence
  derived and/or modified sequence
atgccccccaagaagggcggcgacggcatcaagcccccccccatcatcgggagatttggcactagtctgaagattggcattgtcgggctgcctaatgtcggtaaatccacgttctttaacgtcctgaccaattctcaagccagcgctgagaactttcctttctgtacaatcgatcctaacgagagtcgggtccccgtacccgatgaacgctttgacttcctgtgtcagtatcataagcctgcgtctaaaatcccagccttcttgaacgtggttgatatcgcaggccttgtgaagggggctcataacggtcagggactcggcaatgctttcctgtcccatatatctgcatag

SEQ ID NO: 175709 - DNA, 837 bp, Artificial Sequence
  derived and/or modified sequence
atgccccccaagaagggcggcgacggcatcaagcccccccccatcataggccgcttcggcacctcgttaaagatcggtatcgtcggactccctaatgtggggaagagcacttttttcaacgtactaaccaactcacaggcgagcgccgagaactttcccttctgtacaatcgatcctaatgagtcaagggttccagtgccagacgagcgctttgatttcttgtgtcaataccacaaacccgcctcaaagataccagcatttttgaacgttgttgatattgccggccttgtgaaaggcgcccacaacggccagggcttaggcaacgcattcttaagtcacattagcgcctgcgacggaatcttccatcttacaagggctttcgaagatgacgacatcacacacgtcgaaggcagtgtagatcccatcagagacattgagattattcacgaagagcttcaactaaaggacgaggagatgattgggccgatcattgataagctcgaaaaagttgcagtgagaggcggggataagaaactcaaacccgaatatgacattatgtgcaaagtaaaaagctgggtgatagatcaaaagaaacccgtgaggttttaccatgactggaacgataaggagattgaagtcttgaacaaacacctgtttttgacaagtaaaccgatggtttatcttgttaacttgagcgaaaaagattatatccgaaagaagaacaagtggctgctggagtcaaccgacaacaaggccgagattattctacttaagatggagattttgtcaagctccaacctcactcacctgaataataggcgaagaaataaaatatag

SEQ ID NO: 175710 - DNA, 4417 bp, Artificial Sequence
  derived and/or modified sequence
ccccggccggttaggccaatgggcgggacgcgcgggcaaggcggggaggggcggggcccatggtctgcgcgcaggtgccgctcggcgcccggcccgcccgttccgccgctgtcgccgccgtcgtgcgtgccgctcggcggaggggacgggcctgcgttctctcctccttcctccccgcctccagctgccggcaggacctttctctcgctgccgctgggaccccgtgtcatcgcccaggccgagcacgatgccccctaaaaagggaggtgatggaattaaaccacccccaatcattggaagatttggaacctcactgaaaattggtattgttggattgccaaatgttgggaaatctactttcttcaatgtgttaaccaatagtcaggcttcagcagaaaacttcccgttctgcactattgatcctaatgagagcagagtacctgtgccagatgaaaggtttgactttctttgtcaataccacaaaccagcaagcaaaattcctgcctttctaaatgtggtggatattgctggccttgtgaaaggagctcacaatgggcagggcctggggaatgcttttttatctcatattagtgcctgtgatggcatctttcatctaacacgtgcttttgaagatgatgatatcacgcacgttgaaggaagtgtagatcctattcgagatatagaaataatacatgaagagcttcagcttaaagatgaggaaatgattgggcccattatagataaactagaaaaggtggctgtgagaggaggagataaaaaactaaaacctgaatatgatataatgtgcaaagtaaaatcctgggttatagatcaaaagaaacctgttcgcttctatcatgattggaatgacaaagagattgaagtgttgaataaacacttatttttgacttcaaaaccaatggtctacttggttaatctttctgaaaaagactacattagaaagaaaaacaaatggttgataaaaattaaagagtgggtggacaagtatgacccaggtgctttggtcattccttttagtggggccttggaactcaagttgcaagaattgagtgctgaggagagacagaagtatctggaagcgaacatgacacaaagtgctttgccaaagatcattaaggctgggtttgcagcactccaactagaatactttttcactgcaggcccagatgaagtgcgtgcatggaccatcaggaaagggactaaggctcctcaggctgcaggaaagattcacacagattttgaaaagggattcattatggctgaagtaatgaaatacgaagattttaaagaggaaggttctgaaaatgcagtcaaggctgctggaaagtacagacaacaaggcagaaattatattgttgaagatggagatattatcttcttcaaatttaacacacctcaacaaccgaagaagaaataaaatttagttattgctcagataaacatacaacttccaaaaggcatctgatttttaaaaaattaaaatttctgaaaaccaatgcgacaaataaagttggggagatgggaatctttgacaaacaaattatttttatttgttttaaaattaaaatactgtgtacccccccccccccatgaaatgcaggttcactaaatgtgaacagctttgcttttcacgtgattaagaccctactccaaattgtagaagcttttcaggaaccatattactctcatgatacttcattaatctccatcatgtatgccaagcctgacacatttgacagtgaggacaatgtggcttgctcctttttgaatctacagataatgcatgttttacagtactccagatgtctacactcaataaaacatttgacaaaaccagccttggtgtgtttggggatgtctgtattgactgactgtggtgtgctgaatgcgatacggcacctggtggttgctgattacagaattttaaggcgtgtgtatgacacagtaactggcagtgtggggcagctgcaattgtatcttaaaagtgagtctttcatgggaatcagaagaatagtataccagggatttgtctcaaaaaagttaattaatttatagatcaacatttattgaaagatgatagcaatgatattatgagggatatgagataggtgactgaccacaaagaagaaaattctgtctcaaaaattaaagaattttgtttgttattgttgttctgaccatattgaaaagaggttcacttttaatctttcctttgaaattattaaattgtaaaaactgacccattgatgtctggtgggttatgttttgcttcaattcagcaatgtgtataaaagttcctacactgattttgaaatactaagatcagactttgaaaattttaaaaattctttcattcttacttttcagatatttgagagcagtcgaagtggtagtatgggtaagttaagcacttcttaacattgtagcagaaaattccaaaagaaagactagaacaaattggtaatttggagaccctttgccacttagccttctcttgtgatgatggcctgaaagctctctcggccctgagcctccctttctctcccatgtttccattcctgtgagacctcccttccttgtccttgtcctctgcccttttgtgctcttctgtgatcacaggaccatttccatggaatgcagattcatacccagccagcctttgcctctactgtatcgctttgggactttaaagatgcagaagtattagaacacacacaaacttaaaatggaaagttaccaaatgtagcactagaggcaagaaaaggggtgattttttaaagatttggctatacttaagatatttaaagaggatgaggttgagtcgtgagtataatttagaagctctccagtgagtatttttttagtatcaaatagtgatcttcttttgctaacataaaaatgagtaaactacagcagagaaataagaataaaactaatgaagggttttttaaaagaactaaataaaacaaataaaactaggctacaggtatagctgaccaagtttgctgtgaaaaatccttgttatatctatttctgtattggagtaatgtgtagattagtggattgttagggatttcagcagtataagaaagaatcaaatatcttgcttttgggtcttctccaaagtaaattgcatggacttcttaaagaagtttgaaatcagtaaaaagacattaggatcatgcaattttactttgtctagcttctaatgtggtaaattgcacattgtgcaacagaaccattaataaaagaaaggagttagttttgaggtaactgcattcattaggggctgaaaataaatgttaaaaatgtttaatttggttagaagttctacaacattgtatgtacatatacaaaatttcattttctctgaaagtcgagaattccaagaactgttacatataatcatatatatgcctatatctaaacgttttccctcctttaatattgataaagttaatatattttaggatgttatgtaaatatttttgcatgtatctgtagctccatcttaatcaaatttatggttaaaagagatttgaggccaggcgtggaggctcacacctataatcccaacactttgggaggccgaggtgggaggatcacttgagcacaggagtttgagaccagcctgtgcaacatcatgaaacatcatctctacataaaaaaatacatatatacaaaaattagctgggcatcatggcacacacctgtagtcccagctacttaggaggctgagatgggaggattgatcgatcgcttgagcctgggaggtggaggctactgtgagccatgatcatgccactgcactccagcctgggcaacagagtgagaccctgtctccaaagagaaagagaaacttgagaaggcttgtgcccaaagcttgaagaaagattgtaatagcatttagttgtgttttatcatgttatcttcataacatgcattttgcatatggctcagagcagagccggatctcccaaggaagcacaaatagtttttgtcgctaacttagttatgagtgaagcctctgttcacttataacttgccagtttcattggtggaataagtccccttactcatgattcatcaatattcctatattaaaattccagtttgatgtttgtctctagttgtctgtgtataatatttccaaagctcctttgtaaaccccgtctcctttcattcagagagtcagagacggtatctcctcctcctgcctcttctattgttctgattagtctacttaaattcacttgatgctctttttattttacaagagacttgagaaatgtcggttgttcctaatggcaaactactttagctgggaaaattcatttcaacttattttaagcttgtaaaatacactgtggtgataaaataaaagagctgggtttga

SEQ ID NO: 175711 - DNA, 1656 bp, Artificial Sequence
  derived and/or modified sequence
gttccgccgctgtcgccgccgtcgtgcgtgccgctcggcggaggggacgggcctgcgttctctcctccttcctccccgcctccagctgccggcaggacctttctctcgctgccgctgggaccccgtgtcatcgcccaggccgagcacggaaatctactttcttcaatgtgttaaccaatagtcaggcttcagcagaaaacttcccgttctgcactattgatcctaatgagagcagagtacctgtgccagatgaaaggtttgactttctttgtcaataccacaaaccagcaagcaaaattcctgcctttctaaatgtggtggatattgctggccttgtgaaaggagctcacaatgggcagggcctggggaatgcttttttatctcatattagtgcctgtgatggcatctttcatctaacacgtgcttttgaagatgatgatatcacgcacgttgaaggaagtgtagatcctattcgagatatagaaataatacatgaagagcttcagcttaaagatgaggaaatgattgggcccattatagataaactagaaaaggtggctgtgagaggaggagataaaaaactaaaacctgaatatgatataatgtgcaaagtaaaatcctgggttatagatcaaaagaaacctgttcgcttctatcatgattggaatgacaaagagattgaagtgttgaataaacacttatttttgacttcaaaaccaatggtctacttggttaatctttctgaaaaagactacattagaaagaaaaacaaatggttgataaaaattaaagagtgggtggacaagtatgacccaggtgctttggtcattccttttagtggggccttggaactcaagttgcaagaattgagtgctgaggagagacagaagtatctggaagcgaacatgacacaaagtgctttgccaaagatcattaaggctgggtttgcagcactccaactagaatactttttcactgcaggcccagatgaagtgcgtgcatggaccatcaggaaagggactaaggctcctcaggctgcaggaaagattcacacagattttgaaaagggattcattatggctgaagtaatgaaatacgaagattttaaagaggaaggttctgaaaatgcagtcaaggctgctggaaagtacagacaacaaggcagaaattatattgttgaagatggagatattatcttcttcaaatttaacacacctcaacaaccgaagaagaaataaaatttagttattgctcagataaacatacaacttccaaaaggcatctgatttttaaaaaattaaaatttctgaaaaccaatgcgacaaataaagttggggagatgggaatctttgacaaacaaattatttttatttgttttaaaattaaaatactgtgtacccccccccccccatgaaatgcaggttcactaaatgtgaacagctttgcttttcacgtgattaagaccctactccaaattgtagaagcttttcaggaaccatattactctcatgatacttcattaatctccatcatgtatgccaagcctgacacatttgacagtgaggacaatgtggcttgctcctttttgaatctacagataatgcatgttttacagtactccagatgtctacactcaataaaacatttgacaaaacc

SEQ ID NO: 175712 - DNA, 2071 bp, Artificial Sequence
  derived and/or modified sequence
agtggccaagatggggccagggcagcgggtggcttggggatgtgtggatgaatgaggcgctgtcggactaggccgcgcgtcgggagatcggcctacgcctcacgcgggaaagccctggggaaagccttctcccgacgccaggacgcccggtggcccagtccggagaggaggatggggggtggggcccactttgggtgggctgccggccacctctctgtaggccagaggacccgacaggcgctgttcctgtatctgttctttggaggcctgggagttggccaggaacaggtgtcaggacgctgagaagggaaattcctggccctcggggtcagggatcagaggctggaatactactgcaagggcagggccccagcgtggtcctaggaggtacaactctcagccagaagactgggacagttttagttcccagcttctgagacgtgagcttagcggtctttgtgatttcactttgcagtccaagggtgggagtaattctgcacgcatgatttggagacagaactagtaagggacagagaaagtttcgacttgtaaataaaaaggttccgtcgattaatttaccattagaaatagtaaccataatgtagattttggaggttgcttatgaggactgatgagccgtaccttcagtgccaaaggtgggagggacttggtggaaggaccccagtacctgatgccccctaaaaagggaggtgatggaattaaaccacccccaatcattggaagatttggaacctcactgaaaattggtattgttggattgccaaatgttgggaaatctactttcttcaatgtgttaaccaatagtcaggcttcagcagaaaacttcccgttctgcactattgatcctaatgagagcagagtacctgtgccagatgaaaggtttgactttctttgtcaataccacaaaccagcaagcaaaattcctgcctttctaaatgtggtggatattgctggccttgtgaaaggagctcacaatgggcagggcctggggaatgcttttttatctcatattagtgcctgtgatggcatctttcatctaacacgtgcttttgaagatgatgatatcacgcacgttgaaggaagtgtagatcctattcgagatatagaaataatacatgaagagcttcagcttaaagatgaggaaatgattgggcccattatagataaactagaaaaggtggctgtgagaggaggagataaaaaactaaaacctgaatatgatataatgtgcaaagtaaaatcctgggttatagatcaaaagaaacctgttcgcttctatcatgattggaatgacaaagagattgaagtgttgaataaacacttatttttgacttcaaaaccaatggtctacttggttaatctttctgaaaaagactacattagaaagaaaaacaaatggttgataaaaattaaagagtgggtggacaagtatgacccaggtgctttggtcattccttttagtggggccttggaactcaagttgcaagaattgagtgctgaggagagacagaagtatctggaagcgaacatgacacaaagtgctttgccaaagatcattaaggctgggtttgcagcactccaactagaatactttttcactgcaggcccagatgaagtgcgtgcatggaccatcaggaaagggactaaggctcctcaggctgcaggaaagattcacacagattttgaaaagggattcattatggctgaagtaatgaaatacgaagattttaaagaggaaggttctgaaaatgcagtcaaggctgctggaaagtacagacaacaaggcagaaattatattgttgaagatggagatattatcttcttcaaatttaacacacctcaacaaccgaagaagaaataaaatttagttattgctcagataaacatacaacttccaaaaggcatctgatttttaaaaaattaaaatttctgaaaaccaatgcgacaaataaagttggggagatgggaatctttgacaaacaaattatttttatttgttttaaaattaaaatactgtgtacccccccccccccatgaaatgcaggttcac

SEQ ID NO: 175713 - DNA, 709 bp, Artificial Sequence
  derived and/or modified sequence
agttctcgagcctcagcctcccgagtagctggaattacaggctgcgcgcctgatggccggctaatttttttgtatttgtttttctttttagtagagacggggtttctccgtgttggccaggctggtctcgactcctggtctcaagcagtctgcccacctcggcctccccctcccaaagtgctgggattacaggcctgagccaccgtgcccggcccaacaaatattgattttagatcagtctttctgggacttctcagcaatgactcttttgacaacggatatgtttacagaactttttaaacatttttgctgaaaaaaaagtggatttagctctgtgttagttttggatcgctatatacaatgccccctaaaaagggaggtgatggaattaaaccacccccaatcattggaagatttggaacctcactgaaaattggtattgttggattgccaaatgttgggaaatctactttcttcaatgtgttaaccaatagtcaggcttcagcagaaaacttcccgttctgcactattgatcctaatgagagcagagtacctgtgccagatgaaaggtttgactttctttgtcaataccacaaaccagcaagcaaaattcctgcctttctaaatgtggtggatattgctggccttgtgaaaggagctcacaatgggcagggcctggggaatgcttttttatctcatattagtgcct

SEQ ID NO: 175714 - DNA, 1270 bp, Artificial Sequence
  derived and/or modified sequence
gtgtcatcgcccaggccgagcacgatgccccctaaaaagggaggtgatggaattaaaccacccccaatcattggaagatttggaacctcactgaaaattggtattgttggattgccaaatgttgggaaatctactttcttcaatgtgttaaccaatagtcaggcttcagcagaaaacttcccgttctgcactattgatcctaatgagagcagagtacctgtgccagatgaaaggtttgactttctttgtcaataccacaaaccagcaagcaaaattcctgcctttctaaatgtggtggatattgctggccttgtgaaaggagctcacaatgggcagggcctggggaatgcttttttatctcatattagtgcctgtgatggcatctttcatctaacacgtgcttttgaagatgatgatatcacgcacgttgaaggaagtgtagatcctattcgagatatagaaataatacatgaagagcttcagcttaaagatgaggaaatgattgggcccattatagataaactagaaaaggtggctgtgagaggaggagataaaaaactaaaacctgaatatgatataatgtgcaaagtaaaatcctgggttatagatcaaaagaaacctgttcgcttctatcatgattggaatgacaaagagattgaagtgttgaataaacacttatttttgacttcaaaaccaatggtctacttggttaatctttctgaaaaagactacattagaaagaaaaacaaatggctgctggaaagtacagacaacaaggcagaaattatattgttgaagatggagatattatcttcttcaaatttaacacacctcaacaaccgaagaagaaataaaatttagttattgctcagataaacatacaacttccaaaaggcatctgatttttaaaaaattaaaatttctgaaaaccaatgcgacaaataaagttggggagatgggaatctttgacaaacaaattatttttatttgttttaaaattaaaatactgtgtacccccccccccccatgaaatgcaggttcactaaatgtgaacagctttgcttttcacgtgattaagaccctactccaaattgtagaagcttttcaggaaccatattactctcatgatacttcattaatctccatcatgtatgccaagcctgacacatttgacagtgaggacaatgtggcttgctcctttttgaatctacagataatgcatgttttacagtactccagatgtctacactcaataaaacatttgacaaaa

SEQ ID NO: 175715 - DNA, 485 bp, Artificial Sequence
  derived and/or modified sequence
atatagctaattgaagattctcatcttgtgtgtaagcccagtttgcagcaaatgtggactaattttatatagcaggtgcttttgaagatgatgatatcacgcacgttgaaggaagtgtagatcctattcgagatatagaaataatacatgaagagcttcagcttaaagatgaggaaatgattgggcccattatagataaactagaaaaggtggctgtgagaggaggagataaaaaactaaaacctgaatatgatataatgtgcaaagtaaaatcctgggttatagatcaaaagaaacctgttcgcttctatcatgattggaatgacaaagagattgaagtgttgaataaacacttatttttgacttcaaaaccaatggtctacttggttaatctttctgaaaaagactacattagaaagaaaaacaaatggttgataaaaattaaagagtgggtggacaagtatgacccaggtgctttggtcatt

SEQ ID NO: 175716 - DNA, 1191 bp, Artificial Sequence
  derived and/or modified sequence
atgcctccgaaaaaggggggtgacggtataaaaccacctccaatcattggacggttcggcacctccctgaagataggcattgttggcctgccaaacgtgggcaagtccaccttcttcaatgtcttgaccaacagccaggccagtgctgagaactttccattttgtaccatcgatcctaatgagagccgcgtacctgttccagatgaacggtttgatttcctatgccagtatcacaaacccgcatccaaaattccagccttcctgaatgtggtggatatcgctggattagttaaaggggctcataacggccagggacttggtaacgcttttctgagccatatctcggcatgtgacggtattttccacctgacccgtgccttcgaagatgatgatatcacccacgtggaggggtcagtagatcctatccgcgatatcgaaattatacatgaggagctgcagctaaaagatgaagagatgatcggaccaatcatagataaattggaaaaagtggcagtgcgtggcggagacaagaaactgaaaccggagtacgacatcatgtgcaaagtaaagagctgggtgatagaccagaaaaagcccgtaagattctaccacgactggaatgacaaggaaatagaagttctaaacaagcatctgttcctcaccagcaagccgatggtgtatctcgtgaatctcagtgaaaaggactatatcaggaagaagaataaatggttgattaaaattaaggagtgggtcgacaaatatgatcctggcgctcttgtgatccccttcagcggtgctctggagctgaaattacaggagctttccgcagaggagcgtcaaaagtacctggaggccaatatgacccagtctgcgctgcccaagattatcaaggctggcttcgccgctctacaactcgagtatttctttacagctggacccgacgaagtgcgtgcgtggactatccgtaaaggaaccaaagcccctcaagccgcaggaaagatccacaccgattttgagaaagggtttattatggccgaagtgatgaagtacgaggacttcaaagaggaggggtcggagaacgccgttaaggccgcagggaagtaccggcagcagggtagaaactacatcgtggaggatggcgatattatcttctttaagtttaataccccacagcaaccgaagaagaagtag

SEQ ID NO: 175717 - DNA, 1251 bp, Artificial Sequence
  derived and/or modified sequence
atgtctagaacctttagcgccaaggggggaagggaccttgtggagggcccacagtacctcatgcctcccaagaagggaggcgatggtatcaagcccccacccatcatcggaagattcggcacttccctgaaaatcggcatcgtcggtctgccgaacgtgggtaagtctaccttcttcaatgtgctgactaattcccaggccagtgcagagaacttccctttctgcactattgaccccaatgaaagccgagtgcctgtgcctgacgagcgctttgactttctgtgccagtaccataagcctgcctctaaaatacccgcattcttaaatgtcgtggatatcgccggtctagtaaaaggcgctcacaacggccagggcctggggaatgccttcctgtcacacatctcagcttgcgatgggatcttccatctcaccagagcctttgaagacgacgacatcactcacgtggaagggtcagtggaccctataagggacatagagatcatccacgaggaacttcagctcaaagatgaggaaatgatcggccctatcattgacaagctcgaaaaagtggcagtcagaggcggtgacaaaaagctgaaacccgagtacgacatcatgtgcaaggtcaagtcatgggtgatcgaccagaagaagccagtcaggttttaccacgattggaacgacaaggagatagaggtcttaaacaagcacctgttcctgacttctaaaccgatggtatatctggttaatctctccgagaaagattacatcaggaaaaagaataaatggctcattaaaatcaaggagtgggtcgataagtatgacccaggcgcactcgttattcccttctcaggggctctcgagttgaagctccaggagctttctgcggaagagaggcagaagtatcttgaagccaatatgacacagtcggcacttccaaaaatcatcaaagccggtttcgcggctctacagctggagtatttttttacagctggccctgacgaagtcagagcctggacaattagaaaggggacaaaggcccctcaagctgctggaaagattcatactgattttgagaagggctttataatggcggaagtaatgaaatacgaagactttaaagaagaaggttctgagaatgcagttaaggccgcagggaagtatcgtcagcagggaaggaattacattgtagaagacggcgatatcattttttttaaatttaacacacctcaacagcctaagaagaagtag

SEQ ID NO: 175718 - DNA, 351 bp, Artificial Sequence
  derived and/or modified sequence
atgccccctaagaagggtggcgacgggatcaaacccccaccaattatcggacgcttcggcactagcctgaagattggcatcgtgggcttgcccaatgtggggaagtccaccttctttaacgtgctcaccaactcccaagccagtgccgagaacttcccgttctgtaccattgaccccaatgaatcaagggttcctgtgcccgatgagcgttttgacttcctgtgtcagtatcataaacctgctagtaagatccctgccttcctgaacgtggtggacattgcaggtttggtgaagggagctcacaatgggcagggactggggaacgcgttcctgagccacatcagcgcctag

SEQ ID NO: 175719 - DNA, 837 bp, Artificial Sequence
  derived and/or modified sequence
atgccccctaaaaaagggggtgatggaataaaacctccacccataatcgggaggttcggaacctctctcaagatcggcatcgtgggccttcccaatgtggggaaatccacattcttcaatgttctgaccaatagccaggcctctgcggaaaactttccgttttgcacgatagatcccaacgagagtagagtgccggtgcctgacgagcggttcgacttcttgtgccagtaccataagcctgcaagcaaaattcccgctttcctgaatgtagtcgacatcgctggcctcgtaaagggcgcacacaatggacagggcttaggaaacgcatttctgtcccacatcagtgcctgtgatgggatcttccacctgaccagggccttcgaggacgacgatataacccacgtggagggatctgtggatccaatcagagacatagagatcatccatgaagagttgcaactgaaggatgaagaaatgatcggccctatcatagataaattagaaaaggtggccgtgcgcggaggagataagaaactgaagcctgaatacgatattatgtgtaaggtgaagtcttgggtgatagaccagaaaaagcccgttcgcttttaccacgattggaacgacaaagagatcgaagtcctcaataaacacctgtttcttacatctaagcccatggtgtaccttgtgaacctttctgagaaggactatattaggaaaaaaaacaagtggctactcgagtccaccgataataaggccgagattatcctcttgaaaatggagatcctctcttcttcgaatctaactcacctgaataataggagacggaacaagatttag

SEQ ID NO: 175720 - DNA, 1191 bp, Artificial Sequence
  derived and/or modified sequence
atgccccccaagaagggcggcgacggcatcaagcccccccccatcatcggcagattcggcaccagcctgaagatcggcatcgtgggcctgcccaacgtgggcaagagcaccttcttcaacgtgctgaccaacagccaggccagcgccgagaacttccccttctgcaccatcgaccccaacgagagcagagtgcccgtgcccgacgagagattcgacttcctgtgccagtaccacaagcccgccagcaagatccccgccttcctgaacgtggtggacatcgccggcctggtgaagggcgcccacaacggccagggcctgggcaacgccttcctgagccacatcagcgcctgcgacggcatcttccacctgaccagagccttcgaggacgacgacatcacccacgtggagggcagcgtggaccccatcagagacatcgagatcatccacgaggagctgcagctgaaggacgaggagatgatcggccccatcatcgacaagctggagaaggtggccgtgagaggcggcgacaagaagctgaagcccgagtacgacatcatgtgcaaggtgaagagctgggtgatcgaccagaagaagcccgtgagattctaccacgactggaacgacaaggagatcgaggtgctgaacaagcacctgttcctgaccagcaagcccatggtgtacctggtgaacctgagcgagaaggactacatcagaaagaagaacaagtggctgatcaagatcaaggagtgggtggacaagtacgaccccggcgccctggtgatccccttcagcggcgccctggagctgaagctgcaggagctgagcgccgaggagagacagaagtacctggaggccaacatgacccagagcgccctgcccaagatcatcaaggccggcttcgccgccctgcagctggagtacttcttcaccgccggccccgacgaggtgagagcctggaccatcagaaagggcaccaaggccccccaggccgccggcaagatccacaccgacttcgagaagggcttcatcatggccgaggtgatgaagtacgaggacttcaaggaggagggcagcgagaacgccgtgaaggccgccggcaagtacagacagcagggcagaaactacatcgtggaggacggcgacatcatcttcttcaagttcaacaccccccagcagcccaagaagaagtag

SEQ ID NO: 175721 - DNA, 1251 bp, Artificial Sequence
  derived and/or modified sequence
atgagcagaaccttcagcgccaagggcggcagagacctggtggagggcccccagtacctgatgccccccaagaagggcggcgacggcatcaagcccccccccatcatcggcagattcggcaccagcctgaagatcggcatcgtgggcctgcccaacgtgggcaagagcaccttcttcaacgtgctgaccaacagccaggccagcgccgagaacttccccttctgcaccatcgaccccaacgagagcagagtgcccgtgcccgacgagagattcgacttcctgtgccagtaccacaagcccgccagcaagatccccgccttcctgaacgtggtggacatcgccggcctggtgaagggcgcccacaacggccagggcctgggcaacgccttcctgagccacatcagcgcctgcgacggcatcttccacctgaccagagccttcgaggacgacgacatcacccacgtggagggcagcgtggaccccatcagagacatcgagatcatccacgaggagctgcagctgaaggacgaggagatgatcggccccatcatcgacaagctggagaaggtggccgtgagaggcggcgacaagaagctgaagcccgagtacgacatcatgtgcaaggtgaagagctgggtgatcgaccagaagaagcccgtgagattctaccacgactggaacgacaaggagatcgaggtgctgaacaagcacctgttcctgaccagcaagcccatggtgtacctggtgaacctgagcgagaaggactacatcagaaagaagaacaagtggctgatcaagatcaaggagtgggtggacaagtacgaccccggcgccctggtgatccccttcagcggcgccctggagctgaagctgcaggagctgagcgccgaggagagacagaagtacctggaggccaacatgacccagagcgccctgcccaagatcatcaaggccggcttcgccgccctgcagctggagtacttcttcaccgccggccccgacgaggtgagagcctggaccatcagaaagggcaccaaggccccccaggccgccggcaagatccacaccgacttcgagaagggcttcatcatggccgaggtgatgaagtacgaggacttcaaggaggagggcagcgagaacgccgtgaaggccgccggcaagtacagacagcagggcagaaactacatcgtggaggacggcgacatcatcttcttcaagttcaacaccccccagcagcccaagaagaagtag

SEQ ID NO: 175722 - DNA, 351 bp, Artificial Sequence
  derived and/or modified sequence
atgccccccaagaagggcggcgacggcatcaagcccccccccatcatcggcagattcggcaccagcctgaagatcggcatcgtgggcctgcccaacgtgggcaagagcaccttcttcaacgtgctgaccaacagccaggccagcgccgagaacttccccttctgcaccatcgaccccaacgagagcagagtgcccgtgcccgacgagagattcgacttcctgtgccagtaccacaagcccgccagcaagatccccgccttcctgaacgtggtggacatcgccggcctggtgaagggcgcccacaacggccagggcctgggcaacgccttcctgagccacatcagcgcctag

SEQ ID NO: 175723 - DNA, 837 bp, Artificial Sequence
  derived and/or modified sequence
atgccccccaagaagggcggcgacggcatcaagcccccccccatcatcggcagattcggcaccagcctgaagatcggcatcgtgggcctgcccaacgtgggcaagagcaccttcttcaacgtgctgaccaacagccaggccagcgccgagaacttccccttctgcaccatcgaccccaacgagagcagagtgcccgtgcccgacgagagattcgacttcctgtgccagtaccacaagcccgccagcaagatccccgccttcctgaacgtggtggacatcgccggcctggtgaagggcgcccacaacggccagggcctgggcaacgccttcctgagccacatcagcgcctgcgacggcatcttccacctgaccagagccttcgaggacgacgacatcacccacgtggagggcagcgtggaccccatcagagacatcgagatcatccacgaggagctgcagctgaaggacgaggagatgatcggccccatcatcgacaagctggagaaggtggccgtgagaggcggcgacaagaagctgaagcccgagtacgacatcatgtgcaaggtgaagagctgggtgatcgaccagaagaagcccgtgagattctaccacgactggaacgacaaggagatcgaggtgctgaacaagcacctgttcctgaccagcaagcccatggtgtacctggtgaacctgagcgagaaggactacatcagaaagaagaacaagtggctgctggagagcaccgacaacaaggccgagatcatcctgctgaagatggagatcctgagcagcagcaacctgacccacctgaacaacagaagaagaaacaagatctag

SEQ ID NO: 175724 - protein, 253 aa, Artificial Sequence
  derived and/or modified sequence
MELEQREGTMAAVGFEEFSAPPGSELALPPLFGGHILESELETEVEFVSGGLGGSGLRERDEEEEAARGRRRRQRELNRRKYQALGRRCREIEQVNERVLNRLHQVQRITRRLQQERRFLMRVLDSYGDDYRASQFTIVLEDEGSQGTDAPTPGNAENEPPEKETLSPPRRTPAPPEPGSPAPGEGPSGRKRRRVPRDGRRAGNALTPELAPVQIKVEEDFGFEADEALDSSWVSRGPDKLLPYPTLASPASD

SEQ ID NO: 175725 - DNA, 762 bp, Artificial Sequence
  derived and/or modified sequence
atggagctggagcagagagagggcaccatggccgccgtgggcttcgaggagttcagcgccccccccggcagcgagctggccctgccccccctgttcggcggccacatcctggagagcgagctggagaccgaggtggagttcgtgagcggcggcctgggcggcagcggcctgagagagagagacgaggaggaggaggccgccagaggcagaagaagaagacagagagagctgaacagaagaaagtaccaggccctgggcagaagatgcagagagatcgagcaggtgaacgagagagtgctgaacagactgcaccaggtgcagagaatcaccagaagactgcagcaggagagaagattcctgatgagagtgctggacagctacggcgacgactacagagccagccagttcaccatcgtgctggaggacgagggcagccagggcaccgacgcccccacccccggcaacgccgagaacgagccccccgagaaggagaccctgagcccccccagaagaacccccgccccccccgagcccggcagccccgcccccggcgagggccccagcggcagaaagagaagaagagtgcccagagacggcagaagagccggcaacgccctgacccccgagctggcccccgtgcagatcaaggtggaggaggacttcggcttcgaggccgacgaggccctggacagcagctgggtgagcagaggccccgacaagctgctgccctaccccaccctggccagccccgccagcgactag

SEQ ID NO: 175726 - DNA, 762 bp, Artificial Sequence
  derived and/or modified sequence
atggagctggaacagcgcgaagggacaatggccgccgttgggtttgaggaatttagtgctcccccgggctctgaacttgctttgcccccactgttcggaggacacatcctggaatccgagctcgagacggaagttgagtttgtgtctggcggactgggcgggagtggacttagagagcgagatgaggaagaggaggctgcgcgcggcagaagacggagacaaagggagttgaaccggcggaagtaccaggccttagggcggcgctgtagggagatcgaacaggtgaatgagcgcgtgttgaatcggctgcatcaggtacagcggatcacacgaaggttgcagcaggaaaggaggttcctgatgcgagtgcttgacagctacggagacgactaccgagcaagtcagttcacgatcgttctggaggatgagggctcccagggcacggacgcaccgacgcccggcaatgccgagaatgagcccccagagaaggagaccctgagccctccccgccgcacgcctgcaccaccggaacctggcagtccagcacccggagagggaccatctggacgaaagcggaggagggtgccccgcgatggaaggcgggccggcaatgctttgaccccagagctcgcacccgttcagatcaaagtcgaggaagacttcggattcgaggccgacgaagcattggactcaagctgggtgagccgtggtccggacaaattattgccataccccacactggcttctcctgctagcgattag

SEQ ID NO: 175727 - DNA, 762 bp, Artificial Sequence
  derived and/or modified sequence
atggagctggagcagcgggagggcaccatggctgctgtgggctttgaggagttcagcgcccctcctggcagcgagctggccctgccccccctgtttggaggccacatcctggagagcgagctggagacagaggtggagtttgtgtctgggggcctgggcggcagcggcctgcgggagagagatgaggaggaggaggccgcccggggcagaagaagacggcagcgggagctgaacagaaggaagtaccaggccctgggccgccgctgccgggagattgagcaggtgaatgaaagagtgctgaaccggctgcaccaggtgcagaggatcacccggcggctgcagcaggagcggcgcttcctgatgagggtgctggacagctatggagatgactaccgggccagccagttcaccatcgtgctggaggatgagggcagccagggcacagatgcccccaccccaggaaatgcagaaaatgagcccccagagaaggagaccctgagcccccccaggaggaccccagcccctcctgagcccggcagccctgcccctggagagggccccagcggcaggaagagaagaagagtgcccagagatggccggcgggctggaaatgccctgaccccagagctggcccctgtgcagatcaaggtggaggaggactttggatttgaagcagatgaggccctggacagctcctgggtgtcccggggccctgacaagctgctgccctaccccaccctggccagccctgccagtgactag

SEQ ID NO: 175728 - DNA, 1205 bp, Artificial Sequence
  derived and/or modified sequence
atttgaaacaacaactttattagcacctggcactaggcggagagaggcggtaagccgcgaggaggaaagggactcacgtcccgctgtggaccgatcctgctaagcagagaatcgctgtggccggacgacggggcgtcgagacaagaagaaagacgttggcaactcagaggactggttgcggcgttagacaagaaagcaaggcctttaagcagggattcggggtggacgtgggggtgggccgaagcgaagccggaaacaggaaactacaactcccacaaggcctagggccacgtcccgccgtcctcggctgctgagcctgatgggacaagtagttttgcgaacggcttaacctacagattgaagaggtcggaagctctgaggcccggggcttccggaggtcgcggagatggaattggagcagagagaagggaccatggcagccgtgggctttgaggagttctcagcgccgccaggctcagagttggcgttgcctcccctatttggtggccacatcctggagagcgagctggagacggaagtggagtttgtgtcaggtggtctgggcggctcagggctccgggagcgagatgaagaggaagaggcagcccggggtcggcggcggcgccagcgggaattaaatcgcagaaagtaccaggcactaggtcggcgctgccgggagatcgagcaggtgaacgagcgggtcctgaacaggctccatcaggtgcagaggataactcggaggctgcagcaggaacggaggttcctcatgagagtgctggactcctacggggatgactaccgggccagccagttcaccattgtgctggaggatgagggcagccagggcacggatgcccccaccccaggcaatgcggagaatgagcctccagagaaagagacactgtccccgcccagaaggactcctgcacccccagaacccggcagcccagcccccggtgaggggcccagtgggcggaagaggcggcgagtgccacgggatggacgccgagcaggaaatgcgctgactccagagctggccccggtgcagattaaggttgaggaagactttggctttgaagcagatgaggccctggattccagttgggtttctcggggtccagacaaactgctgccctacccgaccctggccagcccagcctctgactgacgcatgcccaataaactgaccccacactcaccccggc

SEQ ID NO: 175729 - DNA, 762 bp, Artificial Sequence
  derived and/or modified sequence
atggagctggagcagcgggagggcaccatggccgccgtgggcttcgaggagttttccgcaccgccaggatcagagctggccctgcctccactgttcgggggccatatccttgaaagcgagctggagacggaggttgagtttgtgagtgggggcctcggaggttccggcctccgggaacgcgatgaagaagaggaggctgctcgaggacgccgaagaaggcagcgtgagctgaacaggcgcaaataccaggctcttggacgccggtgtagagaaattgagcaggtcaacgagcgagtgctgaatcgtctgcaccaggttcagaggattacacgtagactgcagcaggaacgcagattccttatgcgggttctcgatagctacggcgatgattacagagcctctcagtttaccattgtgctggaagatgaggggtcccagggaaccgacgccccaactcctggtaatgccgagaacgagccccctgagaaggagacactttcacccccacggaggacacctgcgcctccagagccaggcagcccggcacctggcgagggtccctcaggtaggaagaggcgccgcgttcccagggacggacggcgggcagggaacgccctcaccccagagttggcacccgtgcagataaaagtagaggaagactttggtttcgaagcagacgaggctttggatagctcatgggtctctcggggtccagataagctattgccgtatcccacacttgcttcaccggcttcagactag

SEQ ID NO: 175730 - DNA, 762 bp, Artificial Sequence
  derived and/or modified sequence
atggagctcgagcagagggaaggtactatggcagcagtgggcttcgaggaattctcagcaccgcctggctccgagttggcgctccccccactatttggcggtcacatcctggagtcagagctagagacggaggtggaattcgttagcggaggtttggggggaagcgggctgcgcgagagggatgaggaagaggaagccgctcggggacgccgaagaagacagcgggagctcaacaggcggaaataccaggcactggggagacggtgccgcgagattgaacaggtcaacgagagggtgcttaaccggcttcatcaggtgcaaagaataacacgaaggcttcagcaggagagacgattcctcatgcgcgttctggactcatatggggacgactaccgcgctagccagtttactattgtgctggaggacgagggctcgcagggcactgacgcgcctacccccggtaatgccgaaaatgaacctcccgaaaaggagacactgtccccacctagacgaacacccgctccaccagagccgggatcacccgctcccggagagggacctagtggaaggaagaggcgacgcgtgccgagagatggtcggcgagccggaaatgctctcactcctgaactcgctccagttcagattaaagtcgaggaagactttggctttgaggcagatgaggcactcgacagcagttgggtatcgaggggaccggataaactgttaccctaccccacactcgccagcccagctagcgattag

SEQ ID NO: 175731 - protein, 162 aa, Artificial Sequence
  derived and/or modified sequence
MSDTAVADTRRLNSKPQDLTDAYGPPSNFLEIDIFNPQTVGVGRARFTTYEVRMRTNLPIFKLKESCVRRRYSDFEWLKNELERDSKIVVPPLPGKALKRQLPFRGDEGIFEESFIEERRQGLEQFINKIAGHPLAQNERCLHMFLQEEAIDRNYVPGKVRQ

SEQ ID NO: 175732 - DNA, 489 bp, Artificial Sequence
  derived and/or modified sequence
atgagcgacaccgccgtggccgacaccagaagactgaacagcaagccccaggacctgaccgacgcctacggcccccccagcaacttcctggagatcgacatcttcaacccccagaccgtgggcgtgggcagagccagattcaccacctacgaggtgagaatgagaaccaacctgcccatcttcaagctgaaggagagctgcgtgagaagaagatacagcgacttcgagtggctgaagaacgagctggagagagacagcaagatcgtggtgccccccctgcccggcaaggccctgaagagacagctgcccttcagaggcgacgagggcatcttcgaggagagcttcatcgaggagagaagacagggcctggagcagttcatcaacaagatcgccggccaccccctggcccagaacgagagatgcctgcacatgttcctgcaggaggaggccatcgacagaaactacgtgcccggcaaggtgagacagtag

SEQ ID NO: 175733 - DNA, 489 bp, Artificial Sequence
  derived and/or modified sequence
atgtctgacaccgcagtggccgatacacggaggttaaatagtaagccgcaggatctaacagacgcatatggccctccttccaactttctggaaattgacattttcaatccacaaaccgtgggagtcgggcgagcccgttttactacatatgaagtgcggatgagaacaaacttaccaatctttaagctgaaggaatcatgtgtcaggcgtcgatattctgacttcgagtggctgaaaaacgaattggaaagggatagtaagatcgtggtaccccccttgcccggtaaggccctgaaacggcagctgcccttcagaggcgacgagggaatctttgaagagtccttcatagaggagaggcgacaggggcttgagcagtttatcaacaaaatcgcagggcaccctcttgcccagaacgaacgatgtctgcatatgtttctccaggaagaggctattgacagaaactatgtcccaggaaaagtcaggcagtag

SEQ ID NO: 175734 - DNA, 489 bp, Artificial Sequence
  derived and/or modified sequence
atgtctgacacagctgtggccgacacccggcggctgaacagcaagccccaggacctgacagatgcctacggcccccccagcaacttcctggagattgacatcttcaacccccagacagtgggcgtgggccgggcccgcttcaccacctatgaggtgaggatgaggaccaacctgcccatcttcaagctgaaggagagctgtgtgagaagacgctacagcgactttgagtggctgaagaatgagctggagcgggacagcaagatcgtggtgccccccctgcccgggaaggccctgaagaggcagctgcccttcagaggagatgagggcatctttgaggagagcttcatcgaggagcggcggcagggcctggagcagttcatcaacaagattgctggccaccccctggcccagaatgaacgctgcctgcacatgttcctgcaggaggaggccatcgacagaaattatgtgcctgggaaggtgcggcagtag

SEQ ID NO: 175735 - DNA, 489 bp, Artificial Sequence
  derived and/or modified sequence
atgagcgacaccgccgtggccgacacccggcggctgaacagcaagccccaagacttgactgacgcatacggacccccctcaaatttccttgagattgacatctttaacccacagactgtgggtgtcggccgggcaaggtttaccacttatgaggtaaggatgagaacaaatctgcctatttttaagctcaaggagtcctgcgtgcgccggaggtactcagacttcgaatggctcaaaaacgagctggaacgcgattcaaaaattgtggttccacctctgcccgggaaggcactcaagcggcagctgcctttcaggggggacgagggaatctttgaggagtcctttatcgaggagcgacgacaggggctagagcagttcattaacaaaatcgctggtcacccccttgcacaaaacgaacggtgcctccacatgttcctccaggaagaggctatcgatcgcaactatgtgccagggaaggtgagacagtag

SEQ ID NO: 175736 - DNA, 489 bp, Artificial Sequence
  derived and/or modified sequence
atgtcagacacagccgtcgcggatacccgtaggttgaactcaaagcctcaggatctgacggacgcctatggaccacctagcaacttcctagagattgacatttttaatccacagaccgttggcgttggcagggctaggtttactacttacgaggtgcggatgcgtactaacctcccgatattcaaactgaaggagagctgcgtgaggcggaggtatagcgattttgaatggctaaaaaatgaactagagcgggactccaaaattgttgtgcctccactgcctggcaaagcactgaagagacagctgcccttccgaggggatgaaggtatcttcgaggagagtttcatcgaagagagacgccagggattagaacagtttattaacaaaattgccggacatccacttgcccaaaacgagagatgtctccatatgttcttgcaggaggaggcaattgacagaaattacgttccagggaaggtcaggcaatag

SEQ ID NO: 175737 - DNA, 2376 bp, Artificial Sequence
  derived and/or modified sequence
ccgccgccgcctgtgggttggctagttattttgcaagcgggaggggccgtgcgcgctcctgcctcaggcctctgtcccccaccccctttccccggtcccaggctctccttcggaaagatgtcggacacggcagtagctgatacccggcgccttaactcgaagccgcaggacctgaccgacgcttacgggccgccaagtaacttcctggagatcgacatctttaatcctcagacggtgggcgtgggacgcgcgcgcttcaccacctatgaggttcgcatgcggacaaacctacctatcttcaagctaaaggagtcctgcgtacggcggcgctacagtgactttgagtggctgaaaaatgagctggagagagatagcaagattgtagtaccaccactgcctgggaaagccttgaagcggcagctccctttccgaggagatgaagggatctttgaggagtctttcatcgaagaaaggaggcagggcctcgagcagtttattaacaaaattgctgggcacccactggctcagaatgaacgctgcctacacatgttcctgcaagaggaggcaattgacaggaactacgtcccggggaaggtgcgccagtaggagcccctctcaccacctgccctctactttcctgctgaaatgacattggtttttacactaagcctctctctgtctttgatctgaagttggctgcccatctcctggcctgatagactgtctggcattgtgctccctggtacctgactacaccatgtgggcactctgctaggatcctcttctctgaggagaggtgggaacccacaggcagatgccctttgcttggggttggggtgggtgggtggggggattagactggaaggcaatttcttgggcatttacccatgccagaaggctaacctggggggaggggggcgcttgtgctggtgaggcacttggatacatactgatgctgcaagttcaggggatttttcttactcttaggtttaaccaagaacactgagcagggaaaaaccctgcctttcctaactgcatgtattttttcctttttggaaaggtggtagagactcagaagctttccttgttttcttcaggcctgctcccagttttcttaacagtttcttttgttgctttctctctcccttgttgctttccatggcagtaatcctcctagagtccaagcagtctgttgtatggagcagggtgtgtgggttttctgggcccatcattatggctgcttcagagtcagaagaaagccatagggcagtaggggagctcctattgcctagcccctctccctttgtggctcccactctagctgcctatttttgctcatcagctggtgagtcagtatgggccagcagttctccctccctaagcccttgctactttatgggttagctttgcaggtttggtggcttgaggggtgggggcaactcaccactgccaggtaactccctgaagggtgggagtggattatcttctaggctcttacccgcggtagggaagggcatcaacactgtcttccttccattctcctttcccccatcccatttagtgctgccacagggcagaagcacacaaaccaaccacacagtctctgacttctcctaagcactttgagttgttgaatggggctcaggggcaagagtttttgctgccctccccagcgtggtcacagggttattgaactgcctgcacttgtttctcatgcaactccagcattttccccagaagttgaactatggatagcagcttggtatggatttcctaaatcttaacatttgaagcagcttcttgaggctggcaactatcctggtttctgtcttggagggggtggtttgtttgctggggcccaacgtctgtcccaagtggtggggtgagagtaagttaactttggtgccaggtgagaggtgggggctctttgcttagactccctatcatggaaagattggagttttctatgcagggcactgtggaaaaggattgctgattctgactgaccctgatcagagagattaggattgtattttgacataggatttggaacccatctaaatgttgaagttccctgagacagctctccagctgctgagcctgcgccaggggctaagcagcccctaatgagaggctctgctccctttcccacctcgccaatgttgttgttgctgcctttttgatttgtatcctctgttatagacattttttaaaaacgatttcctctttcattgtgcacaagtgctgagagtctgaggccccatttctgctgtgtatatatatcctgactcggggcttttattcagcaaactgttcattcttctgtcagacaatgtcatattcaactctgttcatattaaaccactgtgaagcaag

SEQ ID NO: 175738 - protein, 261 aa, Artificial Sequence
  derived and/or modified sequence
MSKSGFGSYGSISAADGASGGSDQLCERDATPAIKTQRPKVRIQDVVPCNVNQLLSSTVFDPVFKVRGIIVSQVSIVGVIRGAEKASNHICYKIDDMTAKPIEARQWFGREKVKQVTPLSVGVYVKVFGILKCPTGTKSLEVLKIHVLEDMNEFTVHILETVNAHMMLDKARRDTTVESVPVSPSEVNDAGDNDESHRNFIQDEVLRLIHECPHQEGKSIHELRAQLCDLSVKAIKEAIDYLTVEGHIYPTVDREHFKSAD

SEQ ID NO: 175739 - DNA, 786 bp, Artificial Sequence
  derived and/or modified sequence
atgtctaagtccgggtttggcagttacggtagcatcagcgcggccgacggcgcctccggaggcagcgatcagctttgtgagagggatgctactccagctatcaaaactcaacgcccgaaagtgcgcattcaggatgttgtaccgtgtaacgtgaaccagctccttagctcaacagtctttgaccctgtgtttaaagtgcgcggcataattgtgtcccaagtgagcattgtaggagtgatccgcggcgcggagaaagcgtccaaccacatctgctataagatcgacgatatgaccgctaaacccattgaagcccgccaatggtttgggagggaaaaggtgaaacaagtgactcccctgagcgtgggcgtttacgtaaaagtcttcgggatcctaaagtgccccactggaactaagagtctagaggtacttaagattcatgtgttagaggacatgaatgagtttaccgtacatattctggaaaccgtgaatgcacatatgatgctggataaggctagacgagataccacggttgagtccgtgccagtgagcccttcagaagtcaatgacgcaggggacaatgacgagtcacacaggaactttattcaagacgaagtgctgagactgatacacgagtgccctcaccaggaggggaagtctattcatgagttaagagcccagctgtgtgacctcagcgtgaaggcaataaaggaggccatcgattatttgacagttgaagggcatatctatcctactgtggaccgcgaacactttaaatccgcggactag

SEQ ID NO: 175740 - DNA, 786 bp, Artificial Sequence
  derived and/or modified sequence
atgagcaagagcggcttcggcagctatggcagcatctctgctgctgatggagccagcggcggcagtgaccagctgtgtgaaagagatgccaccccagccatcaagacccagaggcccaaggtgcgcatccaggatgtggtgccctgcaatgtgaaccagctgctgagcagcacagtgtttgaccccgtcttcaaggtgcggggcatcatcgtgtcccaggtgtccatcgtgggcgtcatcagaggagctgagaaggccagcaaccacatctgctacaagattgatgacatgacagccaagcccatcgaggcccggcagtggtttggccgggagaaggtgaagcaggtgacccccctgtctgtgggcgtgtatgtgaaggtgtttggcatcctgaagtgccccaccggcaccaagagcctggaggtgctgaagatccacgtgctggaggacatgaatgagttcaccgtgcacatcctggagaccgtgaatgcccacatgatgctggacaaggcccggcgggacaccaccgtggagagcgtgcctgtgagccccagcgaggtgaatgatgctggggacaatgatgagagccacaggaacttcatccaggatgaggtgctgcggctcatccatgaatgtccccaccaggagggcaagagcatccacgagctgcgggcccagctgtgtgacctgtctgtgaaggccatcaaggaggccatcgactacctgactgtggagggccacatctaccccaccgtggaccgggagcacttcaagtctgctgactag

SEQ ID NO: 175741 - DNA, 786 bp, Artificial Sequence
  derived and/or modified sequence
atgagcaagagcggcttcggcagctacggcagcatcagcgccgccgacggcgccagtgggggttccgaccagctgtgtgaacgggacgccacccctgcgataaagacccagagacctaaggtgcggatccaggatgtggtgccgtgtaatgtcaaccagcttctgtcctccacagtgttcgaccctgtgtttaaggtgcgcggaataattgtttcccaagtatcaatagtgggcgtgatccggggagctgagaaggcaagcaaccatatttgttataaaattgacgacatgacagctaaacccattgaggcgaggcagtggtttggacgggaaaaagtaaaacaggtgactcccctatcagtcggagtctacgttaaggtatttgggatcctcaaatgcccgaccggcacaaagtctctggaggtgctcaaaatccacgtgcttgaggatatgaatgagtttactgtccacatcctggagaccgtcaacgcgcacatgatgcttgacaaggcccgcagggacacaaccgttgagtccgttccagttagtcccagcgaagtaaatgacgcaggcgacaacgacgagtcacacagaaactttatacaagacgaggttctgcggcttatacatgagtgtcctcaccaggagggcaagtcgattcacgagctgcgagctcagctctgtgatttgtcagtcaaggcaatcaaagaggctatcgattatctcacagtggaaggtcatatctatcctaccgtagaccgggagcacttcaaaagtgcagattag

SEQ ID NO: 175742 - DNA, 786 bp, Artificial Sequence
  derived and/or modified sequence
atgtccaagtccggtttcggatcctatggatcaatcagtgctgccgacggagctagtggaggaagtgaccagctctgtgagagagatgctactccggcaatcaagacccaaaggccaaaggttcgcatacaggacgtggtaccttgcaatgtgaatcaactgctttcctccactgtttttgatccagtgttcaaggttcggggaatcattgtgtcccaggtatccatcgtgggcgtgatccgcggagctgaaaaggctagcaaccatatctgctataaaatcgatgacatgactgcgaaacccatcgaagcgcgtcaatggttcgggagagaaaaggttaaacaggttacccccttatcggtgggcgtgtatgttaaagtctttggcatcctcaagtgtcccactggtactaaatctctggaagtattaaagatacacgtgttggaggatatgaacgaattcacagtccacattctggaaactgtcaatgcccacatgatgctggacaaagcacgccgtgatactacagtcgagtccgtgcctgtaagtccatcagaggttaacgatgcaggagacaacgatgagtcacaccgaaacttcatccaagacgaagttcttaggctgatccacgaatgtccgcatcaggaaggaaagagcattcacgaactgagagcacagctgtgcgaccttagcgtaaaagccatcaaggaggccatcgactacctgaccgtagaaggccacatctatcccaccgtggatagggagcactttaaatctgccgattag

SEQ ID NO: 175743 - DNA, 1540 bp, Artificial Sequence
  derived and/or modified sequence
ctagtaaaaatgcatttttatagagatgttgggaaaggcttgcttgaaattacacgtgggacttttaatagataggcgctttgaccagctaagcaacagggctcccctcgtgtgggacttttagaatgtagcaaccactgacacacagggaaggattatgcgatcaggtgagaaggtggccgaccctgactggctggaagcagatgcattctggtagttgattggtccacaggtagcgtgacgcttgtcacgtcctcagcctcccagcattcaatcgtagcctttcggacagctcgaagccttctgtggagagctcgaagccttctgtggagaactcaaagccgtccgtggagccccagacgagccaaagcccaccttctcctcagcctgagctgtcttgaagatgagtaagagtgggtttgggagctatggcagcatttctgctgctgatggagcgagtggaggcagtgaccaactgtgtgagagagatgcaactcctgctattaagacccaaagacctaaggtccgaattcaggacgttgtaccgtgtaatgtgaaccagcttctcagctctactgtgtttgaccctgtgttcaaggttaggggaattatagtttcccaggtctccatcgtgggggtaatcagaggggcagagaaggcttcaaatcacatttgttacaaaattgatgatatgaccgcgaaaccaatcgaggcccgacagtggtttggtagagagaaagtcaagcaggtgactccattgtcagtcggagtatatgtcaaagtgtttggtatcctcaaatgtcccacgggaacaaagagccttgaggtattgaaaattcatgtcctagaggacatgaacgagttcaccgtgcatattctggaaacggtcaatgcacacatgatgctggataaagcccgtcgtgataccactgtagaaagtgtgcctgtgtctccatcagaagtgaatgatgctggggataacgatgagagtcaccgcaatttcatccaggacgaagtgctgcgtttgattcatgagtgtcctcatcaggaagggaagagcatccatgagctccgggctcagctctgcgaccttagcgtcaaggccatcaaggaagcgattgattatctgaccgttgagggccacatctatcccactgtggatcgggagcattttaagtctgctgattgaggcagggaaaacatcctttcatttttcgaagacccttgcatccagctgtgagtaattttgacctgttgactttttaggaagtaggactaaaaaaaaaaatctcaagtggcattctttgtcaactcgctgcttttctaactgctttgaacttttcggattttctgtatttgaagctcagagagagacggtgatggataaattgacaactctgtaggatttactagcaagctaatggaaacatgattttcggggaagaaaaactacagaaaatgtagaaatttattatttaattgtgttggagcttctttttccaaaagaaaaactagttgcagtcagggagccagcgaaaag

SEQ ID NO: 175744 - DNA, 786 bp, Artificial Sequence
  derived and/or modified sequence
atgagcaagagcggcttcggcagctacggcagcatcagcgccgccgacggcgccagcggcggcagcgaccagctgtgcgagagagacgccacccccgccatcaagacccagagacccaaggtgagaatccaggacgtggtgccctgcaacgtgaaccagctgctgagcagcaccgtgttcgaccccgtgttcaaggtgagaggcatcatcgtgagccaggtgagcatcgtgggcgtgatcagaggcgccgagaaggccagcaaccacatctgctacaagatcgacgacatgaccgccaagcccatcgaggccagacagtggttcggcagagagaaggtgaagcaggtgacccccctgagcgtgggcgtgtacgtgaaggtgttcggcatcctgaagtgccccaccggcaccaagagcctggaggtgctgaagatccacgtgctggaggacatgaacgagttcaccgtgcacatcctggagaccgtgaacgcccacatgatgctggacaaggccagaagagacaccaccgtggagagcgtgcccgtgagccccagcgaggtgaacgacgccggcgacaacgacgagagccacagaaacttcatccaggacgaggtgctgagactgatccacgagtgcccccaccaggagggcaagagcatccacgagctgagagcccagctgtgcgacctgagcgtgaaggccatcaaggaggccatcgactacctgaccgtggagggccacatctaccccaccgtggacagagagcacttcaagagcgccgactag

SEQ ID NO: 175745 - protein, 436 aa, Artificial Sequence
  derived and/or modified sequence
MGLARALRRLSGALDSGDSRAGDEEEAGPGLCRNGWAPAPVQSPVGRRRGRFVKKDGHCNVRFVNLGGQGARYLSDLFTTCVDVRWRWMCLLFSCSFLASWLLFGLAFWLIASLHGDLAAPPPPAPCFSHVASFLAAFLFALETQTSIGYGVRSVTEECPAAVAAVVLQCIAGCVLDAFVVGAVMAKMAKPKKRNETLVFSENAVVALRDHRLCLMWRVGNLRRSHLVEAHVRAQLLQPRVTPEGEYIPLDHQDVDVGFDGGTDRIFLVSPITIVHEIDSASPLYELGRAELARADFELVVILEGMVEATAMTTQCRSSYLPGELLWGHRFEPVLFQRGSQYEVDYRHFHRTYEVPGTPVCSAKELDERAEQASHSLKSSFPGSLTAFCYENELALSCCQEEDEDDETEEGNGVETEDGAASPRVLTPTLALTLPP

SEQ ID NO: 175746 - DNA, 1311 bp, Artificial Sequence
  derived and/or modified sequence
atgggcctggccagagccctgagaagactgagcggcgccctggacagcggcgacagcagagccggcgacgaggaggaggccggccccggcctgtgcagaaacggctgggcccccgcccccgtgcagagccccgtgggcagaagaagaggcagattcgtgaagaaggacggccactgcaacgtgagattcgtgaacctgggcggccagggcgccagatacctgagcgacctgttcaccacctgcgtggacgtgagatggagatggatgtgcctgctgttcagctgcagcttcctggccagctggctgctgttcggcctggccttctggctgatcgccagcctgcacggcgacctggccgccccccccccccccgccccctgcttcagccacgtggccagcttcctggccgccttcctgttcgccctggagacccagaccagcatcggctacggcgtgagaagcgtgaccgaggagtgccccgccgccgtggccgccgtggtgctgcagtgcatcgccggctgcgtgctggacgccttcgtggtgggcgccgtgatggccaagatggccaagcccaagaagagaaacgagaccctggtgttcagcgagaacgccgtggtggccctgagagaccacagactgtgcctgatgtggagagtgggcaacctgagaagaagccacctggtggaggcccacgtgagagcccagctgctgcagcccagagtgacccccgagggcgagtacatccccctggaccaccaggacgtggacgtgggcttcgacggcggcaccgacagaatcttcctggtgagccccatcaccatcgtgcacgagatcgacagcgccagccccctgtacgagctgggcagagccgagctggccagagccgacttcgagctggtggtgatcctggagggcatggtggaggccaccgccatgaccacccagtgcagaagcagctacctgcccggcgagctgctgtggggccacagattcgagcccgtgctgttccagagaggcagccagtacgaggtggactacagacacttccacagaacctacgaggtgcccggcacccccgtgtgcagcgccaaggagctggacgagagagccgagcaggccagccacagcctgaagagcagcttccccggcagcctgaccgccttctgctacgagaacgagctggccctgagctgctgccaggaggaggacgaggacgacgagaccgaggagggcaacggcgtggagaccgaggacggcgccgccagccccagagtgctgacccccaccctggccctgaccctgcccccctag

SEQ ID NO: 175747 - DNA, 1311 bp, Artificial Sequence
  derived and/or modified sequence
atgggccttgctcgcgcactgcgtcgcctaagcggcgctcttgattctggggatagcagagccggtgatgaggaggaggctggaccaggactttgccggaatgggtgggcccctgcccccgttcagtccccagtcggccgccgcagaggtaggttcgtgaagaaagacggccattgcaacgtgcgattcgtgaacttgggcgggcaaggcgcacgctatctgagcgacctatttactacctgtgtcgacgtcaggtggcggtggatgtgcctccttttcagttgcagcttcctcgcttcgtggctcctctttggcctcgctttttggctcatagcctcactccacggagaccttgctgctcctcctcctccagccccgtgcttcagccatgtcgctagctttctggcagccttcctcttcgctcttgagactcagacatctattggctacggggtccggtctgtcaccgaggagtgcccagctgcggttgctgccgtggtcctgcagtgcatcgccggttgcgtgctggatgcattcgtggtgggtgctgtgatggccaaaatggctaagccgaagaaacgcaacgagacactggtcttttcagaaaacgcagttgtcgcccttcgagaccacagactgtgccttatgtggagagtcggtaatcttaggcgttcccacctggttgaagcgcatgtcagggcccagctgctgcagccaagggtgacccccgagggggagtacatcccactggatcaccaggacgtggatgttgggtttgacggcggaacggatagaatcttcctcgtgagcccgattactattgtccacgagatagacagtgccagccccctctacgaactgggaagagccgagcttgctcgggcagattttgagctggtggtcatcctggagggaatggtggaagcaaccgctatgaccacacagtgccggtcttcctacctccctggcgaactactgtggggtcacaggttcgagcccgtgctctttcagagggggtcccagtacgaggtcgactataggcacttccacaggacgtacgaagttccgggaacacctgtttgcagcgcaaaggaactcgatgagcgggccgagcaggccagccactccttgaagtcgagtttccccggatcccttactgctttttgctatgaaaacgagctggcattgtcatgctgccaggaagaggacgaagacgacgagacagaggaaggtaatggggtcgagactgaggacggagccgcgtccccgcgggtgttgaccccaaccctagcactaacgctgcctccctag

SEQ ID NO: 175748 - DNA, 1311 bp, Artificial Sequence
  derived and/or modified sequence
atggggctcgcgcgtgcactgcgacggctcagcggggccttggatagcggggattcacgagctggagacgaagaagaggccggtcccggactatgtcgaaatggttgggcacccgcacccgtgcagagccctgtcggcagaagacgcggtcgcttcgttaaaaaagatggtcattgtaatgtccggtttgttaacctgggcggccagggagctaggtatctttctgacctcttcacaacctgcgtggacgtgaggtggcgatggatgtgtcttctgttttcatgttcttttctcgcttcatggctcctgtttggcctggctttttggctgattgcgtctttacacggggacctggctgcccctccccctcccgcgccatgctttagccacgttgcttcctttttggctgcgttcctgtttgctctggagacccagacttctatagggtatggagtcaggtctgtcaccgaagaatgcccagcagcggttgccgcagtcgtcttacagtgcattgctggctgcgtgctggatgcatttgtggtgggggctgtgatggccaaaatggccaaacctaagaaaagaaatgaaacactggtcttctcggagaacgccgttgtggctctgcgtgatcacagactgtgcctcatgtggagggttgggaatctgcggcggagtcatctggtggaagcccatgtgcgggcgcagttgctccagccccgggttacacctgaaggagagtatataccactggaccaccaagatgtagacgtcggatttgatggtgggacagataggatttttctggtttctcccatcacaattgtccatgagatcgactccgcaagccccctttacgagttgggacgtgcagagctggcaagggctgacttcgagctggttgtgatcctggagggaatggtggaagccaccgctatgactacacaatgtcgatcttcatacctgccaggagaactgttgtgggggcaccgttttgaacccgtgttattccaacgtgggtcacagtatgaggttgattaccgacactttcaccgaacatacgaggtgccagggacacccgtctgtagcgctaaagaattagatgaaagagctgagcaggcctcgcactccttgaaatccagctttcccggatcattgaccgccttctgttacgaaaacgaactggcgctgtcctgttgtcaagaggaagatgaagacgatgagaccgaggagggcaatggtgtggaaacagaagacggcgccgcctcaccccgcgtgctgaccccaactctggccttgaccctccctccttag

SEQ ID NO: 175749 - DNA, 1311 bp, Artificial Sequence
  derived and/or modified sequence
atgggcctggcccgggccctgcggcggctgagcggggccctggacagcggggacagcagagctggagatgaggaggaggccggccctggcctgtgcagaaatggctgggccccagcccctgtgcagagccctgtgggcagaagaagaggccgctttgtgaagaaggatggccactgcaatgtgcgctttgtgaacctgggcggccagggcgcccgctacctgagtgacctcttcaccacctgtgtggatgtgcgctggcgctggatgtgcctgctcttcagctgcagcttcctggcctcctggctgctgtttggcctggccttctggctgattgccagcctgcatggagacctggccgcccctcctcctccagccccctgcttcagccacgtggccagcttcctggccgccttcctgtttgccctggagacccagaccagcatcggctacggcgtgcgctctgtgacagaggagtgcccagctgctgtggccgctgtggtgctgcagtgcatcgccggctgtgtgctggatgcctttgtggtgggcgctgtgatggccaagatggccaagcccaagaagagaaatgagaccctggtgttttctgaaaatgctgtggtggccctgcgggaccaccggctgtgcctgatgtggagggtgggcaacctgcggcgcagccacctggtggaggcccacgtgcgggcccagctgctgcagccccgggtgaccccagagggggagtacatccccctggaccaccaggatgtggatgtgggctttgatggcggcacagaccgcatcttcctggtgagccccatcaccatcgtgcatgaaattgacagcgccagccccctgtatgagctgggccgggcagagctggcccgggctgactttgagctggtggtgatcctggagggcatggtggaggccacagccatgaccacccagtgccgcagcagctacctgcccggggagctgctgtggggccacagatttgagcctgtgctcttccagaggggcagccagtatgaggtggactaccgccacttccacaggacctatgaggtgcccggcacccctgtgtgcagcgccaaggagctggatgagcgggcagagcaggccagccacagcctgaagagcagcttccctggcagcctgacagccttctgctatgaaaatgagctggccctgagctgctgccaggaggaggatgaagatgatgaaacagaggagggcaatggagtggagacagaagatggagctgccagcccccgggtgctgacccccaccctggccctgaccctgcccccatag

SEQ ID NO: 175750 - DNA, 1311 bp, Artificial Sequence
  derived and/or modified sequence
atgggcctggcccgggccctgcggcggctgagcggcgccctggactcaggcgacagcagggcaggggatgaggaagaggctggacccggactgtgcagaaatggatgggcccctgcccctgtccagtcgccagttggaagaaggcgtggtcggttcgtcaaaaaggatggacattgcaatgtgcgcttcgtgaatttgggcggacagggagcaaggtatctgagtgatctcttcacgacatgcgttgacgtgcggtggcggtggatgtgtctcctgttctcctgtagcttcctcgcgtcttggctgctctttggccttgcgttctggctgattgctagtttgcacggtgatctggccgcaccccctccacctgctccatgcttctcgcacgtggcttcatttctggctgcctttctcttcgccctggaaacacaaacctccatcgggtacggcgtcaggtcagtgactgaagagtgccccgcagccgtggctgccgttgtattacagtgtatcgcagggtgcgtattagacgctttcgtcgttggggcggtgatggccaagatggctaaaccgaaaaaacgaaacgaaacactggtattttcggaaaatgccgttgtcgcacttagggaccatcgcctgtgtctgatgtggagagtgggtaatttacgtcgcagtcatttggtcgaagctcatgtgagagctcagctgctccagcctcgtgtgacgcccgagggcgaatacattccattagatcatcaggatgtggatgtgggttttgatggcgggacggatcgtattttcctggtctctccgattacaattgtgcatgaaatcgattcagctagccctctgtacgaactaggcagggccgaactagcccgagctgatttcgagctggtggtgatccttgaaggcatggtggaggccactgctatgactacccagtgccgctcatcctatctgcctggcgagcttctctggggccacaggttcgagcccgtgctgttccagcgggggagtcaatatgaagtcgactatcggcattttcaccgcacctatgaggtgccgggcacgccagtgtgcagtgctaaagaactggacgagagggctgagcaggctagccattccctgaagagctccttccctggctctttaacagctttttgttacgagaatgagctcgcgctgtcctgctgccaggaggaggacgaggatgacgagacagaagaaggtaatggcgtcgaaacggaagatggggccgcatcccccagagtgctcactccgacactagctttaacgctccctccttag

SEQ ID NO: 175751 - DNA, 1311 bp, Artificial Sequence
  derived and/or modified sequence
atgggcctggcccgggccctgcggcggctgagcggcgccctggacagtggagatagccgcgccggcgacgaggaggaagcgggaccgggcttatgcaggaatgggtgggcaccggctccggtgcagtctccagtggggcggcgccgcggccgctttgtaaagaaggatggccattgcaatgtgcgcttcgtgaaccttggggggcaaggagctagatacctgagcgatctgttcaccacctgcgtggacgtgcggtggaggtggatgtgtttgttgttcagctgcagcttcttggcttcctggttgctattcggactagcattctggctgattgcttcactccacggagatctggccgcacccccacctcccgccccttgttttagccacgttgcttcctttcttgcagcattcctgttcgcactcgagacacagacctctatcggctatggggtccgttcagtgactgaggagtgtcccgctgccgtggcagcggtggtattgcagtgtatagcaggttgcgtcctagatgctttcgtcgtgggcgccgtaatggccaagatggcaaaacccaagaaaagaaacgagacactggtctttagtgagaacgcagtggttgccctccgggaccatcggctctgtctcatgtggcgggtcggaaacctgaggaggtcccaccttgtggaagctcatgtgcgggcccagctgctgcagccacgcgtcacgcccgagggggagtacatcccgcttgaccaccaggacgtcgacgtcggattcgacgggggcaccgaccggatttttttggtgagcccaataacaattgtgcacgaaatagattctgcatcacctctgtatgagctcggacgagccgagctggcccgcgctgattttgagctagtggtcatcctcgagggcatggtcgaggctactgccatgaccacccagtgtcgaagctcatacctccctggtgagctgctgtgggggcaccggttcgaacccgtgctgtttcagcgagggtctcaatacgaggtcgattatcggcattttcaccggacttatgaagtcccgggcacacctgtgtgttcagcaaaagaactggacgagcgagcagagcaggcctctcatagcttgaaaagcagtttccccgggtccctgaccgcattctgttacgaaaacgagctggctttgtcctgctgccaggaagaggatgaggatgacgaaaccgaggaaggaaacggcgtggaaacagaggatggggctgccagccctcgcgttctgactcccaccctggcccttacgctgccaccttag

SEQ ID NO: 175752 - DNA, 3049 bp, Artificial Sequence
  derived and/or modified sequence
gtcaggtggaggatccctttccctcccgccctgcttttgctaggggaggggggtgccctgagcctgagtcgcagccagcctgggagctgggccatgttggccgcagatggccccctggtgaaggttcccgttggctttgggaagtagacaacgggtctgcctcacggggctgaggtgggactggaggatttcgagggcagaactctgggaaggaaagaaaggcttaggacccaaccagcattccccctggcactgcgggggcctggccagctcatggcgttccctgagcctgttccccaactgtgaaagggggtgatgatcttcacctcccggcatcctgagcggccaagcaggttgggggcgcctgccccccactaggccaagtggagggggtccctccgtccaatgggcctggccagggccctacgccgcctcagcggcgccctggattcgggagacagccgggcgggcgatgaagaggaggccgggcccgggttgtgccgcaacgggtgggcgccggcaccggtgcagtcacccgtgggccggcgccgcggtcgcttcgtcaagaaagacgggcactgcaacgtgcgtttcgtaaacctgggtggccagggcgcgcgctacctgagcgacctgttcaccacatgcgtggacgtgcgctggcgctggatgtgcctgctcttctcctgctccttcctcgcctcctggctgctcttcggcctggccttctggctcattgcctcgctgcacggcgacctggccgccccgccaccgcccgcgccctgcttctcacacgtggccagcttcctggccgccttcctcttcgcgctggagacgcagacgtccatcggctacggcgtgcgcagcgtcaccgaggagtgcccggccgctgtggccgccgtggtgctgcagtgcattgccggctgcgtgctcgacgccttcgtcgtgggtgctgtcatggccaagatggccaaacccaagaagcgcaacgagacgctggtcttcagcgagaacgccgtcgtggcgctgcgcgaccaccgcctctgcctcatgtggcgcgtcggcaacctgcgccgcagccacctggtcgaggcccacgtgcgtgcccagctgctgcagccccgtgtgaccccagagggtgagtacatcccgctggaccaccaggatgtggatgtgggctttgatggaggcaccgatcgtatcttcctcgtgtcccccatcaccatcgtccatgagatcgactctgccagtcctctgtatgagctaggacgtgccgagctggccagggctgactttgagctggtggtcattctcgaggggatggttgaggccacagccatgaccacacagtgtcgctcgtcctacctccctggtgaactgctctggggccatcgttttgagccagttctcttccagcgtggctcccagtatgaggtcgactatcgccacttccatcgcacttatgaggtcccagggacaccggtctgcagtgctaaggagctggatgaacgggcagagcaggcttcccacagcctcaagtctagtttccccggctctctgactgcattttgttatgagaatgaacttgctctgagctgctgccaggaggaagatgaggacgatgagactgaggaagggaatggggtggaaacagaagatggggctgctagcccccgagttctcacaccaaccctggcgctgaccctgcctccatgatgcaaactgatgtccccttccccgtgtatgcccccttccccaaggtagcaagatggagggatggggctctctcctgggatgggggcaggtgttcctgaataccgacaggcctgctgggtaaatgactaggtggtaaggttctgccatgcctggtgacccaccatggacatactggaccttaattcctctgcttctgtgctccctcctgagaaccctttatgagcctgattcctcagtctcaccagaattctggatcacccaagaggaaaagactggcagttctagattcctctatatggggagacctggattgttgaccagggtgagaagccaatggtatagactgcctctggggaagcaagttggcagttcttgaacagcatcagatatcaagagtttgtaggtctggattcacctaagattcaagggagtgttgcttctcaactcagccaactgagtagcaaatcatttgttctagaccacctaaggagggaaggttatggaatgccccaagtattcaagatcatcttgattgaccaaagaccaaaaaaaaaaaaaagacctgtggttccagaaagctcattagttgagattctgtgagtctaggttgaccacagaggcaagcactggtgagtctaggacagattttacgtggagagttgaactactccagaaactaaagagtaatgtttctagaatgcacaaaacattgttagtctgtgggtttagaaagactgaagtgacagattaagagttcttgatattagataactccaacttctggctgtagagcacccagccaagagaataagcagtgctttgaaaggatccactgggtgggttgtttttttttaaagtgccattctagaatgtccaaagggaatcaggattctgtggctgtagactgatcacagagtcaaggaagcagtggcaattctagatatctgagattttgctggttccagtttgcccaatggagttgagaatctcaatgattctagatgacttcttgtggttctgtaatgccaaaaggaatgaaggctccagggatacagagttgtccattaccaaagcctggaagttctcatcacctccaggtggactgcttggcagtgctaggaggtggactcaggacttcagaagcaacatttctggcctgacctggaaggtgaaggtgaaggtgagaccctgtagggcacagggctaattagtggacaagggaagggggaggcccagggctggtgagtctagaatgctctggaaccctacacctagtgatgtgtgtctatttctttttctttttcttttttttttttttttgagactgagtctc

SEQ ID NO: 175753 - DNA, 3120 bp, Artificial Sequence
  derived and/or modified sequence
ggcagaggttgcagtgagctgaggttgcggtgagctgagattgtgccgctgcactccagcctggcgacaaagcacgactccgtctcaaaaaaaaaaagaaaagaaaagaaaaaagttaaaaaaaaaattacccaggagtggtggtgtgcacctgtagtaatcccagctactcaggaggttgagacaggagaatcgcttaaacttgggacgcggagattgcagtaagccaggatcatgccactgcactccagcttgggcgacagagcgagactctgtctccaaaaaaaaaaaaaaaaaaaaaatgcgtatcgttccacctatttgacagatgaggccactaagccccaccagaaagcatgcttggccgatgagctcatccattcctgttgcccctgacgtttctgccggtttcttgtcccagcaggttgggggcgcctgccccccactaggccaagtggagggggtccctccgtccaatgggcctggccagggccctacgccgcctcagcggcgccctggattcgggagacagccgggcgggcgatgaagaggaggccgggcccgggttgtgccgcaacgggtgggcgccggcaccggtgcagtcacccgtgggccggcgccgcggtcgcttcgtcaagaaagacgggcactgcaacgtgcgtttcgtaaacctgggtggccagggcgcgcgctacctgagcgacctgttcaccacatgcgtggacgtgcgctggcgctggatgtgcctgctcttctcctgctccttcctcgcctcctggctgctcttcggcctggccttctggctcattgcctcgctgcacggcgacctggccgccccgccaccgcccgcgccctgcttctcacacgtggccagcttcctggccgccttcctcttcgcgctggagacgcagacgtccatcggctacggcgtgcgcagcgtcaccgaggagtgcccggccgctgtggccgccgtggtgctgcagtgcattgccggctgcgtgctcgacgccttcgtcgtgggtgctgtcatggccaagatggccaaacccaagaagcgcaacgagacgctggtcttcagcgagaacgccgtcgtggcgctgcgcgaccaccgcctctgcctcatgtggcgcgtcggcaacctgcgccgcagccacctggtcgaggcccacgtgcgtgcccagctgctgcagccccgtgtgaccccagagggtgagtacatcccgctggaccaccaggatgtggatgtgggctttgatggaggcaccgatcgtatcttcctcgtgtcccccatcaccatcgtccatgagatcgactctgccagtcctctgtatgagctaggacgtgccgagctggccagggctgactttgagctggtggtcattctcgaggggatggttgaggccacagccatgaccacacagtgtcgctcgtcctacctccctggtgaactgctctggggccatcgttttgagccagttctcttccagcgtggctcccagtatgaggtcgactatcgccacttccatcgcacttatgaggtcccagggacaccggtctgcagtgctaaggagctggatgaacgggcagagcaggcttcccacagcctcaagtctagtttccccggctctctgactgcattttgttatgagaatgaacttgctctgagctgctgccaggaggaagatgaggacgatgagactgaggaagggaatggggtggaaacagaagatggggctgctagcccccgagttctcacaccaaccctggcgctgaccctgcctccatgatgcaaactgatgtccccttccccgtgtatgcccccttccccaaggtagcaagatggagggatggggctctctcctgggatgggggcaggtgttcctgaataccgacaggcctgctgggtaaatgactaggtggtaaggttctgccatgcctggtgacccaccatggacatactggaccttaattcctctgcttctgtgctccctcctgagaaccctttatgagcctgattcctcagtctcaccagaattctggatcacccaagaggaaaagactggcagttctagattcctctatatggggagacctggattgttgaccagggtgagaagccaatggtatagactgcctctggggaagcaagttggcagttcttgaacagcatcagatatcaagagtttgtaggtctggattcacctaagattcaagggagtgttgcttctcaactcagccaactgagtagcaaatcatttgttctagaccacctaaggagggaaggttatggaatgccccaagtattcaagatcatcttgattgaccaaagaccaaaaaaaaaaaaaagacctgtggttccagaaagctcattagttgagattctgtgagtctaggttgaccacagaggcaagcactggtgagtctaggacagattttacgtggagagttgaactactccagaaactaaagagtaatgtttctagaatgcacaaaacattgttagtctgtgggtttagaaagactgaagtgacagattaagagttcttgatattagataactccaacttctggctgtagagcacccagccaagagaataagcagtgctttgaaaggatccactgggtgggttgtttttttttaaagtgccattctagaatgtccaaagggaatcaggattctgtggctgtagactgatcacagagtcaaggaagcagtggcaattctagatatctgagattttgctggttccagtttgcccaatggagttgagaatctcaatgattctagatgacttcttgtggttctgtaatgccaaaaggaatgaaggctccagggatacagagttgtccattaccaaagcctggaagttctcatcacctccaggtggactgcttggcagtgctaggaggtggactcaggacttcagaagcaacatttctggcctgacctggaaggtgaaggtgaaggtgagaccctgtagggcacagggctaattagtggacaagggaagggggaggcccagggctggtgagtctagaatgctctggaaccctacacctagtgatgtgtgtctatttctttttctttttcttttttttttttttttgagactgagtctc

SEQ ID NO: 175754 - DNA, 1311 bp, Artificial Sequence
  derived and/or modified sequence
atgggattagcacgtgcgttgcggcgattaagcggagcgcttgactccggggactctcgtgccggtgacgaggaggaagcaggtcccggtctctgtcggaatgggtgggcaccagctcctgtgcagtccccagtaggccgtcgccgtggacgcttcgtgaaaaaggacggacattgtaacgtgcggttcgtaaatctcggcggtcaaggcgcacggtacctgagtgacctatttaccacgtgcgtagacgtaaggtggcggtggatgtgtctgctgttctcctgtagcttcttagcttcatggctgcttttcggacttgccttctggttgatcgccagtctgcacggcgacctcgctgcacccccaccaccagccccttgcttctctcacgtagcctcctttctcgctgcttttttgtttgccctcgaaacgcagacttccattggttacggcgtccgaagcgtaacagaagagtgcccggcagcagtggcagcagtggtgctgcagtgcatcgccggatgtgtccttgatgccttcgtagtgggtgccgtgatggccaaaatggctaagcccaagaaaagaaatgagaccctcgtcttctcagagaatgccgtcgtggcgctgagagatcataggctgtgtctgatgtggcgcgttgggaacctccgaaggtcccatctggttgaggctcatgtgagggcacagttgctgcaacctagagttaccccagagggggaatatatcccattagatcaccaggacgtggacgttggcttcgatgggggaactgatagaattttcctcgtctcacctattactatcgtgcatgagattgacagtgcctcgccactctatgagctgggacgggctgagctggcgagagctgacttcgagctcgtggtcattctagaagggatggtcgaggctacagcaatgacaacccaatgtcgctcttcttacctgcccggagaattgctgtggggacacaggttcgagcctgttctttttcaacggggtagccagtacgaagttgactaccgacatttccacagaacttatgaggtgcctggcacgcctgtgtgttcagccaaggagctggatgagcgagcagaacaagcttcacactccctgaaaagttctttccccggaagtctaaccgcgttctgctacgagaacgaactggccttaagctgctgccaggaagaagatgaagatgatgaaactgaagaagggaatggcgttgagaccgaggatggagccgcatctccccgtgtgctcacgcccacgctcgccctgactcttccaccttag

SEQ ID NO: 175755 - DNA, 1311 bp, Artificial Sequence
  derived and/or modified sequence
atgggacttgccagggcgctacgccgtctgtctggggctctagacagcggtgactcacgagcaggcgatgaggaggaagcaggtcccggactgtgccgaaacggttgggcgcctgccccagtacagagccccgttggacggcgtagaggccgttttgtgaagaaggacggacactgtaatgtgcggtttgtgaacctcggcggacaaggtgccaggtatctgtccgacctattcaccacatgtgtggatgtgcggtggcgatggatgtgccttttattctcgtgttctttcctggcctcatggctgctcttcggactggcattttggctgattgccagcctccacggggatctggccgcaccacctcctccggctccttgctttagccacgtggcaagcttcctggcagcctttctgttcgctctggaaacacagacctcgatcggatacggggtgcgcagtgtgacagaagaatgcccagcagcagtggctgctgttgtactccagtgtattgccggatgcgtactggatgccttcgtggttggcgctgtgatggccaagatggcaaaacccaaaaagaggaatgaaacactggtcttctctgaaaatgccgtggttgctctgagggaccatcgcctctgtctgatgtggcgggtcggtaatttaagaagaagtcatttggtggaggcccatgtgcgcgctcagttgttgcagccacgtgtgacccccgaaggagagtatatccctctcgatcatcaagatgttgacgtcggtttcgacggaggaaccgaccgaattttcttagtctcccccattactatcgtgcacgagattgacagcgccagccctctctacgagcttggcagagctgaactcgccagggcagatttcgagctggttgttattttagaggggatggttgaagctaccgcaatgacgacacaatgccgttctagctacctccccggagaacttctctggggccatcgcttcgaacccgtgctctttcaaaggggctctcagtacgaggtggactacaggcattttcatcggacctacgaggtccctggcactcccgtctgttccgctaaggaattggacgagagagccgagcaggcaagccacagtctgaagagttcctttcctgggtctttgacagcattctgttacgaaaatgagttagcgcttagttgttgtcaagaagaggacgaggatgacgagaccgaagaaggaaatggcgtggaaactgaagacggggcagctagtccacgcgtgctcaccccgaccttggccctgacccttcccccatag

SEQ ID NO: 175756 - protein, 535 aa, Artificial Sequence
  derived and/or modified sequence
MGIVEPGCGDMLTGTEPMPGSDEGRAPGADPQHRYFYPEPGAQDADERRGGGSLGSPYPGGALVPAPPSRFLGAYAYPPRPQAAGFPGAGESFPPPADAEGYQPGEGYAAPDPRAGLYPGPREDYALPAGLEVSGKLRVALNNHLLWSKFNQHQTEMIITKQGRRMFPFLSFTVAGLEPTSHYRMFVDVVLVDQHHWRYQSGKWVQCGKAEGSMPGNRLYVHPDSPNTGAHWMRQEVSFGKLKLTNNKGASNNVTQMIVLQSLHKYQPRLHIVEVNDGEPEAACNASNTHIFTFQETQFIAVTAYQNAEITQLKIDNNPFAKGFRENFESMYTSVDTSIPSPPGPNCQFLGGDHYSPLLPNQYPVPSRFYPDLPGQAKDVVPQAYWLGAPRDHSYEAEFRAVSMKPAFLPSAPGPTMSYYRGQEVLAPGAGWPVAPQYPPKMGPASWFRPMRTLPMEPGPGGSEGRGPEDQGPPLVWTEIAPIRPESSDSGLGEGDSKRRRVSPYPSSGDSSSPAGAPSPFDKEAEGQFYNYFPN

SEQ ID NO: 175757 - DNA, 2589 bp, Artificial Sequence
  derived and/or modified sequence
cggcccgctggagaggaagcccgagagctgccgcgcgcctgccggacgagggcgtagaagccaggcgtcagagcccgggctccggtggggtcccccacccggccctcgggtcccccgccccctgctccctgcccatcccagcccacgcgaccctctcgcgcgcggaggggcgggtcctcgacggctacgggaaggtgccagcccgccccggatgggcatcgtggagccgggttgcggagacatgctgacgggcaccgagccgatgccggggagcgacgagggccgggcgcctggcgccgacccgcagcaccgctacttctacccggagccgggcgcgcaggacgcggacgagcgtcgcgggggcggcagcctggggtctccctacccggggggcgccttggtgcccgccccgccgagccgcttccttggagcctacgcctacccgccgcgaccccaggcggccggcttccccggcgcgggcgagtccttcccgccgcccgcggacgccgagggctaccagccgggcgagggctacgccgccccggacccgcgcgccgggctctacccggggccgcgtgaggactacgcgctacccgcgggactggaggtgtcggggaaactgagggtcgcgctcaacaaccacctgttgtggtccaagtttaatcagcaccagacagagatgatcatcaccaagcagggacggcggatgttcccattcctgtcatttactgtggccgggctggagcccaccagccactacaggatgtttgtggacgtggtcttggtggaccagcaccactggcggtaccagagcggcaagtgggtgcagtgtggaaaggccgagggcagcatgccaggaaaccgcctgtacgtccacccggactcccccaacacaggagcgcactggatgcgccaggaagtttcatttgggaaactaaagctcacaaacaacaagggggcgtccaacaatgtgacccagatgattgtgctccagtccctccataagtaccagccccggctgcatatcgttgaggtgaacgacggagagccagaggcagcctgcaacgcttccaacacgcatatctttactttccaagaaacccagttcattgccgtgactgcctaccagaatgccgagattactcagctgaaaattgataataacccctttgccaaaggattccgggagaactttgagtccatgtacacatctgttgacaccagcatcccctccccgcctggacccaactgtcaattccttgggggagatcactactctcctctcctacccaaccagtatcctgttcccagccgcttctaccccgaccttcctggccaggcgaaggatgtggttccccaggcttactggctgggggccccccgggaccacagctatgaggctgagtttcgagcagtcagcatgaagcctgcattcttgccctctgcccctgggcccaccatgtcctactaccgaggccaggaggtcctggcacctggagctggctggcctgtggcaccccagtaccctcccaagatgggcccggccagctggttccgccctatgcggactctgcccatggaacccggccctggaggctcagagggacggggaccagaggaccagggtccccccttggtgtggactgagattgcccccatccggccggaatccagtgattcaggactgggcgaaggagactctaagaggaggcgcgtgtccccctatccttccagtggtgacagctcctcccctgctggggccccttctccttttgataaggaagctgaaggacagttttataactattttcccaactgagcagatgacatgatgaaaggaacagaaacagtgttattaggttggaggacaccgactaatttgggaaacggatgaaggactgagaaggcccccgctccctctggcccttctctgtttagtagttggttggggaagtggggctcaagaaggattttggggttcaccagatgcttcctggcccacgatgaaacctgagaggggtgtccccttgccccatcctctgccctaactacagtcgtttacctggtgctgcgtcttgcttttggtttccagctggagaaaagaagacaagaaagtcttgggcatgaaggagctttttgcatctagtgggtgggaggggtcaggtgtgggacatgggagcaggagactccactttcttcctttgtacagtaactttcaaccttttcgttggcatgtgtgttaatccctgatccaaaaagaacaaatacacgtatgttataaccatcagcccgccagggtcagggaaaggactcacctgactttggacagctggcctgggctccccctgctcaaacacagtggggatcagagaaaaggggctggaaaggggggaatggcccacatctcaagaagcaagatattgtttgtggtggttgtgtgtgggtgtgtgttttttctttttctttctttttattttttttgaatgggggaggctatttattgtactgagagtggtgtctggatatattccttttgtcttcatcactttctgaaaataaacataaaactgttaaaaaaaaaaaaaaaaa

SEQ ID NO: 175758 - DNA, 1608 bp, Artificial Sequence
  derived and/or modified sequence
atgggcatcgtggagcccggctgcggcgacatgctgaccggcaccgagcccatgcccggcagcgacgagggcagagcccccggcgccgacccccagcacagatacttctaccccgagcccggcgcccaggacgccgacgagagaagaggcggcggcagcctgggcagcccctaccccggcggcgccctggtgcccgccccccccagcagattcctgggcgcctacgcctacccccccagaccccaggccgccggcttccccggcgccggcgagagcttccccccccccgccgacgccgagggctaccagcccggcgagggctacgccgcccccgaccccagagccggcctgtaccccggccccagagaggactacgccctgcccgccggcctggaggtgagcggcaagctgagagtggccctgaacaaccacctgctgtggagcaagttcaaccagcaccagaccgagatgatcatcaccaagcagggcagaagaatgttccccttcctgagcttcaccgtggccggcctggagcccaccagccactacagaatgttcgtggacgtggtgctggtggaccagcaccactggagataccagagcggcaagtgggtgcagtgcggcaaggccgagggcagcatgcccggcaacagactgtacgtgcaccccgacagccccaacaccggcgcccactggatgagacaggaggtgagcttcggcaagctgaagctgaccaacaacaagggcgccagcaacaacgtgacccagatgatcgtgctgcagagcctgcacaagtaccagcccagactgcacatcgtggaggtgaacgacggcgagcccgaggccgcctgcaacgccagcaacacccacatcttcaccttccaggagacccagttcatcgccgtgaccgcctaccagaacgccgagatcacccagctgaagatcgacaacaaccccttcgccaagggcttcagagagaacttcgagagcatgtacaccagcgtggacaccagcatccccagcccccccggccccaactgccagttcctgggcggcgaccactacagccccctgctgcccaaccagtaccccgtgcccagcagattctaccccgacctgcccggccaggccaaggacgtggtgccccaggcctactggctgggcgcccccagagaccacagctacgaggccgagttcagagccgtgagcatgaagcccgccttcctgcccagcgcccccggccccaccatgagctactacagaggccaggaggtgctggcccccggcgccggctggcccgtggccccccagtacccccccaagatgggccccgccagctggttcagacccatgagaaccctgcccatggagcccggccccggcggcagcgagggcagaggccccgaggaccagggcccccccctggtgtggaccgagatcgcccccatcagacccgagagcagcgacagcggcctgggcgagggcgacagcaagagaagaagagtgagcccctaccccagcagcggcgacagcagcagccccgccggcgcccccagccccttcgacaaggaggccgagggccagttctacaactacttccccaactag

SEQ ID NO: 175759 - DNA, 1608 bp, Artificial Sequence
  derived and/or modified sequence
atgggtattgtggaaccgggctgcggcgacatgctgacagggaccgagccaatgccggggagcgatgaaggcagagcgccgggggccgaccctcagcaccggtacttctacccggagccaggtgcccaagatgcagatgaacgcagggggggcggatcattggggagcccttacccaggcggggcccttgtcccagctccacctagccgctttctaggcgcctacgcctaccccccgcgacctcaggccgcaggattcccaggcgcaggcgagagcttccctccacccgccgacgccgagggctaccagcctggggagggctacgctgcacctgatccacgcgcgggtctgtaccctggtcctcgagaggactatgctttgcccgccgggcttgaagtttctggcaaattgagggtggctctgaataaccacctgctctggtccaagtttaatcagcaccagaccgaaatgatcatcacgaaacagggcagacggatgttcccttttctgtcttttacagtcgccggcctggaacccacttcccactaccgcatgtttgtcgacgtcgtgcttgtcgatcaacatcactggcgctatcagtccggcaaatgggtccagtgtgggaaagccgaaggaagcatgccaggcaatcggctctacgtccatccggatagccctaatactggagcccattggatgagacaggaggtcagtttcggaaaactgaaacttacaaataacaagggcgcatccaataacgtgacccaaatgatcgtcctgcagagcctccacaaatatcagcctcgcctgcacattgtggaggtcaatgacggggaaccagaagctgcgtgcaacgcatccaatacccatatttttacttttcaggaaacccaatttatcgctgtgacagcctatcagaatgccgaaattacacagcttaagatcgacaacaaccccttcgctaaggggttccgggagaactttgaaagcatgtacaccagcgtagatacatctatcccatcccccccaggacctaactgccaattcctgggcggcgaccactatagccctttgcttcccaatcagtaccccgtaccttcccggttttatccagacctgcctgggcaagccaaagacgtcgtgcctcaggcatactggttgggagccccccgagaccattcgtacgaagccgagttccgcgccgtcagcatgaagcccgcctttctgccatcagcaccaggaccgactatgtcctactacagaggccaggaggtcctggctcctggagcaggatggcctgtggcacctcaatacccccccaaaatgggccctgcctcttggttcagacccatgagaacgctccctatggagccaggccccggaggatccgaagggcgcggtcccgaagatcagggtccaccgttggtgtggactgagatcgcacccattcggcccgaatcctccgattctggactgggtgagggagacagtaaaaggcggcgcgtcagcccttacccttctagcggcgattcttcatcccccgccggcgccccttcccctttcgacaaagaagctgagggacagttttacaattactttccaaattag

SEQ ID NO: 175760 - DNA, 1608 bp, Artificial Sequence
  derived and/or modified sequence
atgggcatcgtggagcccggctgtggggacatgctgactggaacagagcccatgcctggcagtgatgagggccgggcccctggagctgacccccagcaccgctacttctacccagagcccggggcccaggatgctgatgagcggcggggcggcggcagcctgggcagcccctacccaggaggagccctggtgcctgccccacccagccgcttcctgggcgcctatgcctacccaccccggccccaggccgccggcttccctggagctggggagagcttccccccaccagcagatgctgagggctaccagcccggggagggctatgctgccccagaccccagggctggcctgtacccaggccccagagaagattatgccctgcctgctggcctggaggtgtctgggaagctgcgggtggccctgaacaaccacctgctgtggagcaagttcaaccagcaccagacagagatgatcatcaccaagcagggccgcaggatgttccccttcctgtccttcaccgtggccggcctggagcccaccagccactacaggatgtttgtggatgtggtgctggtggaccagcaccactggagataccagagcggcaagtgggtgcagtgtgggaaggccgagggctccatgcctggcaaccggctgtatgtgcacccagacagccccaacacaggagcccactggatgaggcaggaggtgtcctttgggaagctgaagctgaccaacaacaagggggccagcaacaacgtgacccagatgattgtgctgcagagcctgcacaagtaccagccccggctgcacatcgtggaggtgaatgatggagagcctgaggccgcctgcaatgccagcaacacccacatcttcaccttccaggagacccagttcatcgctgtgacagcctaccagaatgctgagatcacccagctgaagattgacaacaacccctttgccaagggcttccgggagaactttgagagcatgtacacctctgtggacaccagcatccccagccccccaggccccaactgccagttcctgggcggggaccactacagccccctgctgcccaaccagtaccctgtgcccagccgcttctacccagacctgcccggccaggccaaggatgtggtgccccaggcctactggctgggcgccccccgggaccacagctatgaagctgagttccgggctgtgtccatgaagccagccttcctgcccagcgcccctggccccaccatgagctactaccggggccaggaggtgctggcccctggggccggctggcctgtggccccccagtacccacccaagatgggccctgcctcctggttccggcccatgaggaccctgcccatggagcccggccctgggggcagcgagggccggggccctgaggaccagggcccccccctggtgtggacagagatcgcccccatccggcctgagagcagtgacagcggcctgggggagggggacagcaagagaagaagagtgagcccctaccccagcagcggggacagcagcagccctgctggggcccccagcccctttgacaaggaggccgagggccagttctacaactacttccccaactag

SEQ ID NO: 175761 - DNA, 1608 bp, Artificial Sequence
  derived and/or modified sequence
atgggcatcgtggagcccggctgcggcgacatgctgaccggcaccgagccgatgcccgggtcggacgaaggaagggcaccaggcgctgatcctcagcaccgctacttctaccccgagccaggggcccaggatgcagatgagcggagaggcggaggctccctcggatccccctaccctgggggagccctggttcctgcaccaccctcgagattcctaggagcatacgcttatccacctcgaccacaggccgcagggttccctggcgcgggcgaatcttttccaccccccgcagacgcggaggggtatcagcctggtgaagggtacgccgcccctgacccccgcgccgggctgtatcccggccccagagaagactatgctctgcctgccggtcttgaagttagtggcaagctgcgagttgccttgaacaaccacctactctggtcgaagttcaatcagcaccagaccgaaatgattattacaaaacaaggccgcagaatgttccctttcctaagttttactgttgccggacttgagcccacaagtcattatcggatgtttgtggatgtagtgctggtcgatcagcatcactggcggtaccagagtggtaagtgggtccagtgtgggaaggcagaaggctctatgcctgggaaccgcctctatgtgcatccagacagtccaaacacgggggcacactggatgaggcaggaagtctcattcggcaaactgaagctgaccaataacaagggagcctccaacaatgttacacagatgatagtgctgcagtccttgcataagtaccagccaagactgcatattgtggaggtaaacgacggcgaacccgaagctgcttgcaatgcgagtaatacacacatcttcacctttcaagagactcagtttattgctgtgacggcctatcagaacgccgagatcacccagctaaaaatcgataacaacccctttgccaaagggttccgggaaaattttgaatccatgtatacaagcgtggacacgagcatcccctcaccgcccggacccaattgtcagtttctagggggagatcactattcgccgctcctgccaaatcagtacccggtcccatctcgattttaccccgatctgccaggacaggctaaggacgtcgttccccaggcctattggttaggcgccccaagagatcactcctatgaagctgaatttcgagccgtttctatgaaaccggccttccttcctagcgcccccggacctactatgtcgtactaccgtggccaggaggtactggcccctggtgcgggctggcccgtggccccacaatatccccctaagatggggcccgctagctggttccggcccatgcgaaccctccccatggagcctggtccgggaggaagcgagggacgcgggcctgaggatcagggcccccccctggtttggaccgaaatcgcccccatcagacccgaatccagcgatagtggtttaggggaaggtgattcaaaaagacgccgggtctccccatacccttcatcgggggacagctctagtcctgccggagcaccttcacctttcgacaaagaggccgaaggccagttctacaattactttccaaactag

SEQ ID NO: 175762 - DNA, 1608 bp, Artificial Sequence
  derived and/or modified sequence
atggggatagtggaaccaggttgtggggatatgctgaccggaaccgagcctatgcccggatcagatgagggccgtgcgccaggggctgatccccagcatagatacttttacccagagcctggggcacaggatgccgacgaaaggagaggaggaggtagcctaggatcgccctatcccggaggcgctctggtacccgctcccccatcgagattcctcggagcatacgcgtatcctcccagaccacaggctgctggttttcctggtgccggagaaagctttcccccaccagcagatgccgagggttaccaacccggagaaggctatgctgcacccgacccccgagccggactgtatccgggtccaagagaagattacgccttgccagccggtctggaggtgtctggcaaactgcgagtggccttgaataatcatctgctctggtccaagtttaatcagcatcagacagagatgattatcaccaaacaaggtagaaggatgttccccttcctgtctttcaccgtagctggactggaacccacaagtcattatcggatgttcgtggatgttgtgctcgtggatcagcaccactggcgataccagtccggtaaatgggtgcagtgcgggaaggctgaaggctccatgcctggcaacaggctgtacgtgcacccagacagtcccaacacaggcgcacactggatgagacaagaagttagtttcgggaagttgaagctgacaaacaacaaaggagcttcaaacaatgtgacccagatgattgtcctacaatcgctgcacaaataccaaccacggcttcatatagtagaggtcaatgacggcgagcctgaggccgcttgcaacgccagtaacacccatattttcacttttcaggagactcagtttattgccgttacagcgtatcaaaatgctgaaataactcagttaaagatcgataataatccatttgccaaggggttcagggagaacttcgaatccatgtacacctcagttgacacgagtattccatccccacctggtcctaattgtcagttcctgggcggagatcactactctcccctgttaccgaatcagtatccagtgccctcgagattttacccagacttgccaggccaggctaaggatgtcgtcccacaagcctattggctgggcgctccaagggaccatagttacgaggccgaattcagggccgtgtctatgaaacctgctttcttgcccagcgcgccaggccctacgatgtcctattacaggggacaggaggtgctcgctcctggggctggttggccagtggcaccacagtatcctccgaagatggggcctgcgagctggtttcgaccgatgaggacgctgcctatggaaccagggccagggggaagtgaaggcagaggcccagaagatcaggggcctcctttggtatggacagaaattgcacctatccggcctgagagctctgacagcggcctgggagagggtgactcgaagagaagaagggtcagcccctacccctcaagcggcgattcttctagccccgcaggtgcgccatcaccattcgacaaggaggccgaagggcagttctataactattttccaaattag

SEQ ID NO: 175763 - DNA, 2572 bp, Artificial Sequence
  derived and/or modified sequence
cggcccgctggagaggaagcccgagagctgccgcgcgcctgccggacgagggcgtagaagccaggcgtcagagcccgggctccggtggggtcccccacccggccctcgggtcccccgccccctgctccctgcccatcccagcccacgcgaccctctcgcgcgcggaggggcgggtcctcgacggctacgggaaggtgccagcccgccccggatgggcatcgtggagccgggttgcggagacatgctgacgggcaccgagccgatgccggggagcgacgagggccgggcgcctggcgccgacccgcagcaccgctacttctacccggagccgggcgcgcaggacgcggacgagcgtcgcgggggcggcagcctggggtctccctacccggggggcgccttggtgcccgccccgccgagccgcttccttggagcctacgcctacccgccgcgaccccaggcggccggcttccccggcgcgggcgagtccttcccgccgcccgcggacgccgagggctaccagccgggcgagggctacgccgccccggacccgcgcgccgggctctacccggggccgcgtgaggactacgcgctacccgcgggactggaggtgtcggggaaactgagggtcgcgctcaacaaccacctgttgtggtccaagtttaatcagcaccagacagagatgatcatcaccaagcagggacggcggatgttcccattcctgtcatttactgtggccgggctggagcccaccagccactacaggatgtttgtggacgtggtcttggtggaccagcaccactggcggtaccagagcggcaagtgggtgcagtgtggaaaggccgagggcagcatgccaggaaaccgcctgtacgtccacccggactcccccaacacaggagcgcactggatgcgccaggaagtttcatttgggaaactaaagctcacaaacaacaagggggcgtccaacaatgtgacccagatgattgtgctccagtccctccataagtaccagccccggctgcatatcgttgaggtgaacgacggagagccagaggcagcctgcaacgcttccaacacgcatatctttactttccaagaaacccagttcattgccgtgactgcctaccagaatgccgagattactcagctgaaaattgataataacccctttgccaaaggattccgggagaactttgagtccatgtacacatctgttgacaccagcatcccctccccgcctggacccaactgtcaattccttgggggagatcactactctcctctcctacccaaccagtatcctgttcccagccgcttctaccccgaccttcctggccaggcgaaggatgtggttccccaggcttactggctgggggccccccgggaccacagctatgaggctgagtttcgagcagtcagcatgaagcctgcattcttgccctctgcccctgggcccaccatgtcctactaccgaggccaggaggtcctggcacctggagctggctggcctgtggcaccccagtaccctcccaagatgggcccggccagctggttccgccctatgcggactctgcccatggaacccggccctggaggctcagagggacggggaccagaggaccagggtccccccttggtgtggactgagattgcccccatccggccggaatccagtgattcaggactgggcgaaggagactctaagaggaggcgcgtgtccccctatccttccagtggtgacagctcctcccctgctggggccccttctccttttgataaggaagctgaaggacagttttataactattttcccaactgagcagatgacatgatgaaaggaacagaaacagtgttattaggttggaggacaccgactaatttgggaaacggatgaaggactgagaaggcccccgctccctctggcccttctctgtttagtagttggttggggaagtggggctcaagaaggattttggggttcaccagatgcttcctggcccacgatgaaacctgagaggggtgtccccttgccccatcctctgccctaactacagtcgtttacctggtgctgcgtcttgcttttggtttccagctggagaaaagaagacaagaaagtcttgggcatgaaggagctttttgcatctagtgggtgggaggggtcaggtgtgggacatgggagcaggagactccactttcttcctttgtacagtaactttcaaccttttcgttggcatgtgtgttaatccctgatccaaaaagaacaaatacacgtatgttataaccatcagcccgccagggtcagggaaaggactcacctgactttggacagctggcctgggctccccctgctcaaacacagtggggatcagagaaaaggggctggaaaggggggaatggcccacatctcaagaagcaagatattgtttgtggtggttgtgtgtgggtgtgtgttttttctttttctttctttttattttttttgaatgggggaggctatttattgtactgagagtggtgtctggatatattccttttgtcttcatcactttctgaaaataaacataaaactgtt

SEQ ID NO: 175764 - protein, 958 aa, Artificial Sequence [sequence omitted]

SEQ ID NO: 175765 - protein, 166 aa, Artificial Sequence
  derived and/or modified sequence
MRTHTRGAPSVFFIYLLCFVSAYITDENPEVMIPFTNANYDSHPMLYFSRAEVAELQLRAASSHEHIAARLTEAVHTMLSSPLEYLPPWDPKDYSARWNEIFGNNLGALAMFCVLYPENIEARDMAKDYMERMAAQPSWLVKDAPWDEVPLAHSLVGFATAYDFLY

SEQ ID NO: 175766 - protein, 977 aa, Artificial Sequence
  derived and/or modified sequence
MGSFEDGLAALEIWRSDATMRTHTRGAPSVFFIYLLCFVSAYITDENPEVMIPFTNANYDSHPMLYFSRAEVAELQLRAASSHEHIAARLTEAVHTMLSSPLEYLPPWDPKDYSARWNEIFGNNLGALAMFCVLYPENIEARDMAKDYMERMAAQPSWLVKDAPWDEVPLAHSLVGFATAYDFLYNYLSKTQQEKFLEVIANASGYMYETSYRRGWGFQYLHNHQPTNCMALLTGSLVLMNQGYLQEAYLWTKQVLTIMEKSLVLLREVTDGSLYEGVAYGSYTTRSLFQYMFLVQRHFNINHFGHPWLKQHFAFMYRTILPGFQRTVAIADSNYNWFYGPESQLVFLDKFVMRNGSGNWLADQIRRNRVVEGPGTPSKGQRWCTLHTEFLWYDGSLKSVPPPDFGTPTLHYFEDWGVVTYGSALPAEINRSFLSFKSGKLGGRAIYDIVHRNKYKDWIKGWRNFNAGHEHPDQNSFTFAPNGVPFITEALYGPKYTFFNNVLMFSPAVSKSCFSPWVGQVTEDCSSKWSKYKHDLAASCQGRVVAAEEKNGVVFIRGEGVGAYNPQLNLKNVQRNLILLHPQLLLLVDQIHLGEESPLETAASFFHNVDVPFEETVVDGVHGAFIRQRDGLYKMYWMDDTGYSEKATFASVTYPRGYPYNGTNYVNVTMHLRSPITRAAYLFIGPSIDVQSFTVHGDSQQLDVFIATSKHAYATYLWTGEATGQSAFAQVIADRHKILFDRNSAIKSSIVPEVKDYAAIVEQNLQHFKPVFQLLEKQILSRVRNTASFRKTAERLLRFSDKRQTEEAIDRIFAISQQQQQQSKSKKNRRAGKRYKFVDAVPDIFAQIEVNEKKIRQKAQILAQKELPIDEDEEMKDLLDFADVTYEKHKNGGLIKGRFGQARMVTTTHSRAPSLSASYTRLFLILNIAIFFVMLAMQLTYFQRAQSLHGQRCLYAVLLIDSCILLWLYSSCSQSQC

SEQ ID NO: 175767 - DNA, 2877 bp, Artificial Sequence
  derived and/or modified sequence
atgaggacgcatacaagaggggcgcctagcgtgtttttcatatacctcctttgctttgtatcagcctatatcaccgacgagaatcctgaggtgatgatccccttcacaaatgctaactacgactcacatccgatgctgtacttctcgcgggcagaggtggcggagttacagttgagagccgctagctcacatgagcacattgctgcccggttgaccgaagccgttcacaccatgctgtccagtccactcgagtacctccctccctgggaccctaaagactattccgctcgctggaatgaaatttttggcaacaaccttggagcactggctatgttctgcgtgctctaccccgaaaatatcgaggctcgggacatggccaaggactacatggaaagaatggccgctcagccttcatggctcgtcaaagacgcaccctgggatgaagtgcccctggcacactctctggttggtttcgccacagcctacgatttcttgtacaactacctctccaagactcagcaggaaaagttcctggaggtgatagccaacgcaagtggctacatgtatgagaccagctaccgccgcgggtggggcttccagtatctgcataaccatcagccaacaaattgcatggctcttttgaccggctcactggtgctgatgaatcagggctacctgcaggaagcttacctttggactaaacaggtgttaacaatcatggaaaagtccctggttctcctgcgggaagtcactgatggctcactgtacgagggggtagcctatggctcctacaccacccgcagtctttttcagtatatgttcctggtgcagcgtcatttcaatattaatcactttggacacccctggctgaagcagcacttcgccttcatgtatagaaccattctgcccggcttccaacgcacggtagcaattgctgattcaaattataattggttttacggtcccgagagtcaactggtgttcctggacaagttcgtgatgaggaatggttccggaaattggctcgccgaccagatacgccgaaatcgcgttgtcgaaggccccggcacaccatccaagggtcagaggtggtgtacacttcatacagagttcctttggtacgatggcagcctgaagtccgtgccccctccggattttggaacccccaccctgcattacttcgaagactggggagttgtaacatacggatctgcgctcccggccgagatcaacagatcctttctgagttttaagagcggcaagctgggtggcagagcaatatatgatatcgtgcatcggaataagtataaggactggattaaaggatggagaaatttcaacgcgggccacgagcaccctgatcagaatagttttacctttgctcccaatggggtgcctttcatcacagaggccctctatggccccaagtacaccttttttaacaatgtgttgatgttcagtcctgcagtgtccaaatcctgcttcagcccttgggtgggccaggtgacagaagattgctcctctaagtggtccaaatacaaacatgatctcgcagcctcttgccagggtcgtgtcgtcgctgctgaggaaaagaatggagtggttttcatccggggcgaaggcgtcggcgcttataatcctcagctcaacctgaagaacgtccagcggaatctcattctgctccatccccagcttctcctgctcgttgatcaaatccacctaggcgaagagtcgcctctggagactgctgctagcttttttcacaatgtagatgtgcccttcgaagaaacagttgttgatggggtgcacggagcttttatcagacagcgcgatggcctatataagatgtactggatggacgataccggctacagtgagaaggccacatttgcttccgtcacttatccacgtgggtacccttataacgggaccaattatgtcaacgtgacaatgcatctgcggtctcccattacccgggcggcctatctgttcataggcccgagcatcgacgtgcagtcctttactgttcacggggatagccagcagctggacgtcttcatcgccacatcaaagcacgcgtatgctacatacctgtggactggtgaagccactggtcagtccgcatttgcccaagttattgcagaccgccacaagatactttttgacaggaactccgccataaaaagctccatagtccccgaggtcaaggactacgccgctattgttgagcagaatctgcagcactttaagcccgtctttcagttactagaaaagcagattctctcaagagttcgtaacaccgcaagcttccgaaagactgccgagagacttctccggttctctgataaacgtcagacggaggaggctatcgataggatattcgcaatctcccagcaacagcagcaacagtccaaatccaaaaaaaaccggagggccggaaagagatataagtttgttgatgccgtgccggacattttcgctcagatcgaagtgaacgagaaaaaaatcagacaaaaagcccaaattctggcacagaaagaattacccatagatgaggacgaagagatgaaagacctgctggatttcgccgacgttacctacgaaaaacataagaatggcgggctgatcaaggggagattcggccaggcaaggatggtgacaactacccacagccgggcacccagcttaagtgcctcctacacccgattgttcctaattctcaatatagctattttttttgtgatgctagccatgcagctgacttactttcagcgagcacaaagtctccacgggcagcgatgcctgtatgctgttctcctgatcgactcatgtatcttactctggctgtacagctcctgctcccagtcccagtgctag

SEQ ID NO: 175768 - DNA, 2877 bp, Artificial Sequence
  derived and/or modified sequence
atgcggacccatacacgcggagcgccctcggtcttcttcatctatctcctttgttttgtgagcgcctacattaccgatgagaatcctgaagtgatgatcccgttcacaaatgctaactacgacagccatcccatgctgtacttctctagagcagaggttgccgaacttcagctgagggcggcttcaagccacgagcacatcgcggcgcgccttaccgaagccgtgcacaccatgctctcgtcccctctcgaatacttgcccccctgggaccccaaggattactcggctcggtggaacgaaatattcggaaataatctgggcgcgctagccatgttctgcgtcctgtaccccgagaatatcgaggccagggatatggccaaagattacatggagagaatggccgcgcagccctcttggctggtgaaggacgccccttgggacgaggtgccgctggcacatagtctggtgggctttgcaaccgcctatgattttctatacaattatctttcgaagacccagcaagagaaattccttgaggtaatcgctaatgcatctggttatatgtacgaaacgtcgtaccgccgcggatggggcttccaatatcttcacaatcatcaaccgactaactgtatggctttgctgaccggtagccttgtgctaatgaatcagggctacctgcaagaggcgtatctttggactaaacaggtcctgaccatcatggaaaagagtctggtactactgcgagaggtcacagacggctccctctacgagggagtcgcttatggaagttacacaacgcgtagcttgtttcagtacatgtttctggtacagcgccattttaacattaaccatttcggacatccatggctgaagcagcatttcgccttcatgtaccgtaccattctcccaggattccagcgcaccgtggcgattgctgattctaattacaattggttttatggacctgagagccagctggtattcctcgacaagttcgtgatgaggaacggttccggcaactggttggctgatcagataagacgcaatagagtcgtggagggtccaggcacaccctctaaggggcagcggtggtgtacactgcacactgagttcctctggtacgatggatctctgaagagcgttccacctcccgattttggcacacccactctgcactacttcgaggactggggcgtcgtaacctacgggtcagcactccctgccgaaatcaaccgatccttcctatcattcaaaagtgggaagctggggggcagggctatttatgacatagtgcacagaaacaaatataaggattggataaaggggtggcggaattttaatgccggacatgagcacccagaccagaacagcttcaccttcgcccctaatggagtcccatttattacagaagccctgtacgggccaaagtacacgtttttcaataacgtgttgatgttctccccagccgtttcgaaaagttgcttcagcccttgggtgggtcaggtgacggaagactgcagcagcaaatggagcaagtacaaacatgatctcgccgcctcgtgtcagggacgagtggtggcagccgaagaaaaaaacggagtagtcttcatacgtggcgagggcgtgggagcttacaacccccagctgaatttgaaaaatgtacagaggaacttaattctcttgcacccccagctgctcctgctcgtcgatcaaattcatctgggtgaagagagtcctctggagacagccgcctcttttttccataatgtggacgtcccattcgaggagaccgttgtggatggtgtccatggagccttcatccgtcaacgtgatgggttatataaaatgtactggatggatgacaccggatatagcgaaaaggcaacgtttgcctccgtgacctatccgcgtggctatccatacaacgggacaaattacgtgaatgtaaccatgcacctgcggtctcctatcactcgagcagcctatctcttcatcggtccctccattgacgtgcaaagcttcacagtccacggggactcccagcagctcgatgttttcatcgctacttcaaaacacgcctacgccacatacctgtggactggagaggcaacggggcagagcgcgttcgctcaggtcatcgccgacaggcacaaaatcctgttcgatcggaattctgccatcaaatcttctatcgtccccgaggtcaaagactacgccgccatagtggagcaaaatctgcagcattttaagcctgtgtttcagcttctggagaagcagatcctttcacgggtgaggaataccgccagcttccgcaaaacagcagagaggttgctgcggtttagcgataaacgtcagaccgaggaagccatagacagaatattcgctatatcccagcagcaacagcagcagagtaaaagcaagaagaaccgccgtgccggcaagcggtataaatttgtggacgctgtaccggacatcttcgctcagatcgaagtcaatgaaaaaaaaatccgacagaaggcacagatattggctcaaaaggagctccccattgacgaagatgaggaaatgaaggatctgctggattttgcagatgtgacatacgaaaagcacaaaaacggcggcctcataaaagggcgttttggccaagccaggatggtgacgactacgcacagtagagcgccaagcttaagcgccagttacacccggcttttcctcatactaaacattgctatcttttttgtgatgctggcaatgcagttaacatatttccagagggcccagtcattgcatggccagaggtgtttatacgccgtgcttttgattgattcttgtatccttctgtggctttatagctcctgctcacagagtcaatgctag

SEQ ID NO: 175769 - DNA, 501 bp, Artificial Sequence
  derived and/or modified sequence
atgcgaacccacactcgcggtgctccaagcgtgtttttcatctaccttttgtgtttcgtgagcgcttacattaccgacgaaaatccagaagtgatgattcccttcacaaacgccaattatgatagccatcccatgttgtactttagtcgggctgaagtggccgagctgcaactcagggccgccagttcccatgagcatatagcagcccgattgaccgaggccgtccataccatgttgagctcccctttggaatacctcccaccttgggatcctaaggactacagcgccaggtggaatgagatctttggaaacaacttgggcgctcttgctatgttctgtgtgctctacccagagaacatcgaggcgagggacatggctaaagattacatggagcgtatggcagcacagcccagttggctggtgaaggacgccccctgggacgaggttcctctagcacacagcctcgtggggtttgcaacggcatacgactttctttactag

SEQ ID NO: 175770 - DNA, 2877 bp, Artificial Sequence
  derived and/or modified sequence
atgagaacccacactaggggcgctccatcagttttttttatctacctattgtgttttgtgtctgcctatatcacagacgagaaccccgaggtaatgattccatttaccaacgccaattatgacagtcaccccatgctgtatttttcaagggcagaagtggccgagctccagctcagggcagcatcatcccacgagcacattgccgctcggctgactgaagcggtacacacaatgctgtcttcgccattggaatatttgcctccctgggatccaaaggattactctgcacgctggaatgaaatttttggcaataatctgggagccctggccatgttctgtgttctgtaccccgaaaatattgaggcacgggacatggccaaggactatatggaaaggatggccgcacagccgagctggttggtcaaggatgcaccatgggacgaggtcccactggcccacagcctggtagggtttgccacggcatatgattttctttataattacctgtcgaaaactcaacaggagaaattcctggaagtgatagcgaacgcctccggatacatgtatgagacttcctatagacgcgggtggggcttccagtatctgcataatcatcagcctaccaactgtatggccctcctgactgggagtttggttctcatgaaccagggttacctacaggaggcatatctatggactaagcaggtgttgaccattatggaaaaaagccttgtgctgctgcgagaagtaactgatggatccttgtatgagggggtcgcctacggatcttatactacacgcagcctgttccagtacatgttcctggtgcagcgccactttaacatcaaccacttcggtcacccttggctgaagcaacactttgcctttatgtacagaaccattttaccgggcttccagcgcacggtggccatcgccgactccaattacaactggttctacgggcccgagtcccagctggtgtttctggataaattcgtgatgagaaacggttctgggaactggctggctgaccaaatcaggcggaacagggttgttgaagggccaggcacccccagcaagggccaaaggtggtgcacactccataccgagtttctgtggtacgatgggtctctgaagtccgtgccaccgcccgacttcggaactcccaccctacattacttcgaagactggggcgtggttacttacggttccgcccttccagcggagatcaaccgatcattccttagcttcaagtctggcaagctcggcggacgcgccatttatgatattgtacaccgaaacaagtataaagattggattaagggatggagaaactttaatgctggccacgagcatccagaccagaattcttttacgtttgcaccaaatggtgtcccctttataactgaggccctgtatggcccgaagtatacattctttaacaatgtgctcatgttctcccctgccgtctctaaaagctgtttttccccctgggtggggcaggtgacggaagattgtagctctaaatggtccaagtataagcacgacctggctgcaagctgtcagggcagagtggttgccgccgaagagaaaaacggtgtggtgtttattcgaggagagggggttggcgcctataatcctcaacttaacctcaagaacgtacaaagaaacttgatcctactgcaccctcagctgctcctcctggttgatcagattcaccttggcgaagagtctcctctggagacagccgccagttttttccacaacgtcgacgtgccttttgaggaaacggtggtagacggagtacatggagcattcattaggcaaagggatggattgtataaaatgtactggatggatgacacaggctactctgagaaagccacttttgcctctgtcacttatccccgggggtacccctataacggtaccaactacgtgaacgtcacaatgcatctgaggtcgcccattaccagggctgcatacctgttcataggcccctccattgatgttcagtccttcactgttcacggcgactctcagcagctagatgtctttatagcaacctcaaagcacgcctatgcaacatatctatggaccggggaggccaccggacagagtgcattcgcgcaggtaatcgctgacaggcataagatactgtttgatcggaactccgctattaagagttccattgtgcctgaggttaaggactatgcagccatcgtcgagcagaatttacagcattttaaacctgtgtttcagctcctggaaaagcagattctatcacgggtgcgcaacactgcttccttccgtaagacggcggagagactgctacgcttcagtgataaacggcagacagaggaagccatagatcgcatttttgctataagccagcagcaacagcagcagagtaaatcaaagaaaaatcgtcgagctggtaaaagatacaagttcgtagacgcagtgcctgacatttttgctcagattgaagtgaacgagaagaaaattaggcaaaaggcccagatcctcgctcagaaggaactcccgatagatgaagatgaggaaatgaaggacctgctagattttgcagatgtcacctacgagaaacataagaacggtggacttattaaagggaggttcggtcaggccaggatggtaaccactactcattccagggccccttccttgtcggcatcatacaccagactgtttctgattcttaatatcgccatattctttgttatgctggcaatgcagttgacctatttccagcgagcacagagcctacacggtcagagatgcttgtatgcggttttgttgatcgactcctgtatcctgctttggctgtattcctcatgttcacagtctcaatgctag

SEQ ID NO: 175771 - DNA, 2934 bp, Artificial Sequence
  derived and/or modified sequence
atgggctcctttgaagacggactagccgctctggaaatttggcggtccgacgctactatgcgcacacacaccaggggcgccccgtccgtatttttcatttaccttctgtgttttgtatccgcgtatataactgacgagaacccagaggtcatgatcccattcacaaatgccaattacgactctcacccaatgctatatttcagcagggcagaggttgccgagctgcaacttagagcagcttcctcacacgaacacattgcggcaagactgactgaagcggtccacactatgctaagctcccccttggaatatctccctccatgggatccaaaggactattctgccaggtggaacgagattttcgggaataatctcggtgcactggcaatgttctgtgtgttgtaccccgaaaacatcgaggcccgggatatggccaaggactatatggagcgaatggccgctcagccgtcctggttggtgaaggatgccccctgggacgaagtccccctagcccactcactagtcgggttcgcaactgcgtacgacttcctatataattatctaagcaagacgcagcaggaaaagttcttggaggtgattgctaatgccagcgggtacatgtacgagacctcctatcggcggggctggggattccaatacttacacaaccatcaaccaacaaactgcatggccttgctgacagggagccttgtcctgatgaatcaagggtacctgcaggaagcatacctgtggactaaacaggttttaaccattatggagaagtctctagtgctgttacgtgaggtgacagatgggtctctttacgaaggtgtggcatatggcagctacactactcgaagtctgttccaatacatgttcctagtacagcgccattttaatatcaatcatttcgggcacccttggttgaagcaacattttgcattcatgtaccgcaccattctccctggatttcagcggacagtggccattgccgattccaactacaattggttctatggcccagaatcacagctggtgttccttgacaagttcgtgatgaggaacggctctggtaactggctggccgaccaaattagacggaaccgtgtcgtagagggacccggaactccaagcaaggggcagagatggtgtaccctgcacaccgagttcctatggtacgacggatctctcaagtctgtccccccccccgactttgggactcccacattgcactactttgaggactggggagtggtaacttacggtagcgctctgccagctgaaatcaatcggagtttcctgtcgttcaagtctggcaagctgggcggcagagcaatctacgacattgttcatagaaataaatacaaagactggataaagggatggagaaatttcaatgcaggccacgagcatccagaccagaatagttttaccttcgcacctaatggggttcctttcattactgaagcactgtacggtcccaaatacaccttctttaataacgtgctgatgttttccccagccgtatccaagtcttgtttcagtccctgggtagggcaggtgacggaggactgctcaagcaaatggtctaagtataagcacgacctggctgcatcctgtcagggccgggtggttgctgcggaggagaagaacggggtagtgttcattagaggagagggtgtcggtgcatataatccacagctgaacctgaaaaacgtgcagcggaacctcattcttctacacccccagctgctactgctggtcgaccagatccacctgggagaggaaagtccactcgagaccgccgccagcttttttcacaatgtcgacgtgcccttcgaagaaactgtcgtggacggagtgcacggcgccttcatcagacaaagagatggactgtataagatgtactggatggatgatacagggtatagcgaaaaagccacctttgctagcgtcacgtatccaagaggctacccctacaatgggactaattacgtcaacgtgactatgcatcttcgtagtcccattacgcgtgcggcgtacctattcatcgggccgagtatcgacgttcagtcttttaccgttcacggtgactcccagcaactagatgtgtttatagctacctctaagcacgcctacgcaacttacttgtggaccggtgaagcaacggggcagagcgctttcgctcaagtcatcgccgaccgccacaagatcctattcgatcggaattccgctataaagtcaagcatcgtgcctgaggtgaaagattatgctgctattgtcgagcagaatctgcaacattttaagccagtattccagcttctggagaagcagattctaagtcgcgtcaggaatacggcatcatttcgcaagacagccgaaagactattgcgtttttctgacaagaggcagactgaggaagccatcgataggatcttcgccattagtcagcaacagcagcagcaaagcaaatctaaaaagaaccggagggctgggaagcggtacaagttcgtcgatgccgttcccgacatcttcgcccagattgaagtaaacgaaaaaaagatacgacaaaaagcccagatcttggcacaaaaggaattgccgattgacgaagatgaggagatgaaggatcttttggatttcgcggatgttacttatgagaaacacaaaaatggaggcttgattaaaggacgtttcggccaagctagaatggtaactactacccattcccgggccccgtctctcagcgcttcctataccaggctgtttctgatcctgaatatagcaatcttcttcgttatgttggccatgcagttaacgtactttcagcgtgctcagagtctgcacgggcagcgatgcctttatgcagtgctgttgatagattcttgtatcctgctgtggctttatagcagctgctcacagagccaatgctag

SEQ ID NO: 175772 - DNA, 2877 bp, Artificial Sequence
  derived and/or modified sequence
atgaggacccacaccaggggggcccccagcgtcttcttcatctacctgctgtgctttgtgtctgcctacatcacagatgaaaatcctgaggtgatgatccccttcaccaatgccaactatgacagccaccccatgctgtacttcagcagagctgaggtggccgagctgcagctgcgggccgccagcagccatgagcacatcgccgcccggctgacagaggccgtgcacaccatgctgagcagccccctggagtacctgcccccctgggaccccaaggactacagcgcccgctggaatgagatcttcggcaacaacctgggcgccctggccatgttctgtgtgctgtacccagagaacatcgaggcccgggacatggccaaggactacatggagaggatggccgcccagcccagctggctggtgaaggatgccccctgggatgaggtgcccctggcccacagcctggtgggctttgccacagcctatgacttcctgtacaactacctgagcaagacccagcaggagaagttcctggaggtgattgccaatgccagcggctacatgtatgagaccagctaccgccggggctggggcttccagtacctgcacaaccaccagcccaccaactgcatggccctgctgaccggcagcctggtgctgatgaaccagggctacctgcaggaggcctacctgtggaccaagcaggtgctgaccatcatggagaagagcctggtgctgctgcgggaggtgacagatggcagcctgtatgagggcgtggcctacggcagctacaccaccaggagcctcttccagtacatgttcctggtgcagaggcacttcaacatcaaccacttcggccacccctggctgaagcagcactttgccttcatgtaccgcaccatcctgcccggcttccagaggacagtggccatcgctgacagcaactacaactggttctacggccctgagagccagctggtgttcctggacaagtttgtgatgagaaatggcagcggcaactggctggccgaccagatcagaagaaacagagtggtggagggccctggcacccccagcaagggccagcgctggtgcaccctgcacacagagttcctgtggtatgatggcagcctgaagtctgtgcccccaccagactttggcacccccaccctgcactactttgaggactggggcgtggtgacctacggcagcgccctgcctgctgagatcaacagaagcttcctgtccttcaagagcggcaagctgggcggccgggccatctatgacatcgtgcacaggaacaagtacaaggactggatcaagggctggaggaacttcaatgccggccacgagcacccagaccagaacagcttcacctttgccccaaatggagtgcccttcatcacagaggccctgtatggccccaagtacaccttcttcaacaacgtgctgatgttcagccctgctgtgtccaagagctgcttcagcccctgggtgggccaggtgacagaggactgcagcagcaagtggagcaagtacaagcatgacctggccgccagctgccagggccgggtggtggccgctgaggagaagaatggagtggtgttcatccggggggagggcgtgggcgcctacaacccccagctgaacctgaagaatgtgcagaggaacctgatcctgctgcacccccagctgctgctgctggtggaccagatccacctgggggaggagagccccctggagacagctgccagcttcttccacaacgtggatgtgccctttgaggagaccgtggtggatggagtgcatggagccttcatccggcagagagatggcctgtacaagatgtactggatggatgacaccggctacagcgagaaggccacctttgcctctgtgacctacccccggggctacccctacaacggcaccaactacgtgaatgtgaccatgcacctgcggagccccatcacccgggccgcctacctgttcatcggccccagcattgatgtgcagagcttcaccgtgcatggagacagccagcagctggatgtgttcatcgccaccagcaagcacgcctatgccacctacctgtggacaggagaggccaccggccagagcgcctttgcccaggtgattgctgacagacacaagatcctgtttgacagaaattctgccatcaagagcagcatcgtgcctgaggtgaaggactatgctgccatcgtggagcagaacctgcagcacttcaagcctgtgttccagctgctggagaagcagatcctgagccgggtgaggaacacagccagcttcaggaagacagctgagcggctgctgcgcttcagtgacaagaggcagacagaggaggccatcgaccgcatctttgccatcagccagcagcagcagcagcagagcaagagcaagaagaacagaagagctgggaagcgctacaagtttgtggatgctgtgcctgacatctttgcccagatcgaggtgaatgagaagaagatccggcagaaggcccagatcctggcccagaaggagctgcccattgatgaagatgaggagatgaaggacctgctggactttgctgatgtgacctatgagaagcacaagaatggaggcctcatcaagggccgcttcggccaggccaggatggtgaccaccacccacagccgggcccccagcctgagcgccagctacaccaggctcttcctgatcctgaacatcgccatcttctttgtgatgctggccatgcagctgacctacttccagagggcccagagcctgcacggccagcgctgcctgtatgctgtgctgctgattgacagctgcatcctgctgtggctgtacagcagctgcagccagagccagtgctag

SEQ ID NO: 175773 - DNA, 501 bp, Artificial Sequence
  derived and/or modified sequence
atgaggacccacaccaggggggcccccagcgtcttcttcatctacctgctgtgctttgtgtctgcctacatcacagatgaaaatcctgaggtgatgatccccttcaccaatgccaactatgacagccaccccatgctgtacttcagcagagctgaggtggccgagctgcagctgcgggccgccagcagccatgagcacatcgccgcccggctgacagaggccgtgcacaccatgctgagcagccccctggagtacctgcccccctgggaccccaaggactacagcgcccgctggaatgagatcttcggcaacaacctgggcgccctggccatgttctgtgtgctgtacccagagaacatcgaggcccgggacatggccaaggactacatggagaggatggccgcccagcccagctggctggtgaaggatgccccctgggatgaggtgcccctggcccacagcctggtgggctttgccacagcctatgacttcctgtactag

SEQ ID NO: 175774 - DNA, 2934 bp, Artificial Sequence
  derived and/or modified sequence
atgggcagctttgaagatggcctggccgccctggagatctggaggagtgatgccaccatgaggacccacaccaggggggcccccagcgtcttcttcatctacctgctgtgctttgtgtctgcctacatcacagatgagaaccctgaggtgatgatccccttcaccaatgccaactatgacagccaccccatgctgtacttcagcagagctgaggtggccgagctgcagctgcgggccgccagcagccatgagcacatcgccgcccggctgacagaagctgtgcacaccatgctgagcagccccctggagtacctgcccccctgggaccccaaggactacagcgcccgctggaatgagatctttggaaacaacctgggcgccctggccatgttctgtgtgctgtacccagaaaatattgaggcccgggacatggccaaggactacatggagaggatggccgcccagcccagctggctggtgaaggatgccccctgggatgaggtgcccctggcccacagcctggtgggctttgccacagcctatgacttcctgtacaactacctgagcaagacccagcaggagaagttcctggaggtgattgccaatgccagcggctacatgtatgagaccagctacagaagaggctggggcttccagtacctgcacaaccaccagcccaccaactgcatggccctgctgaccggcagcctggtgctgatgaaccagggctacctgcaggaggcctacctgtggaccaagcaggtgctgaccatcatggagaagagcctggtgctgctgcgggaggtgacagatggcagcctgtatgaaggagtggcctacggcagctacaccaccaggagcctcttccagtacatgttcctggtgcagaggcacttcaacatcaaccacttcggccacccctggctgaagcagcactttgccttcatgtaccgcaccatcctgcccggcttccagaggacagtggccatcgctgacagcaactacaactggttctacggccctgagagccagctggtgttcctggacaagtttgtgatgagaaatggaagtggcaactggctggccgaccagatcagaagaaacagagtggtggagggccctggcacccccagcaagggccagcgctggtgcaccctgcacacagagttcctgtggtatgatggcagcctgaagtctgtgcccccaccagactttggcacccccaccctgcactactttgaggactggggcgtggtgacctacggcagcgccctgcctgctgagatcaacagaagcttcctgtccttcaagagcggcaagctgggcggccgggccatctatgacatcgtgcacaggaacaagtacaaggactggatcaagggctggaggaacttcaatgccggccacgagcacccagaccagaacagcttcacctttgcccccaacggggtgcccttcatcacagaggccctgtatggccccaagtacaccttcttcaacaacgtgctgatgttctccccagctgtgtccaagagctgcttcagcccctgggtgggccaggtgacagaggactgcagcagcaagtggagcaagtacaagcatgacctggccgccagctgccagggccgggtggtggccgctgaggagaagaatggagtggtgttcatccggggggagggcgtgggcgcctacaacccccagctgaacctgaagaatgtgcagaggaacctgatcctgctgcacccccagctgctgctgctggtggaccagatccacctgggggaggagagccccctggagacagctgccagcttcttccacaacgtggatgtgccctttgaggagaccgtggtggatggagtgcacggggccttcatccggcagagagatggcctgtacaagatgtactggatggatgacaccggctacagcgagaaggccacctttgcctctgtgacctacccccggggctacccctacaacggcaccaactacgtgaatgtgaccatgcacctgcggagccccatcaccagggctgcctacctgttcatcggccccagcattgatgtgcagagcttcaccgtgcacggggacagccagcagctggatgtgttcatcgccaccagcaagcacgcctatgccacctacctgtggacaggagaggccaccggccagagcgcctttgcccaggtgattgctgacagacacaagatcctgtttgacaggaacagcgccatcaagagcagcatcgtgcctgaggtgaaggactatgctgccatcgtggagcagaacctgcagcacttcaagcctgtgttccagctgctggagaagcagatcctgagccgggtgaggaacacagccagcttcaggaagacagctgagcggctgctgcgcttcagtgacaagaggcagacagaggaggccatcgaccgcatctttgccatcagccagcagcagcagcagcagagcaagagcaagaagaacagaagagctgggaagcgctacaagtttgtggatgctgtgcctgacatctttgcccagatcgaggtgaatgagaagaagatccggcagaaggcccagatcctggcccagaaggagctgcccattgatgaagatgaggagatgaaggacctgctggactttgctgatgtgacctatgagaagcacaagaatggaggcctcatcaagggccgcttcggccaggccaggatggtgaccaccacccacagccgggcccccagcctgagcgccagctacaccaggctcttcctgatcctgaacatcgccatcttctttgtgatgctggccatgcagctgacctacttccagagggcccagagcctgcacggccagcgctgcctgtatgctgtgctgctgattgacagctgcatcctgctgtggctgtacagcagctgcagccagagccagtgctag

SEQ ID NO: 175775 - DNA, 2877 bp, Artificial Sequence
  derived and/or modified sequence
atgcggacccacacccggggcgcccccagcgtgttcttcatctaccttttatgtttcgtatccgcgtacatcacagatgaaaaccccgaagtaatgatcccttttaccaatgccaattacgactcccatccaatgttgtattttagccgggccgaggtagcggaattgcagctcagagccgctagcagtcatgagcacatcgcggccaggctcacagaagctgttcatacaatgttgtcaagtccactggagtacctcccgccctgggaccccaaagattatagcgcaaggtggaacgagattttcgggaacaacctgggggctctggctatgttctgtgtattgtacccggagaacattgaggcccgtgatatggccaaagactacatggagagaatggccgcccagccatcctggttggttaaggatgcgccttgggacgaggtgccacttgctcattccttggttggcttcgcaaccgcatatgatttcctgtataactacttgtcaaagacacaacaggagaaatttctcgaagtgatcgctaatgcgtccggctacatgtatgaaacttcataccggagaggctggggctttcaatatctccacaatcaccagcccacgaattgtatggctctgctgacagggagcctggtcctgatgaaccagggctacctgcaggaagcttacctttggacgaagcaggtgctgactatcatggaaaaatctttggttctgttacgggaggtcaccgacggaagtttatatgagggggtcgcctacggcagctacactacaagatctctttttcaatacatgttcctggtccagcgccactttaacatcaatcactttgggcacccttggctgaaacagcacttcgcgtttatgtatagaacgattctgccgggttttcagagaactgtcgcaatcgcagatagcaactacaactggttctatggtcctgaaagtcagctggtatttcttgacaagttcgtgatgcgtaatggcagtggtaattggttggctgaccagataagaaggaacagggtggtggaaggaccagggactcctagtaagggacagcgctggtgtactctccacaccgagttcctgtggtatgatgggtctctgaaatccgtcccccctcctgactttggcacacccactcttcactacttcgaagactggggggtagtaacgtacggaagtgctctcccggcggagatcaatcggtctttcttgtccttcaaatccggtaaactcggaggaagagcgatctacgacattgtccatcggaataagtacaaggactggatcaagggttggagaaacttcaatgccggccacgagcacccggatcagaactcttttactttcgccccaaacggagtacctttcattactgaggctttatatgggccgaagtatacctttttcaacaacgttcttatgtttagcccagcggtgtcaaagtcttgcttcagcccatgggtgggccaggtaacggaagactgcagctccaagtggtccaaatacaagcacgatttggcggcttcttgccagggacgcgttgttgcagccgaggaaaaaaacggggtggtgtttatccgtggggaaggcgtaggcgcctataacccacagcttaacttgaagaatgtgcagaggaatctgatactgcttcacccccagcttttactcctcgtggatcagattcacctgggagaagagtcgccgttagagactgccgcctccttcttccacaacgtggacgtaccattcgaggaaacggtggttgacggcgtgcatggagcatttattcgccagagggacggcctctacaagatgtattggatggacgataccggatatagtgagaaagccaccttcgcatcagtaacctacccgcgcgggtacccctataacgggacaaactacgtgaacgttaccatgcatctgcgctctcctattaccagggcggcttatctgttcatcggccctagtattgacgtccagagcttcaccgtccacggagatagccaacagctggatgtgtttattgcgacgtctaagcatgcctacgccacatatctttggaccggagaagccaccggccaatcagcatttgcccaggtgatcgccgatagacataagatcctgttcgatagaaactccgctatcaagtctagcattgttccagaagtcaaggactatgcagctatcgtggagcagaatctgcagcactttaagccagtgttccagctcttagaaaagcagattctttcccgtgtgagaaacactgcttcgttccgaaagaccgcagaacggctgcttaggttctccgataaacggcagactgaggaagcaatcgacagaatttttgctatctcgcaacaacagcagcagcagtccaaatctaagaagaaccggagggccggcaaacggtacaaattcgttgatgccgtccccgacatcttcgcacaaattgaagtaaacgaaaagaagattcgccagaaggcacagattctggcccagaaggaactgcccatcgacgaggatgaagaaatgaaggaccttctggacttcgcagacgtaacgtacgagaagcacaagaacggtgggctgatcaagggccgtttcggacaggccaggatggtcactacgactcactctcgtgccccatcactatccgccagttataccaggctgttcttgattctcaacattgccatcttcttcgtaatgcttgccatgcaactcacttattttcagcgagctcaaagcctgcacggccaaagatgtctgtatgccgtcctgctcattgactcgtgtattctgctctggctgtactcttcctgttcccaatcacagtgttag

SEQ ID NO: 175776 - DNA, 2877 bp, Artificial Sequence
  derived and/or modified sequence
atgcggacccacacccggggcgcccccagcgtgttcttcatctacctcctgtgttttgtctctgcctatataacagacgaaaatcccgaggttatgattcccttcactaacgcaaactacgatagtcaccccatgctttattttagcagggcggaggtagccgaactgcagttacgtgcagcctcaagtcacgaacacattgctgcacgcctcaccgaagccgtccatacgatgttatccagtcccttggagtatctgcccccgtgggatcctaaggattatagcgcaagatggaacgaaatatttgggaacaacttgggagccttggcaatgttctgcgtgctctatccggagaatattgaggcacgcgatatggctaaagactacatggaaagaatggccgcccagccttcatggctggtgaaggatgccccatgggatgaggttcccctggctcatagcttggttggtttcgccacagcttatgattttctttacaactacttaagcaaaactcagcaggagaaattcctggaggtaatagctaacgcttccggctacatgtacgagacctcctatcgccgcgggtgggggtttcaatatcttcataaccaccagcccacaaactgcatggccctcctcacaggctcactcgtgctgatgaaccaggggtacctgcaagaagcatatctttggacgaagcaggtccttactattatggagaaaagtcttgttctccttcgagaggttacagacgggagcttgtacgaaggcgtcgcctacggttcttacacaacaaggtctctgtttcagtacatgttccttgtgcagagacattttaacatcaaccactttggccacccctggctgaagcagcatttcgccttcatgtacaggaccatccttcccggctttcagaggactgtggctatcgcagatagcaattataattggttttacggccctgagtcccagctcgtgtttttggataaatttgtgatgaggaatggtagcggcaattggctggcggaccagatacgacggaatagagtggtggagggtcccggcaccccgtctaagggtcaacgatggtgcactctgcacactgaattcctgtggtacgacgggtcgctgaagagtgttccgcccccagacttcggcaccccgactctgcactactttgaggactggggggtcgtcacctacgggtcagcattacccgcagagatcaaccgcagctttttatcctttaagtcaggcaaacttggtgggcgggccatttatgacattgtgcatagaaacaagtacaaagattggatcaaggggtggaggaactttaatgccggccatgagcacccagatcaaaatagctttacatttgcccctaatggggttccgtttattacagaggctttgtatggccccaagtatacattcttcaacaatgttctgatgttctcgcctgctgtgagcaagtcctgctttagtccatgggtcggacaggtaacagaagactgctcttccaaatggagcaagtataaacacgatctggcagcctcctgccagggtagggtagtcgctgctgaagagaaaaacggcgtggtgttcataagaggtgaaggggttggggcatataacccccagctgaatctgaaaaatgtacagaggaacttaatcctgctacaccctcagctcctcctgttggttgatcagatccacctgggagaggagtcccctctggaaacagccgctagtttttttcataacgtggatgtgcctttcgaggaaacagtggtggatggcgttcacggcgcttttatacgtcaacgggatgggttatacaagatgtactggatggacgacaccgggtatagtgaaaaggccacattcgccagcgtgacataccctagaggatatccgtacaatggcaccaactatgtcaacgtgacaatgcacctgcggagtcccattacgcgtgctgcctacctttttattggacctagtattgatgttcagagcttcacggttcacggtgactctcagcagctggatgtcttcatcgctaccagcaaacacgcttacgcaacatacctctggacgggagaagcgactggccagagcgcttttgcgcaggtgatcgcggacagacacaagatcctttttgaccgcaattccgctatcaaatcctccattgtcccagaagtgaaggactatgccgcaattgtggaacagaatctccagcattttaagccagtcttccaactgttggaaaaacaaattctgagtagggttcggaacactgcatccttcaggaaaaccgcagagaggctgctgaggttctccgataaacgccagaccgaagaagcaattgatcggatattcgccatatcacagcagcagcagcagcaatccaagagcaagaaaaacaggagagccggaaagcgctacaaatttgtggatgctgtccccgatatcttcgcccaaatcgaagtcaacgaaaagaaaatccggcagaaagcccaaatattagcccagaaggagttacccatcgacgaagacgaagagatgaaagacttgttggacttcgctgatgtgacttatgaaaagcataaaaatggtgggttgataaaagggaggtttgggcaggctcgtatggtaaccaccacccattctagagcaccctctcttagtgcttcgtatacacgtctatttctgattcttaatatcgcaatattctttgtgatgcttgctatgcagctcacttacttccagcgcgcacagagcttacacggacagcggtgcctatatgcagtcctcttaattgattcttgcattctgctctggctctactcctcctgcagccagtcccagtgctag

SEQ ID NO: 175777 - DNA, 501 bp, Artificial Sequence
  derived and/or modified sequence
atgcggacccacacccggggcgcccccagcgtgttcttcatctaccttctttgctttgtctcagcatacattactgacgaaaatccggaggtgatgataccttttactaacgcaaattacgactcccatcccatgttatacttttcacgcgccgaagtggccgaactacagctcagagccgcatcctcacacgagcatattgcggcacgccttactgaagctgtgcataccatgctgtcatcaccccttgagtacctcccaccttgggaccccaaagactatagcgcaagatggaacgaaattttcggtaacaatttgggcgctctggcaatgttctgcgtcctctaccccgaaaatatcgaagccagagacatggccaaggactacatggaacgcatggctgctcagccttcttggctggtgaaagacgccccttgggacgaggttccactggctcattccctcgtaggttttgccacagcctatgattttctgtattag

SEQ ID NO: 175778 - DNA, 2877 bp, Artificial Sequence
  derived and/or modified sequence
atgcggacccacacccggggcgcccccagcgtgttcttcatctacctcttgtgtttcgtgtccgcatatatcacggacgagaaccctgaggtgatgattccttttactaacgctaactacgattcccacccaatgttgtactttagcagggccgaagttgctgagttgcagcttagagccgcttcttcacatgaacacattgccgcaaggcttactgaagcggtccacactatgctgtccagcccactggaatatcttcctccctgggatccaaaggattattctgctagatggaacgaaatcttcggcaataatctgggcgccctagccatgttttgcgtgctataccccgaaaacatagaagcgcgagatatggccaaggattatatggagagaatggccgcccagccaagctggttggtgaaggacgccccctgggatgaggtgccactcgcccactcgctggtgggcttcgccacagcgtacgattttctgtacaactaccttagcaagacacaacaggagaagttcctggaagtgatcgccaacgcaagtggctacatgtacgagacctcttaccgaagagggtggggcttccagtacttacataatcaccaaccgactaactgcatggccttgctgacaggctcactcgtgttaatgaaccaagggtacttgcaggaggcttacctgtggacaaagcaggtgctgaccattatggagaaatcccttgtgctgctcagggaggtcactgacggtagtctttatgaaggcgtggcctatggatcctacaccacccgctcactgtttcagtacatgttcttggtccagcggcatttcaacattaatcatttcggacacccatggctgaagcagcatttcgctttcatgtatcgcacaatcctacccggatttcagaggacggtggccatcgcagatagcaactataactggttttatggccctgaatcccaactggttttcctggataaatttgtcatgaggaacggcagtggaaactggcttgccgaccagatcaggcgcaatagggtggtcgaaggacctggaaccccctctaagggccagagatggtgcacactgcacacagaattcctgtggtatgatgggtcactgaagtccgttcctcctcccgactttgggacccctaccctgcactactttgaggattggggggttgtgacctacggatcggctctacctgccgaaattaataggagcttcctcagcttcaagtccggcaagctgggggggcgggcaatttatgacatcgtgcaccggaataagtataaagattggattaaaggctggaggaactttaacgctggccacgagcacccggatcaaaactctttcacctttgctccaaacggagttccatttatcacagaagctctgtatggacctaagtacacttttttcaataacgtgctgatgttctccccagcagtctccaaaagttgcttctctccttgggtgggccaggtgactgaagattgttcatcaaaatggtctaagtacaaacatgatctggccgcgagctgccagggaagggtggttgctgcagaggagaaaaacggtgttgtattcattcggggggagggcgtgggcgcttataatcctcaattgaatctgaaaaatgtccaaagaaacctgattctcctccacccacagctgctgctgctcgtcgatcagattcacttgggcgaagagtcccctcttgaaactgccgcatcctttttccataacgtcgacgtgcccttcgaggagaccgtagtagatggtgtgcatggagcatttattcgccagcgagatgggctgtacaaaatgtattggatggacgacacgggttattcagagaaggccacatttgcaagcgtgacctaccccagagggtatccatacaacggcactaactacgttaacgtgacaatgcacctcagaagtccaatcaccagagctgcctacctcttcattgggccgtcaattgatgtacagtcattcaccgtgcacggagacagtcagcaactggatgtgtttatagccacgagcaaacatgcctatgccacatacctttggacgggggaggctaccggacagtcagcctttgcacaggtgatagcagatcgacacaaaattttgtttgaccgtaactctgctattaaatcctctattgtccccgaagtaaaagattatgctgctatagtggaacagaacttacaacacttcaagcctgtcttccagctgctggagaaacagattctatctagggtgcgaaacacggcctccttccggaaaacagcagagaggctcttacgattctcagataaaaggcagacggaggaggccatcgatagaatattcgccatctcacagcagcagcagcagcaatccaaatccaaaaaaaatagacgcgctgggaaacggtataagtttgtcgacgcggtccctgacatctttgcacaaattgaggttaacgagaagaaaatccggcaaaaggcacagatcctcgcgcagaaagaactgcctatcgacgaagacgaagagatgaaagacctgcttgatttcgccgatgtcacctatgagaagcacaagaatggtggactgattaaagggcgctttggacaggcccgcatggtgacaaccacacacagccgtgcgccgtcactcagcgcctcttatactaggctgtttcttatcctgaatatcgcaattttttttgtgatgcttgcaatgcagcttacctactttcagagggctcagagtctgcatggacaacgctgcttgtatgcggttttgcttatcgactcatgtatactgctttggctttatagctcatgtagtcagtcccagtgttag

SEQ ID NO: 175779 - DNA, 2934 bp, Artificial Sequence
  derived and/or modified sequence
atgggcagcttcgaggacggcctggccgccctggagatctggcggagcgacgctactatgaggacacacactcggggcgcgcctagtgtcttctttatttacctcttgtgctttgtgtctgcttacattactgacgagaaccccgaggttatgatccccttcaccaatgctaattacgacagccaccctatgctctatttctcccgtgctgaagtggccgagttacagctccgagctgcctcatcacacgagcatatcgccgccaggctgaccgaagctgttcatacgatgctatccagtccactggagtatttgccaccatgggatcctaaggattattctgcccggtggaatgaaatctttggcaacaacctgggcgcgctggccatgttctgtgttctgtacccagagaacattgaggctagggatatggccaaagattacatggagagaatggctgctcagccaagttggctggttaaggatgccccttgggacgaggttccactggcccatagtctggttggctttgccaccgcctatgattttctgtataactacttgagtaagacacagcaggagaaattcctggaggtgatcgccaatgcatcgggatacatgtacgagactagttatagacgagggtggggctttcaatacctacacaatcaccagcccactaactgcatggccttattgactggtagtttagtattaatgaatcagggataccttcaggaagcttatttgtggaccaagcaggttctcacaatcatggagaagagcctggttctattgcgggaggttactgacggctcactctatgaaggtgtggcatacggaagctatactactagatctctgttccagtatatgtttctggtgcagcggcacttcaatatcaatcattttggccatccctggctgaagcagcacttcgcattcatgtatcggacaatccttccgggattccagcgaactgtggcaatcgctgactcgaattacaactggttttacggccctgagtcccagttagtctttctggacaagtttgtgatgaggaacgggagtggaaattggttagccgatcagattaggcgcaaccgcgtggtggagggacccggaacacccagcaagggccagcgttggtgcactctgcacaccgaatttctttggtacgatggatcattgaaaagcgttccgcctccggatttcggcactcccaccctgcattatttcgaagactggggagtggtgacctacggcagcgcgttgccagccgaaatcaaccgctctttcctgagttttaagagcggcaaactgggcggtcgggcgatctacgacatagtacacagaaacaagtacaaagactggatcaagggatggaggaacttcaacgctggtcacgagcatcctgatcaaaatagtttcactttcgcaccaaatggagtgcccttcattactgaggcactctatgggcctaaatacaccttttttaacaacgttctgatgttttcacctgcagttagtaaatcatgctttagcccctgggtcggccaagttaccgaggactgtagcagcaagtggtccaagtataaacatgaccttgccgctagttgtcagggcagagttgtggcagcggaagagaagaacggcgtggtatttatccggggggaaggtgtgggtgcgtataatccgcagttgaacctgaagaacgttcagcgaaacttaattctcttgcacccacagcttctcctactcgtggatcagatccatctgggagaggaatccccattggaaacagcagcctctttttttcacaacgtggacgtcccttttgaggaaaccgtggtggacggcgtgcatggcgcttttattagacagcgtgatggactgtataagatgtattggatggatgacaccggttactcagaaaaggctactttcgcctccgtgacctaccctcggggctatccctacaatgggacgaactatgtcaacgtaacaatgcatttgaggtcccccattactcgggcagcgtatctgtttataggtccttccatagatgtgcagtcgtttacggtacacggtgatagccaacaattggatgtgtttatagctacttccaagcacgcatacgctacttacctttggaccggagaggcgacaggtcaaagcgcgtttgctcaggttatcgcagaccgtcacaaaatcctgtttgaccgtaactcagccattaaatcttccatcgtccccgaagtgaaagattacgcggcaattgtcgagcaaaacttgcagcactttaagcctgtattccaacttctcgagaagcagattttgtctcgggttcggaacacagcctcctttcgcaaaactgctgagagacttctgcgcttttctgataaacgccagactgaggaagccattgaccgcatcttcgccatcagccagcagcaacaacagcagtccaaaagtaagaaaaaccggcgagctggaaagcggtacaaattcgtagatgccgtgcccgacatctttgcccagatcgaagtgaacgaaaagaaaatacggcagaaagcccaaatcctagcccagaaagagctccctattgatgaagacgaagagatgaaggacttgcttgatttcgccgacgtgacttacgagaagcataagaatggagggctgataaagggtcgattcggacaagctcggatggtgacaaccacccattcacgggccccatcactctccgcatcctatacacggctgtttctgatcctcaatatcgccatttttttcgtgatgttggccatgcagctcacgtacttccagagggcacagtccttgcacggccagaggtgtctatatgcagtgttgctcatagactcatgtattctcctctggctgtattcttcgtgctcccagtcccagtgctag

SEQ ID NO: 175780 - DNA, 2877 bp, Artificial Sequence
  derived and/or modified sequence
atgaggacacacactaggggcgcacctagcgtgttctttatctacctcctgtgctttgttagcgcctacatcactgatgagaatcccgaagtgatgattccttttaccaatgctaattacgattcacacccgatgctctacttcagtcgcgctgaggttgcggagttgcaactacgtgctgctagttcccatgaacatattgccgctcgtttgactgaagctgtgcacaccatgttgtcctcccctctggagtatctgccgccatgggatccaaaagattatagtgcaagatggaatgagatttttggcaacaatttaggagcactcgctatgttctgtgtactgtatcccgaaaatattgaagcacgcgatatggccaaggactacatggagcggatggcagcccagccaagttggctggtgaaagatgcaccttgggatgaagtgccgctagcgcacagtcttgtcgggtttgcgaccgcatacgatttcctgtataactacttgtccaaaacccaacaggagaagttcttggaagtaatcgctaatgcttctgggtacatgtacgaaacgagttacaggcgcggatgggggtttcagtacctgcacaaccaccagcccactaattgcatggctttacttactgggtcattggtgctaatgaatcaggggtacctccaggaagcttacctgtggactaagcaggtgctgacaataatggagaagtcgctggtcctgttacgcgaagttacagacggtagtctgtacgagggcgttgcttatggctcttatactactagaagtcttttccagtacatgtttctggtgcagcgacactttaacatcaatcacttcgggcacccatggctgaaacagcatttcgccttcatgtacaggaccattctgccaggttttcaaagaacggtcgcgattgctgactccaactataactggttctacgggccagagtcccagctggtgttcctggataagttcgtcatgcgcaacgggtctggcaactggctagcggaccaaatcaggagaaatcgggtggtggaaggtcccggtactcccagcaaggggcagagatggtgtacgctgcacaccgagtttctatggtatgacgggtcattaaagagtgtgccccctccagacttcggcacacccacactacattattttgaagactggggcgttgttacctatggtagcgccctcccagccgaaatcaatcgctcttttctcagcttcaaatccggcaagttaggaggtagggccatttacgatatagtacaccggaacaagtacaaggattggatcaaagggtggaggaatttcaacgctggccacgagcatcctgatcagaacagctttacctttgcccctaatggagttccattcattactgaggctctttatgggcctaagtacacattctttaacaacgtcctcatgttcagtcccgcagtgtccaagtcttgtttctccccttgggttggacaggtcaccgaagactgctcaagtaagtggtcaaaatacaagcacgatctcgctgcctcctgtcagggaagagtagttgcggcagaggagaaaaacggcgtcgttttcatcaggggtgagggcgtcggagcttacaacccccaactgaacctcaagaacgttcagaggaacctgatcctgctccatccgcagctgctacttctagttgaccagatccatctcggagaagaatctcctctcgaaaccgccgcttcgttttttcacaacgttgacgttcctttcgaagagactgtcgtggatggcgtccacggcgctttcatccgacagcgagatggactgtataagatgtactggatggatgatactggttacagtgagaaagccacctttgcgagtgtgacgtatcccagaggctatccctacaacggcactaattatgtgaatgtcacaatgcatctgagatctcccattacaagggcggcatacctctttatcggcccaagcattgacgttcaaagtttcacggtgcacggtgatagccagcaactcgacgtgttcattgcaaccagtaagcacgcttacgccacttatctgtggaccggagaagctactggacagtccgccttcgcacaggtgattgcagacaggcacaaaatcctgtttgaccggaattccgctatcaaaagcagcattgtacctgaggtcaaggactatgccgcaatcgtagaacaaaaccttcagcactttaaacccgtttttcagctcctggagaaacagatcctttcaagggtgcggaacaccgcgagctttaggaagacagcggagcgcctgttacggttttccgataagagacagactgaggaggccattgaccggatttttgcaatctctcagcagcaacagcagcagtctaaaagcaaaaagaaccggagagccggaaagaggtacaagttcgttgatgctgttcccgacatctttgcgcagatagaagtgaatgaaaaaaagatccggcagaaggctcaaatactggctcaaaaagagcttccaattgacgaggacgaggagatgaaagatctcttagattttgctgatgtcacctacgagaaacacaagaatggaggcctgattaagggccgttttggccaggcccgtatggtgacaaccacccacagccgcgctccaagtttaagcgctagctatactaggctgtttcttatcctaaacattgccatcttcttcgtgatgctggccatgcaacttacgtatttccagcgggcacagagtctccatggtcagcgatgtctttatgccgtccttttgattgactcttgtattctgttatggttgtattcatcctgttcccagagccagtgctag

SEQ ID NO: 175781 - DNA, 2877 bp, Artificial Sequence
  derived and/or modified sequence
atgagaactcatacacgcggagcgcctagcgtgttctttatatatctgctgtgcttcgtgtccgcatacataaccgatgaaaaccctgaagtgatgatcccatttactaatgcgaattacgactctcatcccatgttgtacttcagccgagccgaagtcgccgagctgcagctgcgcgcagcctcctcccacgagcatatcgcggctcgcctgaccgaagccgtgcataccatgctttccagtcccttagaatacctgccaccgtgggaccccaaagactactccgctcggtggaacgagatctttgggaataacttgggcgcactcgcaatgttctgtgttctgtaccctgagaatatagaagctcgcgatatggccaaggattacatggagcggatggccgctcaaccatcctggcttgtgaaagatgccccatgggacgaggtgccattggcccacagtctggtggggttcgcaactgcttatgatttcctgtacaattacttgtccaagacccagcaggagaagtttctggaagtgattgcaaacgcaagcggatatatgtatgaaacgtcttatcgccgagggtggggattccagtacctccacaaccaccagcctaccaattgtatggccctgctcacaggctcgttagtgctgatgaatcagggttatctgcaggaggcctatctgtggacaaaacaggtcctgacgattatggaaaaaagcctggtgctcttgagggaagttacggacggcagtttgtacgagggagtcgcatacggaagctatacaactcgctctctattccagtatatgtttctcgtccagaggcacttcaacatcaaccacttcggccatccctggttgaagcagcacttcgctttcatgtatcgaacaatactgcctggctttcaaaggacagtggctatcgccgactcgaactataattggttctatggcccagagagccagctcgtgtttctggacaagtttgtcatgcgcaacggaagcggaaattggctcgctgaccaaattcggaggaaccgggtggtggaaggcccaggcacgcccagcaaaggacaacgatggtgcacgctgcacaccgaattcctctggtatgacggttcactgaagtccgtacccccaccagattttggaactccgacactccattattttgaggattggggagtggttacgtatggttccgccctgcccgctgagataaaccgcagcttcttgagcttcaagtccgggaaactgggcggaagggccatttatgacattgtgcatcgtaacaaatacaaagattggatcaaagggtggaggaactttaatgcaggccatgaacacccagatcagaattcttttacctttgcaccaaacggagtgccctttattactgaggccttgtacggcccaaagtataccttcttcaacaatgtcctgatgtttagcccagccgtcagcaagtcttgcttcagcccatgggtaggccaggtgactgaagactgtagctcaaagtggtccaaatataaacacgatctcgccgctagttgccagggtcgggtagtggctgcagaggaaaaaaacggggttgtgttcatccgcggagagggggtgggagcatataatccccaactaaacctgaagaacgtgcagaggaacctcattttacttcatccacagctgttgttgctggtcgaccagatccacctcggggaggaaagccccctggaaaccgccgcaagttttttccataacgtcgatgtgcccttcgaggagactgttgtcgatggggtccacggggcatttatccggcagcgcgatggcctgtacaagatgtactggatggacgacaccggctatagcgagaaggccacttttgcttccgtaacatatcccagggggtacccctataatgggacaaattatgtgaatgtgaccatgcatctgagaagtcctattacgcgtgccgcttacctatttatcgggccatctatcgacgtgcagtcctttactgttcacggggactcacagcaactcgacgtgttcatcgccacaagcaagcacgcttacgccacttatctgtggacaggggaagccacaggccagtccgcattcgcacaggttattgccgaccgccacaagatcttgtttgacagaaactctgccattaagagtagtattgtcccggaagttaaagattacgctgcaatcgtcgagcagaatctccaacacttcaagccagtgttccagctccttgaaaagcagatactgagccgagtacgtaatactgctagcttcagaaagacagctgaacgactcctcagattctccgacaagagacaaaccgaggaggccatagatcgaatttttgccattagccagcagcagcaacagcaaagcaagagcaagaaaaataggcgggctggcaagaggtataaattcgtggatgccgttccggatatattcgctcagatcgaggtcaacgagaaaaaaattcggcagaaagctcaaatattggcccagaaggaattgcctatcgatgaagatgaggagatgaaggatctgctggacttcgcagacgttacatacgagaagcataagaacgggggactcattaaggggaggtttggccaggccagaatggttactaccacccattcaagggccccaagtttatcggcctcatatacacggctgttcctgattctgaatattgctatctttttcgtcatgctggctatgcagttgacatacttccagagagcccaatctctgcacggacagcggtgcctgtatgcagtgctgctaatagattcctgcatccttctgtggctgtatagttcttgcagccagagccagtgctag

SEQ ID NO: 175782 - DNA, 501 bp, Artificial Sequence
  derived and/or modified sequence
atgagaacccacacccgcggagctccatcggtctttttcatatatctgctctgtttcgtatcggcctatataacagatgagaaccccgaagtgatgatcccattcaccaacgccaattacgacagtcatcctatgctctacttcagccgggctgaggttgccgaactgcagctgagggctgcttctagccacgagcacattgcagccaggctgaccgaagctgtgcatactatgctatccagcccacttgaatacctgcccccatgggacccaaaggattattctgcacgatggaacgaaatcttcggaaataatttgggtgcactggcaatgttctgtgtgctttaccccgaaaacattgaggcccgagacatggctaaggattatatggagcgcatggcagcccaacctagttggttggtgaaggatgctccctgggatgaggtacctcttgcacatagtttagtagggttcgcgacagcatacgactttttatactag

SEQ ID NO: 175783 - DNA, 2877 bp, Artificial Sequence
  derived and/or modified sequence
atgcgtacgcatactaggggagctccctctgtcttttttatttacctgttgtgtttcgtctcagcatatattactgacgagaaccctgaagttatgattcctttcactaatgccaactacgacagtcatccaatgttgtactttagtcgtgctgaggtggctgaattgcagctgagggccgcatcctcccacgagcacatcgccgctcggctcacggaagccgttcacacaatgctgagttcaccattggaataccttcccccttgggacccaaaagattactctgcccgttggaacgagattttcggaaacaacctaggtgccttagccatgttctgtgttttatatcctgaaaacattgaggcaagggacatggcaaaagactacatggagcgcatggcagcccaaccaagctggctggtgaaggatgctccatgggacgaagtgccgctggctcacagcctggtgggctttgctactgcctatgactttctgtataactatcttagtaaaacccagcaggaaaagttcttagaggtcatagccaacgcctccggctatatgtatgaaacttcatatcggagggggtgggggtttcagtatctgcacaatcatcagccaaccaactgcatggcactcctgaccgggtcccttgtcctgatgaaccagggatatctgcaggaggcgtatctctggacaaagcaggtgttgacgattatggagaaatccctggttctactgcgagaggtgactgatggctccttatatgaaggggtggcctatggctcttacacaactcggtctctcttccagtatatgtttcttgtgcaacgccatttcaacatcaaccacttcggacacccatggctgaagcagcattttgcctttatgtacagaactatattaccgggatttcagcgtaccgtagcaattgccgattcaaactataattggttttacgggcctgagtcccaactggtctttttggataaattcgtgatgcgcaatggttccggaaattggctcgccgatcagatccgacgtaaccgagtcgtagagggcccaggtacgccaagtaaggggcagagatggtgcacattgcatacagagtttctgtggtacgatggtagcttgaagtccgtcccccctcccgattttggcacacctacattgcactactttgaggactggggggtggttacctatggatccgctctgcctgctgaaataaatcgtagttttctgtcctttaaatccggtaaactcggtggccgtgcaatatatgatatagtacatagaaacaaatacaaagactggataaagggttggagaaacttcaacgcagggcacgagcaccccgatcagaattcatttacatttgctccaaacggcgtcccctttattacagaagccctttacggacctaagtacacgttttttaataacgtactgatgttctctcccgctgtttcaaaaagttgctttagcccctgggtaggccaagtaaccgaggattgcagttctaagtggtctaaatacaaacacgatctcgccgcatcctgtcagggtcgggtcgttgcagccgaggagaagaacggggtggtatttattagaggcgagggagtaggtgcttataacccgcagctgaacctcaagaatgtgcagaggaatcttattttgctgcacccacaactcctgctgcttgttgaccagatccacctgggcgaagagagtcctctcgaaacggcagcctctttctttcataacgtcgacgtcccttttgaagaaaccgttgtggatggcgtgcacggtgcctttatccggcagcgggacggtttgtacaagatgtattggatggacgataccggttacagcgagaaagccaccttcgcatccgtgacatatccacgcggatacccttacaatggcacaaactatgtgaacgtgaccatgcacctccgatctcccattacacgggctgcctacttattcattggcccatccatcgacgtacagagctttacggtccatggtgatagtcagcagcttgatgtattcatcgccacaagcaagcacgcatatgccacttacctctggactggggaagctaccggacagtctgccttcgctcaggtcattgctgatcgccataagatactattcgaccgaaatagcgcaataaagagctccatcgttcctgaagtgaaggactacgccgcaatcgttgaacagaatctgcagcacttcaagcctgtgtttcagctgttggaaaagcagatccttagccgcgtgcgaaataccgcctctttccgcaaaaccgccgaacgattgctgcgcttcagcgataagaggcagactgaagaagctattgacagaatctttgcaatatctcaacagcagcagcagcaaagcaagtcgaagaagaatcgtcgcgcaggtaagagatacaaatttgtcgatgcggttccagatatattcgcacagatcgaggtgaatgagaagaaaatacggcaaaaagctcagatactggctcagaaagagttgcctatcgatgaagacgaagaaatgaaagatttgcttgatttcgcagacgtcacctatgagaaacataagaacggcggacttatcaaggggagattcgggcaagctagaatggtgacaactacccacagccgggctccctccctgagcgcaagctatacaaggttgttcctgattcttaatattgcaatatttttcgtgatgcttgcaatgcagctcacttactttcagcgcgcacagtccctgcatggacaaagatgtctgtatgctgtcctgctcatcgacagttgcattcttctgtggttatacagctcttgctctcagagccaatgctag

SEQ ID NO: 175784 - DNA, 2934 bp, Artificial Sequence
  derived and/or modified sequence
atgggaagctttgaagatggactcgccgctctggagatctggagatccgatgccacgatgagaacacatactcggggagcgccaagtgttttcttcatttatctcctttgcttcgtgagcgcatatattacagatgaaaatccagaggtcatgatccctttcacaaacgcgaattatgactcccaccctatgttatactttagccgggcagaggttgccgaactgcagttacgcgctgcctcctcgcatgaacacatagccgcacgtttaaccgaggctgtgcacacaatgttgtcatctccgctagagtacctgccgccatgggatcctaaggattacagcgctaggtggaacgagatttttggcaacaatctgggggctctggccatgttttgcgtcttgtatccagaaaacatcgaggcgagagacatggcaaaggactacatggaacggatggccgcacagcccagctggctagtcaaagacgcaccttgggatgaggtgccacttgctcacagcctcgtgggtttcgctactgcctatgacttcctctataactatctatcgaagacccagcaggagaaatttctcgaagtcattgccaacgccagtggatacatgtacgagactagttacagacgaggctggggattccagtatttacacaatcaccagcccaccaactgtatggcgctcctgactggtagtctcgtcctgatgaatcagggctacttacaggaggcctatctctggacaaagcaagttctcactattatggagaagtctctggttcttttacgtgaagtgactgacggatccctgtacgaaggcgtggcatatggctcgtacactaccagatccctgttccagtacatgttcctcgtgcagcgccactttaatattaatcattttggtcacccatggctgaagcagcattttgcatttatgtacaggaccatactaccgggattccagcgcaccgttgctatcgctgactccaactataactggttctatggcccagagtcgcaactcgtctttttggataagttcgtaatgcgcaacgggtcaggaaactggctggccgatcaaatacgccgaaaccgggttgttgaaggacctggcacccctagcaagggtcagcggtggtgtactctccatactgaatttctatggtacgacgggagcctgaagtcagtgccaccccctgactttgggaccccaacattgcactatttcgaggattggggcgtggtgacctacggctctgccctacctgctgagattaaccgctctttcctgagcttcaagagtgggaaactcgggggacgagctatctacgatatcgtacacaggaataaatataaggactggataaaggggtggcgaaactttaatgccggacatgagcatcccgatcaaaacagctttacctttgctcccaacggtgtgccattcatcacagaggcactttatggcccaaaatatacattttttaataatgtgttgatgttcagtcccgctgttagtaagagttgcttctctccctgggtggggcaggtcactgaggactgtagtagcaagtggtcgaagtataaacacgatctggctgcgtcctgccaggggagggtggttgcagcggaagagaagaacggggtcgtctttattagaggcgaaggagtgggtgcttataacccgcagctcaatctcaagaacgttcagcgtaaccttatcctattgcatccccagttactgttgcttgtcgatcagattcatcttggtgaagagagcccactggagaccgcggcatcctttttccacaacgtagatgtgccttttgaggagaccgtcgtggacggagtgcatggggcatttatcaggcagcgtgacgggctctacaagatgtattggatggatgatacaggatatagcgaaaaggccacctttgcttcggtgacttatcccagaggctatccttacaatggaacaaactacgtcaatgtgacaatgcacctgcgctcacccatcactcgcgctgcatacttattcattggcccttcgattgatgtgcagagttttaccgtccacggagactctcaacagctggatgtgttcattgcgacttcgaagcacgcttacgcaacttacctgtggacaggcgaggccaccggtcagagtgcgttcgcccaggtcatcgcagatcgccacaaaatcctatttgatagaaatagcgccattaagtcttccattgtgcctgaggtgaaggactatgccgctatcgtggagcaaaatttacagcacttcaaacctgtatttcaactgctggagaagcagattctgtcaagggtccgcaacaccgcctcctttcgcaagaccgccgaacggttgttgcgtttctctgacaaacggcagaccgaggaggccatcgaccggatttttgccatctctcaacagcagcaacaacaaagcaaaagcaaaaagaatcgtcgggcaggcaagagatacaagtttgtggacgccgtcccggatatttttgcccagatcgaagtgaatgagaagaagatcaggcagaaagcgcaaatactggctcagaaagagctacctattgacgaggacgaggagatgaaggacctcctggatttcgctgatgtcacatacgaaaagcataagaacggcggacttattaagggacgctttggtcaggcacgcatggtgaccacaacccatagccgcgcaccttcgctgagtgccagctacactaggctgttcctgattcttaacattgctatattcttcgtcatgctagctatgcagctgacatatttccagagggctcagtccctgcacggacagcgctgtttgtacgcggtactgctcatcgattcttgtatactattgtggctttattcctcctgctcgcagagccaatgctag

SEQ ID NO: 175785 - DNA, 2877 bp, Artificial Sequence
  derived and/or modified sequence
atgagaacccacaccagaggcgcccccagcgtgttcttcatctacctgctgtgcttcgtgagcgcctacatcaccgacgagaaccccgaggtgatgatccccttcaccaacgccaactacgacagccaccccatgctgtacttcagcagagccgaggtggccgagctgcagctgagagccgccagcagccacgagcacatcgccgccagactgaccgaggccgtgcacaccatgctgagcagccccctggagtacctgcccccctgggaccccaaggactacagcgccagatggaacgagatcttcggcaacaacctgggcgccctggccatgttctgcgtgctgtaccccgagaacatcgaggccagagacatggccaaggactacatggagagaatggccgcccagcccagctggctggtgaaggacgccccctgggacgaggtgcccctggcccacagcctggtgggcttcgccaccgcctacgacttcctgtacaactacctgagcaagacccagcaggagaagttcctggaggtgatcgccaacgccagcggctacatgtacgagaccagctacagaagaggctggggcttccagtacctgcacaaccaccagcccaccaactgcatggccctgctgaccggcagcctggtgctgatgaaccagggctacctgcaggaggcctacctgtggaccaagcaggtgctgaccatcatggagaagagcctggtgctgctgagagaggtgaccgacggcagcctgtacgagggcgtggcctacggcagctacaccaccagaagcctgttccagtacatgttcctggtgcagagacacttcaacatcaaccacttcggccacccctggctgaagcagcacttcgccttcatgtacagaaccatcctgcccggcttccagagaaccgtggccatcgccgacagcaactacaactggttctacggccccgagagccagctggtgttcctggacaagttcgtgatgagaaacggcagcggcaactggctggccgaccagatcagaagaaacagagtggtggagggccccggcacccccagcaagggccagagatggtgcaccctgcacaccgagttcctgtggtacgacggcagcctgaagagcgtgcccccccccgacttcggcacccccaccctgcactacttcgaggactggggcgtggtgacctacggcagcgccctgcccgccgagatcaacagaagcttcctgagcttcaagagcggcaagctgggcggcagagccatctacgacatcgtgcacagaaacaagtacaaggactggatcaagggctggagaaacttcaacgccggccacgagcaccccgaccagaacagcttcaccttcgcccccaacggcgtgcccttcatcaccgaggccctgtacggccccaagtacaccttcttcaacaacgtgctgatgttcagccccgccgtgagcaagagctgcttcagcccctgggtgggccaggtgaccgaggactgcagcagcaagtggagcaagtacaagcacgacctggccgccagctgccagggcagagtggtggccgccgaggagaagaacggcgtggtgttcatcagaggcgagggcgtgggcgcctacaacccccagctgaacctgaagaacgtgcagagaaacctgatcctgctgcacccccagctgctgctgctggtggaccagatccacctgggcgaggagagccccctggagaccgccgccagcttcttccacaacgtggacgtgcccttcgaggagaccgtggtggacggcgtgcacggcgccttcatcagacagagagacggcctgtacaagatgtactggatggacgacaccggctacagcgagaaggccaccttcgccagcgtgacctaccccagaggctacccctacaacggcaccaactacgtgaacgtgaccatgcacctgagaagccccatcaccagagccgcctacctgttcatcggccccagcatcgacgtgcagagcttcaccgtgcacggcgacagccagcagctggacgtgttcatcgccaccagcaagcacgcctacgccacctacctgtggaccggcgaggccaccggccagagcgccttcgcccaggtgatcgccgacagacacaagatcctgttcgacagaaacagcgccatcaagagcagcatcgtgcccgaggtgaaggactacgccgccatcgtggagcagaacctgcagcacttcaagcccgtgttccagctgctggagaagcagatcctgagcagagtgagaaacaccgccagcttcagaaagaccgccgagagactgctgagattcagcgacaagagacagaccgaggaggccatcgacagaatcttcgccatcagccagcagcagcagcagcagagcaagagcaagaagaacagaagagccggcaagagatacaagttcgtggacgccgtgcccgacatcttcgcccagatcgaggtgaacgagaagaagatcagacagaaggcccagatcctggcccagaaggagctgcccatcgacgaggacgaggagatgaaggacctgctggacttcgccgacgtgacctacgagaagcacaagaacggcggcctgatcaagggcagattcggccaggccagaatggtgaccaccacccacagcagagcccccagcctgagcgccagctacaccagactgttcctgatcctgaacatcgccatcttcttcgtgatgctggccatgcagctgacctacttccagagagcccagagcctgcacggccagagatgcctgtacgccgtgctgctgatcgacagctgcatcctgctgtggctgtacagcagctgcagccagagccagtgctag

SEQ ID NO: 175786 - DNA, 501 bp, Artificial Sequence
  derived and/or modified sequence
atgagaacccacaccagaggcgcccccagcgtgttcttcatctacctgctgtgcttcgtgagcgcctacatcaccgacgagaaccccgaggtgatgatccccttcaccaacgccaactacgacagccaccccatgctgtacttcagcagagccgaggtggccgagctgcagctgagagccgccagcagccacgagcacatcgccgccagactgaccgaggccgtgcacaccatgctgagcagccccctggagtacctgcccccctgggaccccaaggactacagcgccagatggaacgagatcttcggcaacaacctgggcgccctggccatgttctgcgtgctgtaccccgagaacatcgaggccagagacatggccaaggactacatggagagaatggccgcccagcccagctggctggtgaaggacgccccctgggacgaggtgcccctggcccacagcctggtgggcttcgccaccgcctacgacttcctgtactag

SEQ ID NO: 175787 - DNA, 2934 bp, Artificial Sequence
  derived and/or modified sequence
atgggcagcttcgaggacggcctggccgccctggagatctggagaagcgacgccaccatgagaacccacaccagaggcgcccccagcgtgttcttcatctacctgctgtgcttcgtgagcgcctacatcaccgacgagaaccccgaggtgatgatccccttcaccaacgccaactacgacagccaccccatgctgtacttcagcagagccgaggtggccgagctgcagctgagagccgccagcagccacgagcacatcgccgccagactgaccgaggccgtgcacaccatgctgagcagccccctggagtacctgcccccctgggaccccaaggactacagcgccagatggaacgagatcttcggcaacaacctgggcgccctggccatgttctgcgtgctgtaccccgagaacatcgaggccagagacatggccaaggactacatggagagaatggccgcccagcccagctggctggtgaaggacgccccctgggacgaggtgcccctggcccacagcctggtgggcttcgccaccgcctacgacttcctgtacaactacctgagcaagacccagcaggagaagttcctggaggtgatcgccaacgccagcggctacatgtacgagaccagctacagaagaggctggggcttccagtacctgcacaaccaccagcccaccaactgcatggccctgctgaccggcagcctggtgctgatgaaccagggctacctgcaggaggcctacctgtggaccaagcaggtgctgaccatcatggagaagagcctggtgctgctgagagaggtgaccgacggcagcctgtacgagggcgtggcctacggcagctacaccaccagaagcctgttccagtacatgttcctggtgcagagacacttcaacatcaaccacttcggccacccctggctgaagcagcacttcgccttcatgtacagaaccatcctgcccggcttccagagaaccgtggccatcgccgacagcaactacaactggttctacggccccgagagccagctggtgttcctggacaagttcgtgatgagaaacggcagcggcaactggctggccgaccagatcagaagaaacagagtggtggagggccccggcacccccagcaagggccagagatggtgcaccctgcacaccgagttcctgtggtacgacggcagcctgaagagcgtgcccccccccgacttcggcacccccaccctgcactacttcgaggactggggcgtggtgacctacggcagcgccctgcccgccgagatcaacagaagcttcctgagcttcaagagcggcaagctgggcggcagagccatctacgacatcgtgcacagaaacaagtacaaggactggatcaagggctggagaaacttcaacgccggccacgagcaccccgaccagaacagcttcaccttcgcccccaacggcgtgcccttcatcaccgaggccctgtacggccccaagtacaccttcttcaacaacgtgctgatgttcagccccgccgtgagcaagagctgcttcagcccctgggtgggccaggtgaccgaggactgcagcagcaagtggagcaagtacaagcacgacctggccgccagctgccagggcagagtggtggccgccgaggagaagaacggcgtggtgttcatcagaggcgagggcgtgggcgcctacaacccccagctgaacctgaagaacgtgcagagaaacctgatcctgctgcacccccagctgctgctgctggtggaccagatccacctgggcgaggagagccccctggagaccgccgccagcttcttccacaacgtggacgtgcccttcgaggagaccgtggtggacggcgtgcacggcgccttcatcagacagagagacggcctgtacaagatgtactggatggacgacaccggctacagcgagaaggccaccttcgccagcgtgacctaccccagaggctacccctacaacggcaccaactacgtgaacgtgaccatgcacctgagaagccccatcaccagagccgcctacctgttcatcggccccagcatcgacgtgcagagcttcaccgtgcacggcgacagccagcagctggacgtgttcatcgccaccagcaagcacgcctacgccacctacctgtggaccggcgaggccaccggccagagcgccttcgcccaggtgatcgccgacagacacaagatcctgttcgacagaaacagcgccatcaagagcagcatcgtgcccgaggtgaaggactacgccgccatcgtggagcagaacctgcagcacttcaagcccgtgttccagctgctggagaagcagatcctgagcagagtgagaaacaccgccagcttcagaaagaccgccgagagactgctgagattcagcgacaagagacagaccgaggaggccatcgacagaatcttcgccatcagccagcagcagcagcagcagagcaagagcaagaagaacagaagagccggcaagagatacaagttcgtggacgccgtgcccgacatcttcgcccagatcgaggtgaacgagaagaagatcagacagaaggcccagatcctggcccagaaggagctgcccatcgacgaggacgaggagatgaaggacctgctggacttcgccgacgtgacctacgagaagcacaagaacggcggcctgatcaagggcagattcggccaggccagaatggtgaccaccacccacagcagagcccccagcctgagcgccagctacaccagactgttcctgatcctgaacatcgccatcttcttcgtgatgctggccatgcagctgacctacttccagagagcccagagcctgcacggccagagatgcctgtacgccgtgctgctgatcgacagctgcatcctgctgtggctgtacagcagctgcagccagagccagtgctag

SEQ ID NO: 175788 - DNA, 4255 bp, Artificial Sequence
  derived and/or modified sequence
ctgcttctctataggtgacccccgccccaaagtcccccctcccactaacttctctttgagaagagagtaaaaccgaattcgagagaaaagaggcagtaactattcgggaggaggcagactggagtgggcaccagtcccgcggagcctcagcgcccgccgcgtccctccctccgcccctttcgcccacacctacccgcccccgccggcccggctctcagtagcgtcgcccgaggctgcagcagcgcatcccggggcatggcgcggcgggggcgcggagggctcggttcggagggggccgggagcccgggcgccctggagtgaggaggaccgggagctggctctggaggctgcggaggcgacgccggagagaacgaagcctcggctgggagcggatctttcgaagatggtttggctgccttggagatttggagatctgatgccacgatgaggactcacacacggggggctcccagtgtgtttttcatatatttgctttgctttgtgtcagcctacatcaccgacgagaacccagaagttatgattcccttcaccaatgccaactacgacagccatcccatgctgtacttctccagggcagaagtggcggagctgcagctcagggctgccagctcgcacgagcacattgcagcccgcctcacggaggctgtgcacacgatgctgtccagccccttggaatacctccctccctgggatcccaaggactacagtgcccgctggaatgaaatttttggaaacaacttgggtgccttggcaatgttctgtgtgctgtatcctgagaacattgaagcccgagacatggccaaagactacatggagaggatggcagcgcagcctagttggttggtgaaagatgctccttgggatgaggtcccgcttgctcactccctggttggttttgccactgcttatgacttcttgtacaactacctgagcaagacacaacaggagaagtttcttgaagtgattgccaatgcctcagggtatatgtatgaaacttcatacaggagaggatggggatttcaatacctgcacaatcatcagcccaccaactgtatggctttgctcacgggaagcctagtcctgatgaatcaaggatatcttcaagaagcctacttatggaccaaacaagttctgaccatcatggagaaatctctggtcttgctcagggaggtgacggatggctccctctatgaaggagttgcgtatggcagctacaccactagatcactcttccaatacatgtttctcgtccagaggcacttcaacatcaaccactttggccatccgtggcttaaacaacactttgcatttatgtatagaaccatcctgccagggtttcaaaggactgtggctattgcggactcaaattacaactggttttatggtccagaaagccaattagtgttccttgataaatttgtcatgcgtaatggcagtggtaactggctagctgaccaaatcagaaggaaccgtgtggtggaaggtccaggaacaccatccaaagggcagcgctggtgcactctgcacacagaatttctctggtatgatggcagcttgaaatcggttcctcctccagactttggcacccctacactgcattattttgaagactggggtgtcgtgacttatggaagtgcactacctgcagaaatcaatagatctttcctttccttcaagtctggaaaactggggggacgtgcaatatatgacattgtccacagaaacaaatacaaagattggatcaaaggatggagaaattttaatgcagggcatgaacatcctgatcaaaactcatttacttttgctcccaatggtgtgcctttcattactgaggctctgtacgggccaaagtacaccttcttcaacaatgttttgatgttttccccagctgtgtcaaagagctgcttttctccctgggtgggtcaggtcacagaagactgctcatcaaaatggtctaaatacaagcatgacctggcagctagttgtcaggggagggtggttgcagcagaggagaaaaatggggtggttttcatccgaggagaaggtgtgggagcttataacccccagctcaacctgaagaatgttcagaggaatctcatcctcctacatccacagctgcttctccttgtagaccaaatacacctgggagaggagagtcccttggagacagcagcgagcttcttccataatgtggatgttccttttgaggagactgtggtagatggtgtccatggggctttcatcaggcagagagatggtctctataaaatgtactggatggacgatactggctacagcgagaaagcaacctttgcctcagtgacatatcctcggggctatccctacaatgggacaaactatgtgaatgtcaccatgcacctccgaagtcccatcaccagggcagcttacctcttcatagggccatctatagatgttcagagcttcactgtccacggagactctcagcaactggatgtgttcatagccaccagcaaacatgcctacgccacatacctgtggacaggtgaggccacaggacagtctgcctttgcacaggtcattgctgatcgtcacaaaattctgtttgaccggaattcagccatcaagagcagcattgtccctgaggtgaaggactatgctgctattgtggaacagaacttgcagcattttaaaccagtgtttcagctgctggagaagcagatactgtcccgagtccggaacacagctagctttaggaagactgctgaacgcctgctgagattttcagataagagacagactgaggaggccattgacaggatttttgccatatcacagcaacagcagcagcaaagcaagtcaaagaaaaaccgaagggcaggcaaacgctataaatttgtggatgctgtccctgatatttttgcacagattgaagtcaatgagaaaaagattagacagaaagctcagattttggcacagaaagaactacccatagatgaagatgaagaaatgaaagaccttttagattttgcagatgtaacatacgagaaacataaaaatgggggcttgattaaaggccggtttggacaggcacggatggtgacaactacacacagcagggccccatcactgtctgcttcctataccaggttgttcctgattctgaacattgctattttctttgtcatgttggcaatgcaactgacttatttccagagggcccagagcctacatggccaaagatgtctttatgcagttcttctcatagatagctgtattttattatggttgtactcttcttgttcccaatcacagtgttagcactgaagctataaattacctggtcattttgtgatcacaagagtctatgcaaaaaaaaaaatttctttaccccagattatcagatttttttccctcagattcattttaacaaattaagggaagatattttgacacaagaaagcaggaacgtggagaaattggagcaggaaaagaaattatcaaagcaatagaaatagcttggtggtcctatggtgtttttggaagtatttggcattgctaattgagcagtccatatagtactacttttagaagaaacaaaaagtctattttttaaagtaatgttttttcttatgagaaaaaggtttagatagaattgggttttattaatattaatttaatgctattagcaatttccatatactatattgtggaaaagactgaagaatacaattctgagaaatataaaaaaattttaatggtatactcatgttgaaagataaatgttgctaagtcctggtatgatggtgtgagcttccttggggaagtacttcttgagttatgtaactaacaggatgttttactacagatctggatggctattcagataacatggcaaaaaatgatagcagaagatcattaaaaacttaaaatatattttattagaaaacatttatctatgaatgaatatttccttgatgctggtctctgcacacatatgcttggttacttgcatgcattcattggttgttcaataagtgagatgattacagataatactgtattttccttatatggaaaaccgttatagacccaataacaactaaacctttcaaaagaaaatattttctattatgaatgttgattttcataccaaagaagatggagagtctaaaatttggatatgattcttatgtttttttaatagaaaaccttcttcaagtttattttcctaaataaacatcataattgtgaa

SEQ ID NO: 175789 - DNA, 4037 bp, Artificial Sequence
  derived and/or modified sequence
agtagcgtcgcccgaggctgcagcagcgcatcccggggcatggcgcggcgggggcgcggagggctcggttcggagggggccgggagcccgggcgccctggagtgaggaggaccgggagctggctctggaggctgcggaggcgacgccggagagaacgaagcctcggctgggagcggatctttcgaagatggtttggctgccttggagatttggagatctgatgccacgatgaggactcacacacggggggctcccagtgtgtttttcatatatttgctttgctttgtgtcagcctacatcaccgacgagaacccagaagttatgattcccttcaccaatgccaactacgacagccatcccatgctgtacttctccagggcagaagtggcggagctgcagctcagggctgccagctcgcacgagcacattgcagcccgcctcacggaggctgtgcacacgatgctgtccagccccttggaatacctccctccctgggatcccaaggactacagtgcccgctggaatgaaatttttggaaacaacttgggtgccttggcaatgttctgtgtgctgtatcctgagaacattgaagcccgagacatggccaaagactacatggagaggatggcagcgcagcctagttggttggtgaaagatgctccttgggatgaggtcccgcttgctcactccctggttggttttgccactgcttatgacttcttgtacaactacctgagcaagacacaacaggagaagtttcttgaagtgattgccaatgcctcagggtatatgtatgaaacttcatacaggagaggatggggatttcaatacctgcacaatcatcagcccaccaactgtatggctttgctcacgggaagcctagtcctgatgaatcaaggatatcttcaagaagcctacttatggaccaaacaagttctgaccatcatggagaaatctctggtcttgctcagggaggtgacggatggctccctctatgaaggagttgcgtatggcagctacaccactagatcactcttccaatacatgtttctcgtccagaggcacttcaacatcaaccactttggccatccgtggcttaaacaacactttgcatttatgtatagaaccatcctgccagggtttcaaaggactgtggctattgcggactcaaattacaactggttttatggtccagaaagccaattagtgttccttgataaatttgtcatgcgtaatggcagtggtaactggctagctgaccaaatcagaaggaaccgtgtggtggaaggtccaggaacaccatccaaagggcagcgctggtgcactctgcacacagaatttctctggtatgatggcagcttgaaatcggttcctcctccagactttggcacccctacactgcattattttgaagactggggtgtcgtgacttatggaagtgcactacctgcagaaatcaatagatctttcctttccttcaagtctggaaaactggggggacgtgcaatatatgacattgtccacagaaacaaatacaaagattggatcaaaggatggagaaattttaatgcagggcatgaacatcctgatcaaaactcatttacttttgctcccaatggtgtgcctttcattactgaggctctgtacgggccaaagtacaccttcttcaacaatgttttgatgttttccccagctgtgtcaaagagctgcttttctccctgggtgggtcaggtcacagaagactgctcatcaaaatggtctaaatacaagcatgacctggcagctagttgtcaggggagggtggttgcagcagaggagaaaaatggggtggttttcatccgaggagaaggtgtgggagcttataacccccagctcaacctgaagaatgttcagaggaatctcatcctcctacatccacagctgcttctccttgtagaccaaatacacctgggagaggagagtcccttggagacagcagcgagcttcttccataatgtggatgttccttttgaggagactgtggtagatggtgtccatggggctttcatcaggcagagagatggtctctataaaatgtactggatggacgatactggctacagcgagaaagcaacctttgcctcagtgacatatcctcggggctatccctacaatgggacaaactatgtgaatgtcaccatgcacctccgaagtcccatcaccagggcagcttacctcttcatagggccatctatagatgttcagagcttcactgtccacggagactctcagcaactggatgtgttcatagccaccagcaaacatgcctacgccacatacctgtggacaggtgaggccacaggacagtctgcctttgcacaggtcattgctgatcgtcacaaaattctgtttgaccggaattcagccatcaagagcagcattgtccctgaggtgaaggactatgctgctattgtggaacagaacttgcagcattttaaaccagtgtttcagctgctggagaagcagatactgtcccgagtccggaacacagctagctttaggaagactgctgaacgcctgctgagattttcagataagagacagactgaggaggccattgacaggatttttgccatatcacagcaacagcagcagcaaagcaagtcaaagaaaaaccgaagggcaggcaaacgctataaatttgtggatgctgtccctgatatttttgcacagattgaagtcaatgagaaaaagattagacagaaagctcagattttggcacagaaagaactacccatagatgaagatgaagaaatgaaagaccttttagattttgcagatgtaacatacgagaaacataaaaatgggggcttgattaaaggccggtttggacaggcacggatggtgacaactacacacagcagggccccatcactgtctgcttcctataccaggttgttcctgattctgaacattgctattttctttgtcatgttggcaatgcaactgacttatttccagagggcccagagcctacatggccaaagatgtctttatgcagttcttctcatagatagctgtattttattatggttgtactcttcttgttcccaatcacagtgttagcactgaagctataaattacctggtcattttgtgatcacaagagtctatgcaaaaaaaaaaatttctttaccccagattatcagatttttttccctcagattcattttaacaaattaagggaagatattttgacacaagaaagcaggaacgtggagaaattggagcaggaaaagaaattatcaaagcaatagaaatagcttggtggtcctatggtgtttttggaagtatttggcattgctaattgagcagtccatatagtactacttttagaagaaacaaaaagtctattttttaaagtaatgttttttcttatgagaaaaaggtttagatagaattgggttttattaatattaatttaatgctattagcaatttccatatactatattgtggaaaagactgaagaatacaattctgagaaatataaaaaaattttaatggtatactcatgttgaaagataaatgttgctaagtcctggtatgatggtgtgagcttccttggggaagtacttcttgagttatgtaactaacaggatgttttactacagatctggatggctattcagataacatggcaaaaaatgatagcagaagatcattaaaaacttaaaatatattttattagaaaacatttatctatgaatgaatatttccttgatgctggtctctgcacacatatgcttggttacttgcatgcattcattggttgttcaataagtgagatgattacagataatactgtattttccttatatggaaaaccgttatagacccaataacaactaaacctttcaaaagaaaatattttctattatgaatgttgattttcataccaaagaagatggagagtctaaaatttggatatgattcttatgtttttttaatagaaaaccttcttcaagtttattttcctaaataaacatcataattgtg

SEQ ID NO: 175790 - DNA, 694 bp, Artificial Sequence
  derived and/or modified sequence
gcggacgacccaccttgagatgcatctagcgactgctcccagcatgtaggagcagttgtaaaatcacagccgtaacagtgcctgctctccagtgtctgaaaacaaatgtttttctggtcttcacttttttgaggcaggaaggatctttcgaagatggtttggctgccttggagatttggagatctgatgccacgatgaggactcacacacggggggctcccagtgtgtttttcatatatttgctttgctttgtgtcagcctacatcaccgacgagaacccagaagttatgattcccttcaccaatgccaactacgacagccatcccatgctgtacttctccagggcagaagtggcggagctgcagctcagggctgccagctcgcacgagcacattgcagcccgcctcacggaggctgtgcacacgatgctgtccagccccttggaatacctccctccctgggatcccaaggactacagtgcccgctggaatgaaatttttggaaacaacttgggtgccttggcaatgttctgtgtgctgtatcctgagaacattgaagcccgagacatggccaaagactacatggagaggatggcagcgcagcctagttggttggtgaaagatgctccttgggatgaggtcccgcttgctcactccctggttggttttgccactgcttatgacttcttgtacaa

SEQ ID NO: 175791 - DNA, 4003 bp, Artificial Sequence
  derived and/or modified sequence
gcggacgacccaccttgagatgcatctagcgactgctcccagcatgtaggagcagttgtaaaatcacagccgtaacagtgcctgctctccagtgtctgaaaacaaatgtttttctggtcttcacttttttgaggcaggaaggatctttcgaagatggtttggctgccttggagatttggagatctgatgccacgatgaggactcacacacggggggctcccagtgtgtttttcatatatttgctttgctttgtgtcagcctacatcaccgacgagaacccagaagttatgattcccttcaccaatgccaactacgacagccatcccatgctgtacttctccagggcagaagtggcggagctgcagctcagggctgccagctcgcacgagcacattgcagcccgcctcacggaggctgtgcacacgatgctgtccagccccttggaatacctccctccctgggatcccaaggactacagtgcccgctggaatgaaatttttggaaacaacttgggtgccttggcaatgttctgtgtgctgtatcctgagaacattgaagcccgagacatggccaaagactacatggagaggatggcagcgcagcctagttggttggtgaaagatgctccttgggatgaggtcccgcttgctcactccctggttggttttgccactgcttatgacttcttgtacaactacctgagcaagacacaacaggagaagtttcttgaagtgattgccaatgcctcagggtatatgtatgaaacttcatacaggagaggatggggatttcaatacctgcacaatcatcagcccaccaactgtatggctttgctcacgggaagcctagtcctgatgaatcaaggatatcttcaagaagcctacttatggaccaaacaagttctgaccatcatggagaaatctctggtcttgctcagggaggtgacggatggctccctctatgaaggagttgcgtatggcagctacaccactagatcactcttccaatacatgtttctcgtccagaggcacttcaacatcaaccactttggccatccgtggcttaaacaacactttgcatttatgtatagaaccatcctgccagggtttcaaaggactgtggctattgcggactcaaattacaactggttttatggtccagaaagccaattagtgttccttgataaatttgtcatgcgtaatggcagtggtaactggctagctgaccaaatcagaaggaaccgtgtggtggaaggtccaggaacaccatccaaagggcagcgctggtgcactctgcacacagaatttctctggtatgatggcagcttgaaatcggttcctcctccagactttggcacccctacactgcattattttgaagactggggtgtcgtgacttatggaagtgcactacctgcagaaatcaatagatctttcctttccttcaagtctggaaaactggggggacgtgcaatatatgacattgtccacagaaacaaatacaaagattggatcaaaggatggagaaattttaatgcagggcatgaacatcctgatcaaaactcatttacttttgctcccaatggtgtgcctttcattactgaggctctgtacgggccaaagtacaccttcttcaacaatgttttgatgttttccccagctgtgtcaaagagctgcttttctccctgggtgggtcaggtcacagaagactgctcatcaaaatggtctaaatacaagcatgacctggcagctagttgtcaggggagggtggttgcagcagaggagaaaaatggggtggttttcatccgaggagaaggtgtgggagcttataacccccagctcaacctgaagaatgttcagaggaatctcatcctcctacatccacagctgcttctccttgtagaccaaatacacctgggagaggagagtcccttggagacagcagcgagcttcttccataatgtggatgttccttttgaggagactgtggtagatggtgtccatggggctttcatcaggcagagagatggtctctataaaatgtactggatggacgatactggctacagcgagaaagcaacctttgcctcagtgacatatcctcggggctatccctacaatgggacaaactatgtgaatgtcaccatgcacctccgaagtcccatcaccagggcagcttacctcttcatagggccatctatagatgttcagagcttcactgtccacggagactctcagcaactggatgtgttcatagccaccagcaaacatgcctacgccacatacctgtggacaggtgaggccacaggacagtctgcctttgcacaggtcattgctgatcgtcacaaaattctgtttgaccggaattcagccatcaagagcagcattgtccctgaggtgaaggactatgctgctattgtggaacagaacttgcagcattttaaaccagtgtttcagctgctggagaagcagatactgtcccgagtccggaacacagctagctttaggaagactgctgaacgcctgctgagattttcagataagagacagactgaggaggccattgacaggatttttgccatatcacagcaacagcagcagcaaagcaagtcaaagaaaaaccgaagggcaggcaaacgctataaatttgtggatgctgtccctgatatttttgcacagattgaagtcaatgagaaaaagattagacagaaagctcagattttggcacagaaagaactacccatagatgaagatgaagaaatgaaagaccttttagattttgcagatgtaacatacgagaaacataaaaatgggggcttgattaaaggccggtttggacaggcacggatggtgacaactacacacagcagggccccatcactgtctgcttcctataccaggttgttcctgattctgaacattgctattttctttgtcatgttggcaatgcaactgacttatttccagagggcccagagcctacatggccaaagatgtctttatgcagttcttctcatagatagctgtattttattatggttgtactcttcttgttcccaatcacagtgttagcactgaagctataaattacctggtcattttgtgatcacaagagtctatgcaaaaaaaaaaatttctttaccccagattatcagatttttttccctcagattcattttaacaaattaagggaagatattttgacacaagaaagcaggaacgtggagaaattggagcaggaaaagaaattatcaaagcaatagaaatagcttggtggtcctatggtgtttttggaagtatttggcattgctaattgagcagtccatatagtactacttttagaagaaacaaaaagtctattttttaaagtaatgttttttcttatgagaaaaaggtttagatagaattgggttttattaatattaatttaatgctattagcaatttccatatactatattgtggaaaagactgaagaatacaattctgagaaatataaaaaaattttaatggtatactcatgttgaaagataaatgttgctaagtcctggtatgatggtgtgagcttccttggggaagtacttcttgagttatgtaactaacaggatgttttactacagatctggatggctattcagataacatggcaaaaaatgatagcagaagatcattaaaaacttaaaatatattttattagaaaacatttatctatgaatgaatatttccttgatgctggtctctgcacacatatgcttggttacttgcatgcattcattggttgttcaataagtgagatgattacagataatactgtattttccttatatggaaaaccgttatagacccaataacaactaaacctttcaaaagaaaatattttctattatgaatgttgattttcataccaaagaagatggagagtctaaaatttggatatgattcttatgtttttttaatagaaaaccttcttcaagtttattttcctaaataaacatcataattgtg

SEQ ID NO: 175792 - DNA, 3487 bp, Artificial Sequence
  derived and/or modified sequence
aggaattggatggaggtgcccttcagaactcatggagaaaagcactgctcccagtaaaatatctctcattctaatgaatgggatctttcgaagatggtttggctgccttggagatttggagatctgatgccacgatgaggactcacacacggggggctcccagtgtgtttttcatatatttgctttgctttgtgtcagcctacatcaccgacgagaacccagaagttatgattcccttcaccaatgccaactacgacagccatcccatgctgtacttctccagggcagaagtggcggagctgcagctcagggctgccagctcgcacgagcacattgcagcccgcctcacggaggctgtgcacacgatgctgtccagccccttggaatacctccctccctgggatcccaaggactacagtgcccgctggaatgaaatttttggaaacaacttgggtgccttggcaatgttctgtgtgctgtatcctgagaacattgaagcccgagacatggccaaagactacatggagaggatggcagcgcagcctagttggttggtgaaagatgctccttgggatgaggtcccgcttgctcactccctggttggttttgccactgcttatgacttcttgtacaactacctgagcaagacacaacaggagaagtttcttgaagtgattgccaatgcctcagggtatatgtatgaaacttcatacaggagaggatggggatttcaatacctgcacaatcatcagcccaccaactgtatggctttgctcacgggaagcctagtcctgatgaatcaaggatatcttcaagaagcctacttatggaccaaacaagttctgaccatcatggagaaatctctggtcttgctcagggaggtgacggatggctccctctatgaaggagttgcgtatggcagctacaccactagatcactcttccaatacatgtttctcgtccagaggcacttcaacatcaaccactttggccatccgtggcttaaacaacactttgcatttatgtatagaaccatcctgccagggtttcaaaggactgtggctattgcggactcaaattacaactggttttatggtccagaaagccaattagtgttccttgataaatttgtcatgcgtaatggcagtggtaactggctagctgaccaaatcagaaggaaccgtgtggtggaaggtccaggaacaccatccaaagggcagcgctggtgcactctgcacacagaatttctctggtatgatggcagcttgaaatcggttcctcctccagactttggcacccctacactgcattattttgaagactggggtgtcgtgacttatggaagtgcactacctgcagaaatcaatagatctttcctttccttcaagtctggaaaactggggggacgtgcaatatatgacattgtccacagaaacaaatacaaagattggatcaaaggatggagaaattttaatgcagggcatgaacatcctgatcaaaactcatttacttttgctcccaatggtgtgcctttcattactgaggctctgtacgggccaaagtacaccttcttcaacaatgttttgatgttttccccagctgtgtcaaagagctgcttttctccctgggtgggtcaggtcacagaagactgctcatcaaaatggtctaaatacaagcatgacctggcagctagttgtcaggggagggtggttgcagcagaggagaaaaatggggtggttttcatccgaggagaaggtgtgggagcttataacccccagctcaacctgaagaatgttcagaggaatctcatcctcctacatccacagctgcttctccttgtagaccaaatacacctgggagaggagagtcccttggagacagcagcgagcttcttccataatgtggatgttccttttgaggagactgtggtagatggtgtccatggggctttcatcaggcagagagatggtctctataaaatgtactggatggacgatactggctacagcgagaaagcaacctttgcctcagtgacatatcctcggggctatccctacaatgggacaaactatgtgaatgtcaccatgcacctccgaagtcccatcaccagggcagcttacctcttcatagggccatctatagatgttcagagcttcactgtccacggagactctcagcaactggatgtgttcatagccaccagcaaacatgcctacgccacatacctgtggacaggtgaggccacaggacagtctgcctttgcacaggtcattgctgatcgtcacaaaattctgtttgaccggaattcagccatcaagagcagcattgtccctgaggtgaaggactatgctgctattgtggaacagaacttgcagcattttaaaccagtgtttcagctgctggagaagcagatactgtcccgagtccggaacacagctagctttaggaagactgctgaacgcctgctgagattttcagataagagacagactgaggaggccattgacaggatttttgccatatcacagcaacagcagcagcaaagcaagtcaaagaaaaaccgaagggcaggcaaacgctataaatttgtggatgctgtccctgatatttttgcacagattgaagtcaatgagaaaaagattagacagaaagctcagattttggcacagaaagaactacccatagatgaagatgaagaaatgaaagaccttttagattttgcagatgtaacatacgagaaacataaaaatgggggcttgattaaaggccggtttggacaggcacggatggtgacaactacacacagcagggccccatcactgtctgcttcctataccaggttgttcctgattctgaacattgctattttctttgtcatgttggcaatgcaactgacttatttccagagggcccagagcctacatggccaaagatgtctttatgcagttcttctcatagatagctgtattttattatggttgtactcttcttgttcccaatcacagtgttagcactgaagctataaattacctggtcattttgtgatcacaagagtctatgcaaaaaaaaaaatttctttaccccagattatcagatttttttccctcagattcattttaacaaattaagggaagatattttgacacaagaaagcaggaacgtggagaaattggagcaggaaaagaaattatcaaagcaatagaaatagcttggtggtcctatggtgtttttggaagtatttggcattgctaattgagcagtccatatagtactacttttagaagaaacaaaaagtctattttttaaagtaatgttttttcttatgagaaaaaggtttagatagaattgggttttattaatattaatttaatgctattagcaatttccatatactatattgtggaaaagactgaagaatacaattctgagaaatataaaaaaattttaatggtatactcatgttgaaagataaatgttgctaagtcct

SEQ ID NO: 175793 - DNA, 1130 bp, Artificial Sequence
  derived and/or modified sequence
ctgcgcggttgactacgcttatcaatccatcgtattcctttgtcttcttgtcacaaaaagaatttcgtcagtctggaaggggagttttacttacgtaaatggatgtagaccagactcaagcatggctgccctgaagggcagacaggtttattgggcaacagctgggaaaatcagcggttggacttggccacatgctccaagaaggccacacgtccttcttcttaatggcataggagttggaggagcccttggcagcattgatgagctcctctgccaggcactcagcaatggtcttaatgttccggaaggcagcctcacgagcacctgtgcacagcagccagatggcctgattcacacggcgaagtggggacacgtccacagcctgtcgtctcacagtcccggcgcacccaatgcgtgtggagtcctcccggggaccactgttgatgatggcgttcaccaggacctgcagagggttctcgcctgtgagcaggtgtatgacctcgaaggcatgcttgacgatgcacacagtcatgagcttcttgccgttgttgcagccgtgcatcatcatggagttagtaaggcgctccacaatgggacactgagctttgtggaagcatttggcggcataccaccctgcactgtgaggatctttcgaagatggtttggctgccttggagatttggagatctgatgccacgatgaggactcacacacggggggctcccagtgtgtttttcatatatttgctttgctttgtgtcagcctacatcaccgacgagaacccagaagttatgattcccttcaccaatgccaactacgacagccatcccatgctgtacttctccagggcagaagtggcggagctgcagctcagggctgccagctcgcacgagcacattgcagcccgcctcacggaggctgtgcacacgatgctgtccagccccttggaatacctccctccctgggatcccaaggactacagtgcccgctggaatgaaatttttggaaacaacttgggtgccttggcaatgttctgtgtgctgtatcctgagaacattgaagcccgagacatggccaaagactacatggagaggatggcagcgcagcctagttggttggtgaaagatgct

SEQ ID NO: 175794 - protein, 345 aa, Artificial Sequence
  derived and/or modified sequence
MSSYQKELEKYRDIDEDEILRTLSPEELEQLDCELQEMDPENMLLPAGLRQRDQTKKSPTGPLDREALLQYLEQQALEVKERDDLVPFTGEKKGKPYIQPKREIPAEEQITLEPELEEALAHATDAEMCDIAAILDMYTLMSNKQYYDALCSGEICNTEGISSVVQPDKYKPVPDEPPNPTNIEEILKRVRSNDKELEEVNLNNIQDIPIPMLSELCEAMKANTYVRSFSLVATRSGDPIANAVADMLRENRSLQSLNIESNFISSTGLMAVLKAVRENATLTELRVDNQRQWPGDAVEMEMATVLEQCPSIVRFGYHFTQQGPRARAAQAMTRNNELRRQQKKR

SEQ ID NO: 175795 - protein, 142 aa, Artificial Sequence
  derived and/or modified sequence
MSSYQKELEKYRDIDEDEILRTLSPEELEQLDCELQEMDPENMLLPAGLRQRDQTKKSPTGPLDREALLQYLEQQALEVKERDDLVPFTGEKKGKPYIQPKREIPAEEQITLEPELEEALAHATDAEMCDIAAILDMYTLMS

SEQ ID NO: 175796 - DNA, 1038 bp, Artificial Sequence
  derived and/or modified sequence
atgagcagctaccagaaggagctggagaagtacagagacatcgacgaggacgagatcctgagaaccctgagccccgaggagctggagcagctggactgcgagctgcaggagatggaccccgagaacatgctgctgcccgccggcctgagacagagagaccagaccaagaagagccccaccggccccctggacagagaggccctgctgcagtacctggagcagcaggccctggaggtgaaggagagagacgacctggtgcccttcaccggcgagaagaagggcaagccctacatccagcccaagagagagatccccgccgaggagcagatcaccctggagcccgagctggaggaggccctggcccacgccaccgacgccgagatgtgcgacatcgccgccatcctggacatgtacaccctgatgagcaacaagcagtactacgacgccctgtgcagcggcgagatctgcaacaccgagggcatcagcagcgtggtgcagcccgacaagtacaagcccgtgcccgacgagccccccaaccccaccaacatcgaggagatcctgaagagagtgagaagcaacgacaaggagctggaggaggtgaacctgaacaacatccaggacatccccatccccatgctgagcgagctgtgcgaggccatgaaggccaacacctacgtgagaagcttcagcctggtggccaccagaagcggcgaccccatcgccaacgccgtggccgacatgctgagagagaacagaagcctgcagagcctgaacatcgagagcaacttcatcagcagcaccggcctgatggccgtgctgaaggccgtgagagagaacgccaccctgaccgagctgagagtggacaaccagagacagtggcccggcgacgccgtggagatggagatggccaccgtgctggagcagtgccccagcatcgtgagattcggctaccacttcacccagcagggccccagagccagagccgcccaggccatgaccagaaacaacgagctgagaagacagcagaagaagagatag

SEQ ID NO: 175797 - DNA, 429 bp, Artificial Sequence
  derived and/or modified sequence
atgagcagctaccagaaggagctggagaagtacagagacatcgacgaggacgagatcctgagaaccctgagccccgaggagctggagcagctggactgcgagctgcaggagatggaccccgagaacatgctgctgcccgccggcctgagacagagagaccagaccaagaagagccccaccggccccctggacagagaggccctgctgcagtacctggagcagcaggccctggaggtgaaggagagagacgacctggtgcccttcaccggcgagaagaagggcaagccctacatccagcccaagagagagatccccgccgaggagcagatcaccctggagcccgagctggaggaggccctggcccacgccaccgacgccgagatgtgcgacatcgccgccatcctggacatgtacaccctgatgagctag

SEQ ID NO: 175798 - DNA, 1038 bp, Artificial Sequence
  derived and/or modified sequence
atgagttcttaccaaaaagagttggagaaatacagggacatcgatgaagatgagattctgaggacactgtcaccggaagagctcgagcagttggactgcgagttacaggagatggaccccgagaatatgctgctgccagccgggttaagacagcgggaccagaccaagaagagtccaaccggcccattggatagagaggcattactccagtacctggaacaacaggctctggaggtcaaggagagggacgacctggtgcctttcacgggcgagaaaaaggggaagccctatattcagccaaagcgggaaattcccgctgaagaacagattacacttgagcccgagctggaggaggcacttgcacacgcgacggatgccgaaatgtgcgatattgcggcaatcctcgatatgtacacgctgatgtctaataaacaatattacgacgctctgtgctcaggagaaatttgtaacactgaaggaatttccagcgtggtgcaaccagacaagtataaacccgtacccgatgaaccacccaaccctacaaacatcgaggagattctgaaacgcgtcagatccaacgataaggagctagaagaggtgaaccttaacaacattcaagacattcctatcccaatgctctccgagctttgtgaggcaatgaaagccaatacttacgtaaggagcttcagtctggtcgccacacggagtggcgaccccatcgccaacgcggtcgcagacatgttacgggaaaacagaagcctgcagagcctaaatatcgaaagtaattttattagcagtacaggattgatggccgtcttaaaagcagtgagagagaacgccactctcacggaacttcgggtcgataaccagcggcagtggccaggcgacgcagtggagatggagatggccaccgtcttggagcagtgccctagcatcgtccggttcgggtatcattttacgcaacaggggccacgagcccgcgctgcccaggctatgaccaggaataacgaacttaggagacagcagaagaaaaggtag

SEQ ID NO: 175799 - DNA, 429 bp, Artificial Sequence
  derived and/or modified sequence
atgagttcgtaccagaaggagttggaaaaataccgggacatcgatgaggacgagattctgaggacgctctcacccgaagagctggagcagctcgactgtgaattacaagaaatggacccagagaacatgctcctgccagcaggcctgcgccagcgggatcaaactaaaaaaagtccaactggtcccctagatcgggaggccttgctgcagtacctggagcaacaggcgctggaggtcaaagagcgagatgaccttgtcccatttacaggcgaaaagaaggggaaaccatacatccagcccaagagggaaattccagctgaggagcagatcacactcgagcctgagctggaggaggcccttgcgcatgcgaccgacgccgagatgtgcgatattgctgccatactcgatatgtataccctcatgagctag

SEQ ID NO: 175800 - DNA, 1038 bp, Artificial Sequence
  derived and/or modified sequence
atgagcagctaccagaaggagctggagaagtacagagacattgatgaagatgagatcctgcggaccctgagccctgaggagctggagcagctggactgtgagctgcaggagatggaccctgagaacatgctgctgcctgctggcctgcggcagagggaccagaccaagaagagccccaccggccccctggaccgggaggccctgctgcagtacctggagcagcaggccctggaggtgaaggagagagatgacctggtgcccttcaccggggagaagaagggcaagccctacatccagcccaagcgggagatcccagctgaggagcagatcaccctggagcctgagctggaggaggccctggcccacgccacagatgctgagatgtgtgacattgctgccatcctggacatgtacaccctgatgagcaacaagcagtactatgatgccctgtgcagcggggagatctgcaacacagagggcatcagctctgtggtgcagcctgacaagtacaagcctgtgcctgatgagccccccaaccccaccaacatcgaggagatcctgaagagggtgcgcagcaatgacaaggagctggaggaggtgaacctgaacaacatccaggacatccccatccccatgctgtctgagctgtgtgaggccatgaaggccaacacctacgtgcgctccttcagcctggtggccaccaggtctggggaccccatcgccaatgctgtggccgacatgctgcgggagaacagaagcctgcagagcctgaacatcgagagcaacttcatcagcagcacaggcctgatggctgtgctgaaggctgtgcgggagaatgccaccctgacagagctgcgggtggacaaccagaggcagtggccaggagatgctgtggagatggagatggccaccgtgctggagcagtgccccagcatcgtgcgcttcggctaccacttcacccagcagggcccccgggcccgggccgcccaggccatgaccaggaacaatgagctgcggcggcagcagaagaagaggtag

SEQ ID NO: 175801 - DNA, 429 bp, Artificial Sequence
  derived and/or modified sequence
atgagcagctaccagaaggagctggagaagtacagagacattgatgaagatgagatcctgcggaccctgagccctgaggagctggagcagctggactgtgagctgcaggagatggaccctgagaacatgctgctgcctgctggcctgcggcagagggaccagaccaagaagagccccaccggccccctggaccgggaggccctgctgcagtacctggagcagcaggccctggaggtgaaggagagagatgacctggtgcccttcaccggggagaagaagggcaagccctacatccagcccaagcgggagatcccagctgaggagcagatcaccctggagcctgagctggaggaggccctggcccacgccacagatgctgagatgtgtgacattgctgccatcctggacatgtacaccctgatgtcctag

SEQ ID NO: 175802 - DNA, 1038 bp, Artificial Sequence
  derived and/or modified sequence
atgagcagctaccagaaggagctggagaagtaccgggacatcgacgaggacgagatcctgcggactctgtcaccagaagaactggagcaactagattgcgagctgcaagaaatggatcctgaaaacatgttgctgcccgccggcttacggcagcgcgatcagacaaagaaaagtcccactgggcccctggaccgagaggctttgctgcaatatcttgagcagcaggcactcgaggttaaggaaagagacgacctggtcccgtttaccggcgagaaaaaggggaaaccctacatccagccaaagcgcgagataccagccgaggagcaaattaccctggaacctgagttggaagaagctttggctcatgctaccgatgccgaaatgtgcgacattgccgccattctcgatatgtataccttaatgtctaacaagcagtattacgacgccctctgtagtggtgaaatttgtaacacagagggtatctccagcgtcgtgcagcctgacaagtataaacccgtgcccgacgagcccccgaatccaacaaacattgaagaaatactaaaacgggtaaggagtaacgataaggaattagaagaggtgaacctgaacaatatccaggacatccctattcccatgctgtccgagttgtgcgaggcaatgaaggccaatacatatgtaagatctttctctcttgtcgcgacccgctctggcgatcctatcgccaatgccgtcgcggacatgctgcgggagaatcgtagtttgcagagtttgaacatagagtcaaatttcatcagctctactggactcatggccgtgctgaaggccgtcagggaaaacgcaacactgactgagctgcgggttgacaaccagagacaatggcccggagacgccgtggaaatggaaatggcgaccgtgctggagcagtgccccagcatcgtgcgctttgggtaccacttcacccagcaaggaccccgcgcccgagctgctcaggccatgacgcggaataacgagctgaggaggcagcagaagaagcgatag

SEQ ID NO: 175803 - DNA, 429 bp, Artificial Sequence
  derived and/or modified sequence
atgagcagctaccagaaggagctggagaagtaccgggacatcgacgaagacgagatcctccgaaccctgtctccggaagagctggagcagcttgattgcgaactgcaggaaatggaccccgagaatatgcttctgccggccggtctgcgccagcgcgatcagactaagaagagccctaccggaccgcttgacagggaggctctgctgcagtacctggaacaacaggctctggaagtgaaggaaagagacgatcttgtgccttttacaggagagaaaaaagggaagccctacattcagcccaaaagagagatccctgcagaggaacaaattacactagaacccgagctggaggaagccctggcccatgctaccgacgctgagatgtgtgacattgcggctattctagacatgtacaccctgatgagctag

SEQ ID NO: 175804 - DNA, 1038 bp, Artificial Sequence
  derived and/or modified sequence
atgagctcatatcagaaggagctagagaagtatagagacatcgacgaggacgagattcttcgaaccctaagcccggaggaactcgagcaactcgactgtgagttacaggagatggatcccgagaacatgttgttgccagctggtctcagacagagggatcagacgaagaagtcccccacgggccctttggatcgggaggctttgcttcaatacttggaacagcaggcccttgaagttaaggaaagagacgacctggtgccatttacaggcgaaaaaaagggaaaaccctacattcaaccaaagcgggaaatcccagccgaagagcagattaccctcgaaccggagctggaggaagcgctcgcccacgcaaccgacgccgaaatgtgcgatatcgcggctattttggatatgtacacactcatgtccaacaagcagtactacgatgccttgtgttcgggcgaaatttgcaatacggagggcattagcagcgtggtgcagcctgataaatacaaacccgtaccggatgaacctccaaaccctaccaacattgaggaaatattgaagagagtgagatccaatgataaggagctcgaggaagtcaatttgaataacatccaagatattcctatccctatgttaagtgagttgtgtgaggcaatgaaggcaaacacctacgtacgcagcttcagtcttgttgccactagaagcggtgacccaatcgctaatgccgtcgctgacatgctcagagagaaccggtccttacagtccctgaacatcgaaagcaacttcatcagttccacaggactgatggccgtgttaaaggccgtaagagaaaatgcaactctcacagagttgagggtcgataatcagcgacagtggcctggcgacgctgtcgagatggagatggctacggtgctggagcagtgcccgtctatagtgagatttggatatcattttacacagcaaggacccagagcccgagcggcacaggctatgacgcgcaataacgagctgcggagacagcagaagaagcggtag

SEQ ID NO: 175805 - DNA, 429 bp, Artificial Sequence
  derived and/or modified sequence
atgagctcataccagaaggaattggagaagtaccgggatattgacgaagacgaaattctccggactctgtctcccgaggaattggaacagctcgactgtgagctccaggaaatggaccccgagaacatgctgctgcccgcaggtcttcgccagcgagaccagactaaaaagtcacccaccggacccctcgaccgggaggcattgctacagtatcttgagcaacaggcgctggaggtgaaggagcgggacgacctggtacccttcaccggcgaaaaaaaaggcaaaccctacatccaaccaaaaagggaaattccagccgaagagcagataacactggaacctgagctcgaggaagcacttgcacatgccactgacgcagagatgtgcgatatagccgcaatcctggacatgtatacactgatgtcatag

SEQ ID NO: 175806 - DNA, 1267 bp, Artificial Sequence
  derived and/or modified sequence
ccgggctcctcctgctgctgggacagtgctctagtagaacagacagacctactgacacaggggaggtgagaagggaggtgaccaccaggactggctctgtgagtaccacacagtggggagggggtgggggccaccatgtcatcatatcagaaggaactggagaaatacagagacatagatgaagatgagatcctaaggaccttgagccccgaggagctagagcagctggactgcgaactacaggagatggatcctgagaacatgctcctgccagctggactaagacaacgtgaccagacaaagaagagcccaacggggccactggaccgagaggcccttttgcagtacttggagcaacaggcactagaagtcaaagagcgtgatgacttggtgcccttcacaggcgagaagaaggggaaaccctatattcagcccaagagggaaatcccagcagaggagcagatcaccctggagcctgagctggaggaggcactggcacatgccacagatgctgaaatgtgtgacattgcagcaattctggacatgtacacactgatgagtaacaagcaatactatgatgccctctgcagtggagaaatctgcaacactgaaggcattagcagtgtggtacagcctgacaagtataagccagtgccggatgaacccccaaatcccacaaacattgaggagatactaaagagggtccgaagcaatgacaaggagctggaggaggtgaacttgaataatatacaggacatcccaatacccatgctaagtgagctgtgtgaggcaatgaaggcaaatacctatgtgcggagcttcagtctggtagccacgaggagtggtgaccccattgccaatgcagtggctgacatgttgcgtgagaatcgtagcctccagagcctaaacatcgaatccaacttcattagcagcacaggactcatggctgtgctgaaggcagttcgggaaaatgccacactcactgagctccgtgtagacaatcagcgccagtggcctggtgatgcagtggagatggagatggccaccgtgctagagcagtgtccctctattgtccgctttggctaccactttacacagcaggggccacgagctcgggcagcccaggccatgacccgaaacaatgaactacgtcgccagcaaaagaagagataacactgcatttccctttaccaactagcgctgggagcactggacacttaaatcctcatctgtcctcctttcctgtaaataaaagcccttctatcca

SEQ ID NO: 175807 - DNA, 493 bp, Artificial Sequence
  derived and/or modified sequence
agacagacctactgacacaggggaggctctgtgagtaccacacagtggggagggggtgggggccaccatgtcatcatatcagaaggaactggagaaatacagagacatagatgaagatgagatcctaaggaccttgagccccgaggagctagagcagctggactgcgaactacaggagatggatcctgagaacatgctcctgccagctggactaagacaacgtgaccagacaaagaagagcccaacggggccactggaccgagaggcccttttgcagtacttggagcaacaggcactagaagtcaaagagcgtgatgacttggtgcccttcacaggcgagaagaaggggaaaccctatattcagcccaagagggaaatcccagcagaggagcagatcaccctggagcctgagctggaggaggcactggcacatgccacagatgctgaaatgtgtgacattgcagcaattctggacatgtacacactgatgagt

SEQ ID NO: 175808 - protein, 285 aa, Artificial Sequence
  derived and/or modified sequence
MPAATVDHSQRICEVWACNLDEEMKKIRQVIRKYNYVAMDTEFPGVVARPIGEFRSNADYQYQLLRCNVDLLKIIQLGLTFMNEQGEYPPGTSTWQFNFKFNLTEDMYAQDSIELLTTSGIQFKKHEEEGIETQYFAELLMTSGVVLCEGVKWLSFHSGYDFGYLIKILTNSNLPEEELDFFEILRLFFPVIYDVKYLMKSCKNLKGGLQEVAEQLELERIGPQHQAGSDSLLTGMAFFKMREMFFEDHIDDAKYCGHLYGLGSGSSYVQNGTGNAYEEEANKQS

SEQ ID NO: 175809 - protein, 41 aa, Artificial Sequence
  derived and/or modified sequence
MPAATVDHSQRICEVWACNLDEEMKKIRQVIRKYNYVAMDT

SEQ ID NO: 175810 - protein, 147 aa, Artificial Sequence
  derived and/or modified sequence
MPAATVDHSQRICEVWACNLDEEMKKIRQVIRKYNYVAMDTEFPGVVARPIGEFRSNADYQYQLLRCNVDLLKIIQLGLTFMNEQGEYPPGTSTWQFNFKFNLTEDMYAQDSIELLTTSGIQFKKHEEEGIETQYFAELLMTSGVVL

SEQ ID NO: 175811 - DNA, 858 bp, Artificial Sequence
  derived and/or modified sequence
atgccagccgcaacggtggatcactctcaacggatttgtgaagtgtgggcctgtaaccttgacgaggagatgaagaagattagacaggttatcaggaaatataactacgtcgccatggataccgaattccccggggtggtcgcacggccaatcggagaattcaggtctaatgcagactatcagtaccaactccttcggtgcaatgtggacctgctgaaaatcatccaactcggcttaacattcatgaatgaacaaggcgaatatcctcccgggacaagcacctggcagttcaattttaagttcaacctaacagaagacatgtacgcacaggattcaatcgaactgttaactacctccggaatccagttcaaaaaacacgaggaggagggcatcgaaactcagtattttgcagaactcctgatgacctcaggagtcgtgttatgtgagggagtcaaatggctgtctttccactcggggtacgacttcggatacttgatcaagatactaaccaattctaatttgcctgaagaagaattagattttttcgaaattctccggctcttttttcctgtgatttacgatgtcaagtatttaatgaagagctgtaaaaatctgaaggggggattgcaagaagtcgccgagcagctcgagctggagcggattggcccacagcatcaggccggcagcgacagcctgctgactggtatggctttcttcaaaatgcgggagatgttttttgaggatcatattgacgatgctaaatattgcggacatctgtatggtctcgggtcaggctcaagctacgtgcagaacggaacaggcaatgcatacgaggaggaggccaacaaacagtcctag

SEQ ID NO: 175812 - DNA, 858 bp, Artificial Sequence
  derived and/or modified sequence
atgcctgctgccaccgtggaccacagccagaggatctgtgaggtgtgggcctgcaacctggatgaggagatgaagaagatccggcaggtgatcaggaagtacaactacgtggccatggacacagagttccctggggtggtggcccggcccatcggggagttccgcagcaatgctgactaccagtaccagctgctgcgctgcaatgtggacctgctgaagatcatccagctgggcctgaccttcatgaatgagcagggcgagtacccacctggcaccagcacctggcagttcaacttcaagttcaacctgacagaggacatgtatgcccaggacagcattgagctgctgaccaccagcggcatccagttcaagaagcatgaggaggagggcatcgagacccagtactttgctgagctgctgatgaccagcggcgtggtgctgtgtgagggcgtgaagtggctgtccttccacagcggctatgactttggctacctgatcaagatcctgaccaacagcaacctgcctgaggaggagctggacttctttgagatcctgcggctcttcttccctgtgatctatgatgtgaagtacctgatgaagagctgcaagaacctgaagggcggcctgcaggaggtggccgagcagctggagctggagagaattggcccccagcaccaggccggcagtgacagcctgctgaccggcatggccttcttcaagatgagggagatgttctttgaggaccacattgatgatgccaagtactgcggccacctgtatggcctgggcagcggcagcagctatgtgcagaatggaactggaaatgcctatgaggaggaggccaacaagcagagctag

SEQ ID NO: 175813 - DNA, 858 bp, Artificial Sequence
  derived and/or modified sequence
atgcccgccgccaccgtggaccacagccagcggatctgcgaggtgtgggcctgtaatttggatgaagagatgaaaaagatccgacaggtgattcggaaatataattatgtggcaatggatacagaattccctggcgtggttgcacgccctattggcgaattccgctcgaatgccgactatcagtatcaactcctgcgctgcaacgtggacctgctgaaaatcattcagctgggtctaactttcatgaacgagcagggtgagtatccacccgggactagcacttggcagttcaattttaagtttaacttgacagaagacatgtatgcccaggattcaattgaactgctcacgacgtctggcatacagttcaagaagcatgaggaggaaggcattgaaactcagtatttcgccgagctgttgatgacgtctggcgttgtgctatgcgaaggagtgaagtggctgagcttccatagcgggtacgacttcgggtatttgataaagattctgacaaactcaaacctgcccgaggaagagctcgatttcttcgagatattgcgattgttctttccagtcatctacgacgtgaagtacctaatgaaatcttgtaagaatctgaaggggggtctgcaagaggttgccgaacagctggagctggaacgcattggccctcagcatcaggccggatctgacagtttgctaactgggatggcattcttcaaaatgcgggagatgtttttcgaagaccacatcgacgacgccaagtattgcgggcatctctatggtcttggatcaggcagctcctatgttcagaatggcacaggaaatgcgtacgaggaggaggcaaacaaacagtcctag

SEQ ID NO: 175814 - DNA, 858 bp, Artificial Sequence
  derived and/or modified sequence
atgccagcagccacggtcgatcattcccagagaatctgcgaggtctgggcttgtaacctggatgaggaaatgaagaaaattcgacaggtgatcaggaagtataactatgtggctatggacaccgaatttcctggtgtcgtggccaggcctattggagagtttcgttccaacgccgattatcagtaccagctgctcagatgtaacgtggatttgttgaagatcatccaactaggtttaacattcatgaatgaacagggcgaataccccccaggaacctccacatggcagtttaacttcaaatttaatctcacggaggatatgtatgcacaagatagtatcgaactcctgaccacaagcgggatacagttcaaaaagcatgaggaggagggaattgaaacacagtacttcgccgaacttcttatgactagtggtgtggtgctgtgcgaaggtgtgaagtggctaagctttcactcggggtatgattttggctatttgattaagatactgaccaactctaacctacctgaggaagagctggactttttcgagattttgcggctattcttccccgtgatctacgacgtgaagtacctgatgaaatcctgcaaaaacctcaagggagggctccaggaggttgctgaacagttggagctcgagcggattggtccgcagcatcaggctgggagcgatagcctcctaaccgggatggcctttttcaagatgcgggagatgttcttcgaggatcatatcgatgacgctaaatattgtggccatttgtacggcctagggtctggctctagctacgtgcagaatgggacaggaaatgcatatgaagaagaagctaataagcagagttag

SEQ ID NO: 175815 - DNA, 2649 bp, Artificial Sequence
  derived and/or modified sequence
atctagcgcccccgtcaggacgtgcgaaaagcgacggcgcagcacggtgcggcgcagctcctgctcgcctttcccttcgctgggcgagaggtgtctatggggcacccgctgccgccgccgctaccgccaccgccaccgccaccgccgccgagtgctgtctctatggcgaggaggaggaggaggagcgcgagctcagcgacacaagtacataaataaaggataaaatattttatgaaacaaatcttcaatcaagtataacattttgatgcttggcatctagactcccttgtgccctcactatgccagcggcaactgtagatcatagccaaagaatttgtgaagtttgggcttgcaacttggatgaagagatgaagaaaattcgtcaagttatccgaaaatataattacgttgctatggacaccgagtttccaggtgtggttgcaagacccattggagaattcaggagcaatgctgactatcaataccaactattgcggtgtaatgtagacttgttaaagataattcagctaggactgacatttatgaatgagcaaggagaataccctccaggaacttcaacttggcagtttaattttaaatttaatttgacggaggacatgtatgcccaggactctatagagctactaacaacatctggtatccagtttaaaaaacatgaggaggaaggaattgaaacccagtactttgcagaacttcttatgacttctggagtggtcctctgtgaaggggtcaaatggttgtcatttcatagcggttacgactttggctacttaatcaaaatcctaaccaactctaacttgcctgaagaagaacttgacttctttgagatccttcgattgttttttcctgtcatttatgatgtgaagtacctcatgaagagctgcaaaaatctcaaaggtggattacaggaggtggcagaacagttagagctggaacggataggaccacaacatcaggcaggatctgattcattgctcacaggaatggcctttttcaaaatgagagaaatgttctttgaagatcatattgatgatgccaaatattgtggtcatttgtatggccttggttctggttcatcctatgtacagaatggcacagggaatgcatatgaagaggaagccaacaagcagtcatgacatgaaatagtccttttatttttatttcgagctacacacatgcttgtatataggttttatctctggttgaatccctcgaacaatagacagtacctttcccccccctttcatggcccattttattgtctgcctttcagtactaagtatgaccgttcctatctcagatcttaataaaaagaaaaaaaaaaacgcattcaggttaaatttggccttaatttaatatacttgttagcaagcgtgtgtgacagagagtggggaaagctacatcattgaatattttgataaactttaccgacttgagtttggtttatttttcccttttcctaaattaactagcactgactgtaatttatttccctgtttcacgtctctcccttccattctgcaggagttttagctatttgagatcgtggaccatcagttttgcactttagagagtgtttctgactctaaacctgttttatcagaaaatttgttttttcttgatcttagctggaaaaatctgccaactttacacagtatttacttggttttgacccacagaatatagcacgttgtgcaaactgtcgattcagcgaaacttaaaaaagacaagaaactactgaggagcttagtaactgctgtttctgtacgtagtgtttaatcttccaagcacatctagtgtctgtcagtttctaattggcatgtgtaggctgctctgtgactgaagaattttcaaaccagctttacacccttcaggaaaaatcccttgtgattggatgtttactatctgccaggaaactggtactcaagatgttgaagctacagttattttatgatagcacacttcccttgatctgcttatttttattccatcaccatttaccctttttttttttttaaattttgtagccattcttatgatgctcttgatttgttggttacacaaatcaattttattaaaaatccaaagataagtctttaggtatattttgtaccaaattaaattagaagacaaaaattgtgctttcatagttgctacaaaggtaaataatggagagatttggtacaaaacaacaaaatatatatatattctcatatatatatatatagctgataaaattacctgaggagtgtaatgcttatttttttgtgtatatctttgcaatctattttatatatattgacaaaagagactgtgaaatacttagccatgcagaatatgtgaccagaccagagcatgtgtaggaagactttacggtaatcattaactctaccccgaaatgatggactacaagttataatgtgtgttacctacacttcaatcagtaatattagcaaatctccaaatgttagtcacattggtttgtctcccttgtacattctttattcatgatattacagtgctgtaactgggtggtcctttttaaacaaaacattatttgcaaaacagagggtattatttgtttttaaagcttttgtaaataaaggcttcaaaatgttttcttataaa

SEQ ID NO: 175816 - DNA, 858 bp, Artificial Sequence
  derived and/or modified sequence
atgcccgccgccaccgtggaccacagccagagaatctgcgaggtgtgggcctgcaacctggacgaggagatgaagaagatcagacaggtgatcagaaagtacaactacgtggccatggacaccgagttccccggcgtggtggccagacccatcggcgagttcagaagcaacgccgactaccagtaccagctgctgagatgcaacgtggacctgctgaagatcatccagctgggcctgaccttcatgaacgagcagggcgagtacccccccggcaccagcacctggcagttcaacttcaagttcaacctgaccgaggacatgtacgcccaggacagcatcgagctgctgaccaccagcggcatccagttcaagaagcacgaggaggagggcatcgagacccagtacttcgccgagctgctgatgaccagcggcgtggtgctgtgcgagggcgtgaagtggctgagcttccacagcggctacgacttcggctacctgatcaagatcctgaccaacagcaacctgcccgaggaggagctggacttcttcgagatcctgagactgttcttccccgtgatctacgacgtgaagtacctgatgaagagctgcaagaacctgaagggcggcctgcaggaggtggccgagcagctggagctggagagaatcggcccccagcaccaggccggcagcgacagcctgctgaccggcatggccttcttcaagatgagagagatgttcttcgaggaccacatcgacgacgccaagtactgcggccacctgtacggcctgggcagcggcagcagctacgtgcagaacggcaccggcaacgcctacgaggaggaggccaacaagcagagctag

SEQ ID NO: 175817 - protein, 889 aa, Artificial Sequence
  derived and/or modified sequence
MEEGAPRQPGPSQWPPEDEKEVIRRAIQKELKIKEGVENLRRVATDRRHLGHVQQLLRSSNRRLEQLHGELRELHARILLPGPGPGPAEPVASGPRPWAEQLRARHLEALRRQLHVELKVKQGAENMTHTCASGTPKERKLLAAAQQMLRDSQLKVALLRMKISSLEASGSPEPGPELLAEELQHRLHVEAAVAEGAKNVVKLLSSRRTQDRKALAEAQAQLQESSQKLDLLRLALEQLLEQLPPAHPLRSRVTRELRAAVPGYPQPSGTPVKPTALTGTLQVRLLGCEQLLTAVPGRSPAAALASSPSEGWLRTKAKHQRGRGELASEVLAVLKVDNRVVGQTGWGQVAEQSWDQTFVIPLERARELEIGVHWRDWRQLCGVAFLRLEDFLDNACHQLSLSLVPQGLLFAQVTFCDPVIERRPRLQRQERIFSKRRGQDFLRASQMNLGMAAWGRLVMNLLPPCSSPSTISPPKGCPRTPTTLREASDPATPSNFLPKKTPLGEEMTPPPKPPRLYLPQEPTSEETPRTKRPHMEPRTRRGPSPPASPTRKPPRLQDFRCLAVLGRGHFGKVLLVQFKGTGKYYAIKALKKQEVLSRDEIESLYCEKRILEAVGCTGHPFLLSLLACFQTSSHACFVTEFVPGGDLMMQIHEDVFPEPQARFYVACVVLGLQFLHEKKIIYRDLKLDNLLLDAQGFLKIADFGLCKEGIGFGDRTSTFCGTPEFLAPEVLTQEAYTRAVDWWGLGVLLYEMLVGECPFPGDTEEEVFDCIVNMDAPYPGFLSVQGLEFIQKLLQKCPEKRLGAGEQDAEEIKVQPFFRTTNWQALLARTIQPPFVPTLCGPADLRYFEGEFTGLPPALTPPAPHSLLTARQQAAFRDFDFVSERFLEP

SEQ ID NO: 175818 - DNA, 2670 bp, Artificial Sequence
  derived and/or modified sequence
atggaagagggtgcaccccgacagccaggcccctcccagtggccacccgaagatgagaaggaagtcatcagacgggctatacagaaggaactcaaaatcaaggagggcgttgaaaatctgcgtagggtggcaacagataggcgtcacttgggccacgtgcagcagctgctgagatccagtaataggaggctggagcaacttcatggagagttgagagaactgcacgcccggatactgctgccaggccccggtccaggcccagcagagcctgtggccagtggcccccgtccatgggctgaacaactgcgtgcccgccacctggaagcccttcgacggcagctgcatgtagaactgaaagtaaagcagggagccgagaacatgacacacacctgtgctagcggaacacctaaagaacggaagctcctcgctgccgcccagcagatgttgagggactctcagttaaaagtcgccttgttgcggatgaagatctcctccctcgaggcgagtggaagcccagagccagggcccgagctactggctgaggaactgcagcatcggctccacgttgaagctgccgtcgcagaaggtgctaagaacgtggtcaaattgctgtcttcgcggaggacacaggatcggaaagctctagcagaggcccaggcccagctgcaggaatcctctcaaaagctcgatctcttacgcctcgccctggaacagctgctcgagcaactgccaccagctcatcctctgagaagtcgcgtaacacgagagctccgggctgccgtgcccggctatccacagccttccgggactcctgtcaagcccacagctctgacgggcacgttacaggtcaggctcctgggctgcgaacaactgcttacagcagtgcccggtcgatcaccagccgcagcattggcctcctccccatccgagggctggctcaggactaaggcgaaacaccaaagaggccgaggcgagttggcttctgaagtgctggcagtgcttaaagttgacaacagggtcgtgggacaaaccggatggggccaggtggcagaacaaagttgggatcagactttcgtgattccattggaacgcgcaagagagctggagattggtgtgcactggcgggattggcgccagttatgtggcgtagccttcctgaggttggaggacttcctggataatgcctgccatcagctgtctcttagtctggtccctcaaggcctcttatttgcccaggtgacattctgcgaccccgtgatagaacggcgaccaaggttacagcgccaagaaagaatcttcagcaagagaagaggacaggattttctgagggcctcccaaatgaacttgggcatggcagcttggggtcgactggtgatgaatctgctgccaccctgctccagtccttccaccatttcccctcctaagggttgccccaggactccaaccaccttgagagaggcctccgaccctgccacaccaagtaacttcctgccaaagaagacaccactcggagaggagatgaccccgcctccgaaacccccaaggctttatttgccccaagagcccacctctgaggagacccctcgaaccaagaggccccacatggagcccaggacccggcgcggtccctccccacctgccagcccgactcgaaaacccccacggctacaagactttcgttgcctggccgtgctaggaagaggacattttggcaaagtacttctggtgcagttcaaaggcacagggaagtactacgccataaaagcactcaagaagcaagaggttctaagtcgcgacgaaattgagagtctttattgcgaaaagcgcatccttgaggcggttggttgcaccggccacccctttcttctgtccttgctggcatgctttcagaccagtagccatgcctgcttcgtgacagagttcgtacccggaggggacctgatgatgcagatacacgaggacgtgtttcctgagccacaggcccgtttctacgtagcctgcgtagtgctcggcctccagttcctgcatgaaaagaaaatcatatatagggatctgaaactcgataacctgcttcttgacgcgcagggcttccttaagatcgccgattttggattgtgtaaggaaggtatagggttcggggaccgaacatctacattctgtggaacacccgagtttctcgccccagaggttcttacgcaggaagcctacacacgggcagtcgactggtgggggcttggtgttctcctgtatgagatgctggtgggagagtgtccctttcctggcgacaccgaggaggaggtctttgattgcatcgttaatatggatgctccatatccgggatttctttccgttcaaggtctagaatttatacaaaagctgcttcagaagtgccctgagaagcggctcggggccggagaacaggatgccgaagagatcaaagttcaaccatttttcaggacgaccaattggcaggcgctgttagcaagaactatacaacctccattcgtcccaacattatgcggcccagctgacctcaggtactttgagggtgaattcacagggctcccaccagctctcacccccccggccccacattcattgctgactgccaggcagcaggctgccttcagggattttgatttcgtgtccgagcgcttcctagaaccttag

SEQ ID NO: 175819 - DNA, 2670 bp, Artificial Sequence
  derived and/or modified sequence
atggaggagggcgccccccggcagcccggccccagccagtggcccccagaagatgagaaggaggtgatccggcgggccatccagaaggagctgaagatcaaggagggcgtggagaacctgcggcgggtggccacagacagaagacacctgggccacgtgcagcagctgctgcggagcagcaacagaaggctggagcagctgcacggggagctgcgggagctgcacgcccgcatcctgctgcccggccctggccctggccctgctgagcctgtggccagcggcccccggccctgggccgagcagctgcgggcccggcacctggaggccctgcggcggcagctgcacgtggagctgaaggtgaagcagggcgctgagaacatgacccacacctgtgccagcggcacccccaaggagaggaagctgctggccgccgcccagcagatgctgcgggacagccagctgaaggtggccctgctgaggatgaagatcagcagcctggaggccagcggcagccctgagcccggccctgagctgctggccgaggagctgcagcaccggctgcacgtggaggccgctgtggccgagggcgccaagaatgtggtgaagctgctgagcagcaggaggacccaggacaggaaggccctggccgaggcccaggcccagctgcaggagagcagccagaagctggacctgctgcggctggccctggagcagctgctggagcagctgcccccagcccaccccctgcggagccgggtgacccgggagctgcgggctgctgtgcccggctacccccagcccagcggcacccctgtgaagcccacagccctgaccggcaccctgcaggtgcggctgctgggctgtgagcagctgctgacagctgtgcccggccgcagccctgctgctgccctggccagcagccccagcgagggctggctgcggaccaaggccaagcaccagaggggccgcggggagctggccagcgaggtgctggccgtgctgaaggtggacaacagagtggtgggccagacaggctggggccaggtggccgagcagagctgggaccagaccttcgtcatccccctggagcgggcccgggagctggagattggagtgcactggagggactggaggcagctgtgtggggtggccttcctgcggctggaggacttcctggacaatgcctgccaccagctgagcctgagcctggtgccccagggcctgctgtttgcccaggtgaccttctgtgaccccgtcatcgagcggcggccccggctgcagaggcaggagcgcatcttcagcaagaggcggggccaggacttcctgcgggccagccagatgaacctgggcatggccgcctggggccgcctggtgatgaacctgctgcccccctgcagcagccccagcaccatcagcccccccaagggctgccccaggacccccaccaccctgcgggaggccagtgaccctgccacccccagcaacttcctgcccaagaagacccccctgggggaggagatgaccccaccacccaagccaccccggctgtacctgccccaggagcccaccagcgaggagacccccaggaccaagaggccccacatggagcccaggacccggcggggccccagccccccagccagccccaccaggaagccaccccggctgcaggacttccgctgcctggccgtgctgggccggggccactttgggaaggtgctgctggtgcagttcaagggcaccgggaagtactatgccatcaaggccctgaagaagcaggaggtgctgagcagagatgaaattgagagcctgtactgtgagaagaggatcctggaggccgtgggctgcaccggccaccccttcctgctgagcctgctggcctgcttccagaccagcagccacgcctgctttgtgacagaatttgtgcctggaggagacctgatgatgcagatccatgaagatgtgtttcctgagccccaggcccgcttctacgtggcctgtgtggtgctgggcctgcagttcctgcacgagaagaagatcatctacagagacctgaagctggacaacctgctgctggatgcccagggcttcctgaagattgctgactttggcctgtgcaaggagggcatcggctttggagacaggaccagcaccttctgtggcaccccagagttcctggcccctgaggtgctgacccaggaggcctacaccagggctgtggactggtggggcctgggcgtgctgctgtatgagatgctggtgggggagtgccccttccctggggacacagaggaggaggtgtttgactgcatcgtgaacatggatgccccctacccaggcttcctgtctgtgcagggcctggagttcatccagaagctgctgcagaagtgcccagagaagaggctgggcgctggggagcaggatgctgaggagatcaaggtgcagcccttcttccgcaccaccaactggcaggccctgctggcccggaccatccagcccccatttgtgcccaccctgtgtggccctgctgacctgcgctactttgaaggagagttcaccggcctgcccccagccctgaccccaccagccccccacagcctgctgacagcccggcagcaggccgccttccgggactttgattttgtgtctgagcgcttcctggagccctag
